United States Patent Application Publication US 2012/0309003 A1 - sequence listing, part 2

SEQ ID NO: 189 - DNA, 335296 bp, Escherichia coli
  modified_base (335271)..(335271): a, c, t, g, unknown or other
  modified_base (335273)..(335273): a, c, t, g, unknown or other
  modified_base (335277)..(335277): a, c, t, g, unknown or other
  modified_base (335279)..(335279): a, c, t, g, unknown or other
  modified_base (335281)..(335283): a, c, t, g, unknown or other
  modified_base (335286)..(335287): a, c, t, g, unknown or other
atgaaatcagctatcaaccttccatggtatcgcagaaatgagctttacagataactggtcagacgaagaattcattcgtcagatgaaagaattattcggtaacgaaggagatattcatgtcacttgcaaccaccgtgaaggagagcaagttacagagacgcatgtacacgcagcaggcgttaatgtatcgccagaagggagatcgtgaaggtgttcgcgtctttttaaatgcggcaaagactgaagtattaaatcagcgttatttccttgggccatgcccattctgagaacaaacatatgagcaaagaattttacgcaagactggcagctattcaggagaacttgaacgcgccaaagaatcagtacaactcattcggtaaatataaatacagaagctgcgaagacattcttgaaggcgttaagccgttactgaatggcctgtttttatcaatcagcgatgaagttgtgttgattggtgatcggtattacgtgaaagccacggcaactattaccgatggcgaaaacagtcatacggcaaccgctcttgcacgagaggaagaaagcaagaaaggaatggattctgcacaagttacgggagctacaagctcttatgcacgcaagtattgcctcaatggtttgttcggcattgatgatgcgaaagatgcagataccgacgagcataaacatcagcagaacgcagcagcaaagcaatcaaaaccatcacctacacctgaacaggttctaaaagcattcactgacgcagcattgcagaaaaacaccgtggaagagcttaaacaggcgttcgccaaagcgtggaagatgctcgaaggcacaccggagcagcacaaagcgcaggacgtttacaacatcagacgagacgaattagaaggagctgctgcttaatggcacattcgattactgtaagactaaacaagcccgcaagagagtttcaggccggggaaaatatcggattcaacatccgtgctggcgttcagtattacgatcgccagacaaaaaagaaagaatggacaaactacagcaccgttgtatttgccaagccgggagcgcaagcggattactaccgtagtgttcttgttgaaggtggcattgtggaaattaccggagaaaacatcagggttgatgtttatcaggggcaaaatggtcaatccatcactcttgaattactgaatgcaaagattggatttgcaacttcaggaaacagcccgcagcagcaaagtagtaaccagcagaacactcctgtatacgacgattccatcccattctgatttagaaaaataaggatttaattatgccagcgcctctgtatggtgcggatgacccgcgccgctgttccggcaattccgtatcggaggtgctggataaattcaggaaaaactacgacctgataatgtcgctaccgcaggaaacgaaagaggaaaaggaatttcgccattgtatatggcttgcagagaaagaagaacgcgagcgaatttaccagacatcaatccgaccattccgcaaagccacatacacccacttccctgaatatatcgacccgcgcctgcgtaattaccgctcacgctatggcgctatcagtaatgactgaggaattaacaatgaaaacaatgaagctaaacatcgacctcggaaaatacgttattaccggaacaaaacacgatctgattcttagcgaaagaggaattatcaaagaagacgagaatgcagggaaagaaacactaagtcgtatcggttattacagcaagtttgagcatctggttaaagagttatgcaaccgtgaaatcctgttatctcaggcgcagacgctacaggatattcagcagcatatcgagactttaggtgtgtcacttagcatggctattgaccagttcgtggagagtaaatcatgagaggacttgcatacaatcccggcattcttccggcagaaatgattattcgccagcgcgtaaagccaatgccatcgagagaggaattgcttaagagaaattcttttccatcagtgaatcaaaacaaatatctgaatgcgatgtggcgtaaaggaggcaaccagtgagcaagattgactatcaggcactgcgtgagttagcaaaacaggcaacacagggcgaatgggtcgcattcatttcgccgggcactgatacatatgcggtgcatacgccgggggatgaacgttgcggagacattatcaaatggcctggctttgacggccagaaaaatgcagagaacaacgcagaatttatcgcagctttcaaccctaaagtagtgcaggcactgctggatgaacgggaaagaaaccagcaatatatcaaacgccgcgaccaggagaacgaggacattgcgctaacggtagggaagctgcgtgttgagcttgaggagacaaaatcaaaactcaacgagcagcgtaagtattacgaaggtgttatctcggatggaagtaagcgcatagcagaactggaagcacgggaaataaaaccagccaaaggtgaagttcttgtcgttgtttctggttttactggttgcggaaaaagcgccattgccggggaaatagaaatcgcgatgaaggctattggtgtaccggttcagtggactaatggcgatgcggaaaagcgcatgacaggagctgactggctgacagcgattgagatgtacaaaccaacagtgcgcatcgtggaagttaatgtgccacgcgccgcaggcattcgcatcaaagagggtgagtagtgcgtgtggcatgtatcggcttgttaccgtacccgactcgtttttgggcttctgcgctaattgcaaagccacatgtcctgatagctgacaacatcatcccggcaccaaagcgccgccataccggtattgcagcggcacgacgagcagcaaagagacgcaggagagcaaaacgatgaaaaaccgtaaagcaaagattctgttagctcgcagaaacggtgttggggtctggcgatgggtgaggattagtaacagacgagtgaggttgatggggtgttgcggggtgatgggtcacagttgttgcaaaaagcccagcgcggcgcaaaaccgctggaaaaactacttgcggactaaaggagagtgatatggctatcgctgcaagttacaccatgcatctctattgtgattgtcgccagtgtacggaaggtgtatatccagtgccagacttcggtgagtatatcggtacgtcatggtctggttgtgcaaaagaggcccgtaaagacgggtggcgaataagcaaagacaaaacacgtacttttgcgcccgggcataaagttttgaggattaacacatgaccactattaccaaagaacgtattgaattgttcattaaaaatccgcttgaaaacgggcttactcgtggcgaacaaatggaactggcacgaattgcactggcatcactggaacgcgaacagattcgccacgagcatgccaaatggtctgactccacatttggctgcgttggccccattggtccactgaaacacctctcaaaagaggcactggaagccgcagccgaaccagacgatcttagcgagtgggctgatatgcagttcctgttgtgggatgcacagcgccgtgctggtatcagtgatgctgaaattaccgctgctatggaaaataaattgaagatcaacatggaacgccagtggcctgaaccaaaagatggtgagcctcgcttgcacattaaagaacccggcaactctccggtaactccggatggctggataagctgtagtgagcgaatgccggataccaaaacagccgttcttgttgccgtggagtttgacaggaaaggtgactggcgaatgaaatgggcgacttacatcccgggtcatcctgacgctaatgatgggtggataattcctggtgcgtcgtggaaaccgtcacactggatgccgctaccagagcctccactttgaaagcgaagcttatacatatcttttacatcagcaatctattgttaatctccaatcaatgttacgttgtcatctcactcatgctttggaggtagtgatatgtcttgtccaaaatgcggttctggaaatattgcaaaagaaaaaacaatgcgtggatggtctggtgattatgtgtgctgcgattgcggatacaacgactctaaagacgcatttggagagcgtggtaaaaacgagtttgttaaaattaataaagaacgcgaaggcaacgaaaaaagctaatttatttattcatatatgaaaacaatgtaaccaatattcgaattgaagaactgaaagaacaccaagccgcctgatggcggttttttattgcctgatttgcaggttcgattccctattcggagatagcactcatgcaacacgaactacagcctgattcactggttgatttgaaattcatcatggctgatactggcttcggtaaaaccttcatctatgaccggattaagtccggagacctgcctaaagccaaagttatccacgggcgagcaagatggttatatcgtgaccattgtgaattcaaaaataagctcttaagccgcgccaatgggtaaaatagcgggtaaaatatttctcacatctaaaaaacaccattccaatcaatcccctgccgcctcaagtagatgtctgcaggggacaccagatacccttcaaacgaaatctaccttcaccccgtaaaagatgggtttggcagcacacttgccttatatctactcatttttactgcaacaggttgaaatctcagcactgtcagaaagcgctgatgactaaacagccctgagccgggcgatgtaaccatcacacagaatcctgatagcgaaatatggcgtgactcgatacttcactccgcaatgcattccttgatgaattcgcaggaccgtgatacacgggacaggtcactgaatgacgacaatgtcctggaaatcagcgaaccgcgcatctgaagtacatttgagcgactgtaccagaacatgaatgaggcgtttggattaggcgattattagcagggctaagcattttactattattattttccggttgagggatatagagctatcgacaacaaccggaaaaagtttacgtctatattgctgaaggtacaggcgtttccataactatttgctcgcgttttttactcaagaagaaaatgccaaatagcaacatcaggcagacaatacccgaaattgcgaagaaaactgtttggtagcctgcgtggtcaaagagtatcccagtcggcgttgaaagcagcacaatcccaagcgaactggcaatttgaaaaccaatcagaaagatcgtcgacgacaggcgcttatcaaagtttgccacgctgtatttgaagacggatatgacacaaagtggaacctcaatggcatgtaacaacttcactaatgaaataatccaggggttaacgaacagcgcgcaggaaaggatacgcaacgccataatcacaactccgataagtaatgcattttttggccctacccgattcacaaagaaaggaataatcgccatgcacagcgcttcgagtaccacctggaatgagttgagataaccatacaggcgcgttcctacatcgtgtgattcgaataaacctgaataaaagacaggaaaaagttgttgatcaaaaatgttatagaaagaccacgtccccacaataaatatgacgaaaacccagaagtttcgatccttgaaaactgcgataaaatcctctttttttacccctcccgcatctgccgctacgcactggtgatccttatctttaaaacgcatgttgatcatcataaatacagcgccaaatagcgagaccaaccagaagttgatatggggactgatactaaaaaatatgccggcaaagaacgcgccaatagcatagccaaaagatccccaggcgcgcgctgttccatattcgaaatgaaaatttcgcgccattttttcggtgaagctatcaagcaaaccgcatcccgccagataccccaagccaaaaaatagcgcccccagaattagacctacagaaaaattgctttgcagtaacggttcataaacgtaaatcataaacggtccggtcaagaccaggatgaaactcatacaccagatgagcggtttcttcagaccgagtttatcctgaacgatgccgtagaacatcataaatagaatgctggtaaactggttgaccgaataaagtgtacctaattccgtccctgtcaaccctagatgtcctttcagccaaatagcgtataacgaccaccacagcgaccaggaaataaaaaagagaaatgagtaactggatgcaaaacgatagtacgcatttctgaatggaatattcagtgccataattacctgcctgtcgttaaaaaattcacgtcctatttagagataagagcgacttcgccgtttacttctcactattccagttcttgtcgacatggcagcgctgtcattgcccctttcgccgttactgcaagcgctccgcaacgttgagcgagatcgataattcgtcgcatttctctctcatctgtagataatcccgtagaggacagacctgtgagtaacccggcaacgaacgcatctcccgcccccgtgctatcgacacaattcacagacattccagcaaaatggtgaacttgtcctcgataacagaccaccacaccttctgcacctttagtcaccaacagcatggcgatctcatactcttttgccagggcgcatatatcccgatcgttctgtgtttttccactgataagtcgccattcttcttccgagagcttgacgacatccgccagttgtagcgcctgccgcaaacacaagcggagcaaatgctcgtcttgccatagatcttcacgaatattaggatcgaagctgacaaaacctccggcatgccggatcgccgtcatcgcagtaaatgcgctggtacgcgaaggctcggcagacaacgcaattgaacagagatgtaaccattcgccatgtcgccagcagggcaagtctgtcgtctctaaaaaaagatcggcactggggcggaccataaacgtaaatgaacgttccccttgatcgttcagatcgacaagcaccgtggatgtccggtgccattcatcttgcttcagatacgtgatatcgactccctcagttagcagcgttctttgcattaacgcaccaaaaggatcatcccccacccgacctataaacccacttgttccgcctaatctggcgattcccaccgcaacgttagctggcgcgccgccaggacaaggcagtaggcgcccgtctgattctggcaagagatctacgaccgcatcccctaaaacccatactttggctgacatttttttcccttaaattcatctgagttacgcatagtgataaacctctttttcgcaaaatcgtcatggatttactaaaacatgcatattcgatcacaaaacgtcatagttaacgttaacatttgtgatattcatcgcatttatgaaagtaagggactttatttttataaaagttaacgttaacaattcaccaaatttgcttaaccaggatgattaaaatgacgcaatctcgattgcatgcggcgcaaaacgccctagcaaaacttcatgagcaccggggtaacactttctatccccattttcacctcgcgcctcctgccgggtggatgaacgatccaaacggcctgatctggtttaacgatcgttatcacgcgttttatcaacatcatccgatgagcgaacactgggggccaatgcactggggacatgccaccagcgacgatatgatccactggcagcatgagcctattgcgttagcgccaggagacgataatgacaaagacgggtgtttttcaggtagtgctgtcgatgacaatggtgtcctctcacttatctacaccggacacgtctggctcgatggtgcaggtaatgacgatgcaattcgcgaagtacaatgtctggctaccagtcgggatggtattcatttcgagaaacagggtgtgatcctcactccaccagaaggaatcatgcacttccgcgatcctaaagtgtggcgtgaagccgacacatggtggatggtagtcggggcgaaagatccaggcaacacggggcagatcctgctttatcgcggcagttcgttgcgtgaatggaccttcgatcgcgtactggcccacgctgatgcgggtgaaagctatatgtgggaatgtccggactttttcagccttggcgatcagcattatctgatgttttccccgcagggaatgaatgccgagggatacagttaccgaaatcgctttcaaagtggcgtaatacccggaatgtggtcgccaggacgactttttgcacaatccgggcattttactgaacttgataacgggcatgacttttatgcaccacaaagctttttagcgaaggatggtcggcgtattgttatcggctggatggatatgtgggaatcgccaatgccctcaaaacgtgaaggatgggcaggctgcatgacgctggcgcgcgagctatcagagagcaatggcaaacttctacaacgcccggtacacgaagctgagtcgttacgccagcagcatcaatctgtctctccccgcacaatcagcaataaatatgttttgcaggaaaacgcgcaagcagttgagattcagttgcagtgggcgctgaagaacagtgatgccgaacattacggattacagctcggcactggaatgcggctgtatattgataaccaatctgagcgacttgttttgtggcggtattacccacacgagaatttagacggctaccgtagtattcccctcccgcagcgtgacacgctcgccctaaggatatttatcgatacatcatccgtggaagtatttattaacgacggggaagcggtgatgagtagtcgaatctatccgcagccagaagaacgggaactgtcgctttatgcctcccacggagtggctgtgctgcaacatggagcactctggctactgggttaacataatatcaggtggaacaacggatcaacagcgggcaagggatccgcgtcactcttcccccttcacgaccttcaataatatgcaatgcagcttcccgcccgataatgtcatgtggaagctgaattgtggtcagcggcggtaaaaacagatgcccgacgccaaccagattatcaaagcccattacggcgacatcctgcgggattcgtacccccttcgccagaagaacctgataagccacaaaggctgcgcgatcgttaccacatatcagaacatcaaaatctggtttgcccggtttgaagtgggcattgagtaaacttgcgagatcggtgtagtgatcatcacctgttgccatgtgaaattgtttcacctcagccagatctcgtccagcatcacgccaggcctgctcaaatccctgccgacgataccctgttgccaacgcactttccggtagccagaagcataacggttgacgatagcccgccgcgagcaaatgctgtgttgattcatattgtgcagtgtaatcatcagggatataactgggtaacgctgggtcatccgccacacagttcgccaatacaatattttcaccatacagagactcaggcagcgtgatatgtcgcagccccattgtagtatagataatgccatccggacggtgggcaagcagctgacgtgccgcgcgggcagcgtcatcttcagaaaaaatattgattaaaaaactattccagccgaactcgctggcggtttgctcaatggcaagcagaatatcaacagagaaaggagtggtagccgtgtcctgcgccagcacggcgagagtcgacggcttacgtccttgagcgcgcatcttacgggcggaaagatcaggaacataattcagggtctggattgcctgcaatacgcggtcacgcgttgcaggacgcacagattctgcattatgcatcacccgggagactgtcatcatcgacactcccgccaggcgtgcgacatcctttaatgaagccatacccaagccgtttgccgtaaaacgggcactgtagcagaaacagacgtcactggcgagatctaacgccctatcacctgacacagcaatacaataaaaaataacaataattcccggacaattgtccccaattccgcctctgttctcgccaacgagtaaccatataggcaagtaagtaaaacatgccaactggcatcgccaacctggagaagaaaatataaatatggatcattgtgctgccgctgtatcccgacatcagcccggaaattattgcgattgctatcggttcaggtgcaattggctgcacgatcgttacggactcgcttttctggctagtgaagcaatattgcggcgctacgctcaatgaaacatttaaatactatacgacagcgacatttatcgcttcagtcgtcgctctggcgggcacattcctgctgtcatttatcatctaagcgcaaagagacgtactatggaaaacgctaaaatgaactcgctcatcgcccagtatccgttggtaaaggatctggttgctcttaaagaaaccacctggtttaatcctggcacgacctcattggctgaaggtttaccttatgttggcctgaccgaacaggatgttcaggacgcccatgcgcgcttatcccgttttgcaccctatctggcaaaagcatttcctgaaactgctgccactggggggattattgaatcagaactggttgccattccagctatgcaaaaacggctggaaaaagaatatcagcaaccgatcagcgggcaactgttactgaaaaaagatagccatttgcccatttccggctccataaaagcacgcggcgggatttatgaagtcctggcacacgcagaaaaactggctctggaagcggggttgctgacgcttgatgatgactacagcaaactgctttctccggagtttaaacagttctttagccaatacagcattgctgtgggctcaaccggaaatctggggttatcaatcggcattatgagcgcccgcattggctttaaggtgacagttcatatgtctgctgatgcccgggcatggaaaaaagcgaaactgcgcagccatggcgttacggtcgtggaatatgagcaagattatggtgttgccgtcgaggaaggacgtaaagcagcgcagtctgacccgaactgtttctttattgatgacgaaaattcccgcacgttgttccttgggtattccgtcgctggccagcgtcttaaagcgcaatttgcccagcaaggcagtatcgtcgatgctgataaccctctgtttgtctatctgccgtgtggtgttggcggtggtcctggtggcgtcgcattcgggcttaaactggcgtttggcgatcatgttcactgcttttttgccgaaccaacgcactccccttgtatgttgttaggcgtccatacaggattacacgatcagatttctgttcaggatattggtatcgacaaccttaccgcagcggatggccttgcagttggtcgcgcatcaggctttgtcgggcgggcaatggagcgtctgctggatggcttctatacccttagcgatcaaaccatgtatgacatgcttggctggctggcgcaggaagaaggtattcgtcttgaaccttcggcactggcgggtatggccggacctcagcgcgtgtgtgcatcagtaagttaccaacagatgcacggtttcagcgcagaacaactgcgtaataccactcatctggtgtgggcgacgggaggtggaatggtgccggaagaagagatgaatcaatatctggcaaaaggccgttaataacgtttcaacgcagcatcgcaatcctttccctgggtgagcgatgctgccgatggcgcagacttaagatccccggtcttacccgctataaccccctccttttatcatcacccaacgcctttcgctgtaaacggcggtttcgcaaaccaaaccaaaaccgtaagtaagataaaagcaatagccgccatacggaaaatctcatttgcagaaatagaaagtgactgctgggttatttcattattaatttcattaagaactcctgaaagcgaaccatagtatttatccataatttgtgacgatgaattaaacacggggttaaattgatcgatggttgctgtcaactgactatggtgtaacgattcgcgtcgtccccacagcgtcattgtcaacgacgtaccaactgatcctgacaaggtacgaaaaaaattactcatactcgaggcattggcaaatttattatctggcaagcctgaaaacgaaatcgttgttaagggtaaaaagaaacaggcaacggcgaatccctggaaaaactgtggcaaaatgatgcctgtaaaatcaatcgttggcataaatgtcacagaacgccagtaatagcaaaccgcatacatcaaaaaactaaatgtcactaacaaccgcatgtctattttgttgccataacgtcctatcaaaggtgaaattaatagtggcatgatgccgatgggcgcataagcaagtccggcccatatcgcattataccccatcgtttcctggagtaactgcggcataaggacgatcgctccagagtaaaataaatacgcgcatgtgatactcacaataccaatggtaaagttacgggacttaaacaaactgagatcaagaatcgggttctctgaggtcgactcccaaatgactaaagagatcagagaaataactgatactactgttaatattattattgtactcgagttgaaccaatccagatcgcgccctttatcaagcataatttgcaagccaccaacaccgagcactaacagggtcagtcctggtagattcattttgaccggtgaagtttcagtttctcttcctttaagtaaggttaagcataatgtcaggacgataatccccatagggacattgattaaaaatatccaaccccagctaaagttatcgcaaatataaccgcccaatatcggcccacatatcggagcgataatcacggtcattgaccataatgccagagcaaatgttcttttttctggtggataattccttaataataaactctgtgacagtggaattaacggccccgccattaatccctgaacgactctaaaaaatatcagcacatcaagattggtcgataaactacacattaaggaagacagcgaaaaaaaagtgactgaaagtaaaaataaccttaattcgcctattctttgtgccagcctgccggtaacagggatcgcaatggcatttgctacgccaaacgaggtgataacccaggtgccttcgtctgttgatgctcccagaaagccagatattgtcggtattgcgacgttagaaatagtggaatccaacatttgcataaacgtcgctaatgacaatgcaatagtaacgcaccataacgtcccaccggttaatggtgccggagttgatttagtgattgccattaaagttgtccattatgcgaaataatgttgctaatttctttttctatcggactggtatcgataactaaagccttactggtataagccggcatggaggtcacggttgaagccagctcaggcatctcggcaatgtcttcgttcttcgtatcaatagttgctgtcatcgataaaccaatacgcaagggatgttccatgagttcttttggatcaagagaaacttcaaccggtacacgctgaacgattttgatccagttccctgtcgcattttgtgcaggtaataaggagaacgcattgccggttcccatattgatccctgtcacccgaccatgaaacacaacattttcaccataaagatcgctgataatattgaccgattgaccaatccgtacatccgtaagttgtgtttctttaaagttggcattaacccacatttgacgtgccggtacgacagccattaacgattgtccggggctcactgtttcgccgacctgaacacttcgctgggcaatatagccggtaaccggactcttaatatccgtacgtttaagcgccaaccaggcttctttagttgcatccgccgcttcaacgacttgtggctgacggtttaatggtgtgttcattactaaagctttattcgctttataagcctggatagcggcattcaatgccgctttgctacttattaacgtatctttggtatgctccagcgtttcttttgaaataaccccctgcttcgctaacggcactcgacggttataatcttctaaagattgttgatactgaatacgtgctgaagcgacttcggcactgtattgtttatcctgtaagtatagtttattcgtttgccgaacaatatttgccagattatttttagctttattgagtgcgatagtggcatcagttttatccagtgaaactaaaatgtcaccttgtcgaacgtagttcgtatctttatgattaacgacagtgacactacctgagacttgtgcagaaattggatctgcattccccgtgacataggcgtcatctgtactaatcatgtcttctaattccattgaccaataggcataggcacctgaaaacgcaataaataaaactaccgccaataaagaaaagtattttcttctgttagaatgttttttatttgaattaatctgttccactattatctctcatttctcatagatgaaatttatgaattgaatgaaaagagcattcattcttcatatcaaacacagtgcatgtgttgcacattatcccaggaacgttggaggcctaatttaaatgaggtgcaaaaaaaacaacagaggactaaaccgtggcttttgcaatacaattcttacgcctgtaggattagtaagaagacttatagtgccaacttgaaactataaatcatcggtacaatccctgattttattgttgacatttcatttatgccgactatttatatggtatacttgtcgaattatcttaaaggaagctcagattttcttatttttattgagaaaatgagatgacgccttatgtctgtattactacagggagaagggagatgcttcattgcaaagggaataatctatgaacgcaataattattgatgaccatcctcttgctatcgcagcaattcgtaatttattgatcaaaaacgatattgaaatcttagcggagttgactgaagggggaagcgccgttcagcgggtggaaacacttaagcctgatatcgtcatcattgatgtcgatatccccggagttaacggtatccaggtgttagaaacgctgaggaagcgccaatatagcggaattattattattgtctccgctaaaaatgaccatttttacgggaaacattgtgctgatgctggcgctaatggattcgtgagtaaaaaagaaggcatgaacaatatcattgcggctattgaagctgcaaaaaatggctactgctatttccccttctctctcaaccggtttgttggaagtttaacgtccgaccagcaaaaactcgactccttatcgaaacaagaaattagtgtcatgcggtatattcttgatggcaaggataataatgacattgctgaaaaaatgttcatcagcaacaaaactgtcagcacttataaaagtcgcctgatggaaaaattagaatgtaaatcactgatggatctttacacattcgcgcaacgtaacaaaatcggctaatcacatgaagtttttaccctatttttttcttctctgttgtggtctttggtcgaccataagtttcgcagacgaagattacatcgaatatcgtggcatcagtagtaacaaccgtgtcacacttgatccagtacgtctgagcaacaaggaattacgttggttagcgagcaaaaaaatcttgtgattgcagtacacaagtcccaaacggctaccttgttgcataccgattcgcagcaacaggttcgtggtattaatgctgattatttaaatcttttaaaaagagcgttaaatatcaaattaacactccgggaatacgccgatcatcaaaaagcaatggacgcgcttgcagaaggtgaagtcgatatagtgttatcacatttagttacttcgccgcctcttaatagtgacattgctgcaaccaaaccattgataattacctttccggcgctggtaaccacccttcacgactcaatgcgaccgcttacctcaccaaaaccagtaaatattgctcgggtagcaaattaccccccagacgaggtaattcatcaatcgtttccaaaagcaacaattatctcttttacaaatttatatcaggcattagcatccgtatcagccggacagaatgattactttattggtagtaacatcattaccagcagtatgatttcccgctatttcactcactccttaaatgtagtgaaatattataactcgccgcgtcaatataatttttcttgaccagaaaagaatccgtcattcttaatgaagtactcaatagatttgttgatgctttaacaaatgaagttcgctatgaagtttcacaaaattggcttgatacaggaaacctggcctttctgaacaaaccattagaactcactgaacatgaaaaacagtggattaagcaacatcccgatttaaaggtgctggaaaatccttactctcctccctattctatgacggatgaaaatggctcggttcggggcgttatgggggatattcttaatattattaccttgcaaacaggtttaaatttttctccgatcaccgtttcacacaatatccatgctggaacacagcttagccccggaggatgggatataatacctggcgctatttatagtgaagatcgagaaaataatgttttatttgctgaagccttcataacaacgccttacgtttttgtcatgcaaaaagcgcctgacagtgaacaaacattaaaaaaaggaatgaaagttgccattccatattattatgagctgcattcgcaattaaaagagatgtatccggaggttgaatggatacaggtcgataatgccagcgctgcatttcacaaggttaaggaaggtgaacttgatgctctggtcgcgacacagttaaattcgcgttacatgatcgatcattactatcctaatgaactttatcattttcttattcctggcgttccgaatgcatcgctttcgttcgcttttcctcgcggagaaccggaacttaaggatattattaataaagcactgaatgcaattcccccaagcgaagttctgcgcctgacggaaaaatggattaaaatgcccaatgtgaccattgacacatgggacctatatagcgagcaattttatattgttacgacattatccgttttattagttggcagtagccttttatggggattctacctgttacgctcagttcgtcgtcgtaaagtcattcagggtgatttagaaaaccaaatatcattccgaaaagcactctcggattccttaccgaatccaacttatgttgtaaactggcaaggtaatgtcattagtcataatagtgcttttgaacattatttcactgcggattactacaaaaatgcaatgttaccattagaaaacagtgactcaccctttaaagatgttttttctaatgcgcatgaagtcacagcagaaacgaaagaaaatcgaacaatatacacacaggtatttgaaattgataatggcatcgagaaaagatgcattaatcactggcatacattatgcaatcttcctgcaagtgacaatgcagtatatatttgtggttggcaagatattactgaaacgcgtgatctaattaatgcactcgaggtagaaaaaaataaagcgataaaggctaccgtagcaaaaagtcagtttctggcaacgatgagtcacgaaataagaacaccaataagctctattatgggcttcctggaacttctgtcgggttctggtcttagcaaggagcaacgggtggaggcgatttcacttgcctacgccaccggacaatcactcctcggcttaattggtgaaatccttgatgtcgacaaaattgaatcgggtaactatcaacttcaaccacaatgggtcgatatccctactttagtccagaacacttgtcactctttcggtgcgattgctgcaagcaaatcgatcgcattaagttgcagcagtacatttcctgatcattacctggttaagatcgaccctcaggcgtttaagcaggtcttatcaaatttactgagcaatgctctcaaatttaccaccgagggggcagtaaaaattacgacctccctggttcacattgatgacaaccacgctgttatcaaaatgacgattatggattctggaagtggattatcgcaggaagaacaacaacaactctttaaacgctacagccaaacaagtgcaggtcgccagcaaacaggatctggcttaggcttaatgatctgcaaagaattaattaaaaatatgcagggcgatttgtcattagaaagtcatccaggcataggaacaacatttacgatcacaatcccggtagaaattagccagcaagtggcgactgtcgaggcaaaagcagaacaccccatcacactacctgaaaagttgagcatattaatcgcggatgatcatccgaccaacaggctattactcaaacgccagctaaatctattaggatatgatgttgatgaagccactgatggtgtgcaagcgctacacaaagtcagtatgcaacattatgatctgcttattactgacgttaatatgccgaatatggatggttttgagttgactcgcaaactccgtgagcaaaattcttccttacccatctgggggcttacagccaacgcacaggctaacgaacgtgaaaaagggttaagttgcggcatgaacttatgtttgttcaaaccgttgaccctggatgtactgaaaacacatttaagtcagttacaccaggttgcgcatattgcacctcagtatcgccaccttgatatcgaagccctgaaaaataatacggcgaacgatctacaactgatgcaggagattctcatgactttccagcatgaaacgcataaagatctacccgctgcgtttcaagcactagaagctggcgataacagaactttccatcagtgtattcatcgcatccacggtgcggctaacatcctgaatttgcaaaagttgattaatattagccatcagttagaaataacacctgtttcagatgacagtaagcctgaaattcttcagttgctgaactctgtaaaagaacacattgcagagctggaccaggagattgctgttttctgtcagaaaaatgactaaatagcggctcccacaatgttcaaatgtgggagctatttaccagcacatcttacatttatgatgagaactcctggcgaatttgttccccatgctggtcgagcgttgccgctcccggcataacatgcgggtccgcgcagccgctgatttttatcggattacccggcatcattattcccccggcttcaatcaacatatttcttgcctgagtttgtggcaatttaatggcctcagccacacttaataacggcgcgacgggtacaccaacttcatgtattctggctaaccaaacttcagctgcctgcgtttttaacgtccgctcaatatattgtttaagaatagcctggttttgtacgcgtaaaatattgctgctaaatcggggatcattaaccagctccgtaagctccagtgcctggcataacgcagaaaaaagcttgtcattaccacaacaaatcgtaatcggcttatcctgagtattgaaaacatcaaaaggtgccatgtagggatggcgatttcccagacgttgtggtgacttcccagttgcgatatatgccatcagaccatgctccagaaaactcagcgtggcatcaaacatcgctatatcgacatgcgcccctctctggctcttttcgcggccataaagtgcactcactattccgctgaataaatagacaccgccgcatagatccgcaagagaggtaccaacgcgcactggcggagcatcaggatatcctgtttccatcattatcccgctcattgcctgaatgatggtatcgtaggcaggagcatcttttagcggaccggtatgtccgaaacctgacgatgaagcatatatgaggcgcgggttgatttcttgaagcgtttcccatgaaaaccccagtttttccattgtacctgggcgaaaattctcagctaatacatcagcttgtttgagcatatttataaatatacttttatcgtgatcattctttaaatcaagaaccacactctctttgccatgattaataaaactgtaatagagtgactgtccatccacatagggaccaaatgtgcgggtatcatcaccatgacccggcggctcaactttaattacccttgcgcccatattacaaagaagttgagttccgaaaggtccattaaggacatgtgtcatatcgataactaataagccttcaaacggccctttgctttcattatttgtcatttgcttatgccttgaaaaaagccgaaggtgaaaagacacttcggcatttatgtaaaatcaataacatgattaattatgaaaccagtcgactgacataaatccacaagggagccgtgacgacaaagcccagtacgctcacagccaatgacgctgtaccagtacgggtgtagacattaaaccggctggcaataatgattccggagaatgccggcggtaatgcgcctgccagtaccatcatctgcagatgttcgctgttcaaatgacatgccataccaacgagaagcagtgccagtggcatcagaatcagcttcaggaaggtgttataagcaatttcggcactgaactcgaatttatgtgcagccagagtcaaccccgcagcgaataccgctacccctgagttagccttcgcaatcagattaaaggttgggtcccatgctgccggaatttttaccccaaccaacaccaggatcgttgccagaacaggtgcccatactactggctcctttgccgcagaaattaatgcgctcagattactattcttcttaccatccgctcctgaggaaggattcagcaaatacagaccaataggaatagtaattgcgttaacaataatagaaataattgctaccactaaacctgttgatacggaatcaccataaataggatcgagaactgcaaaccccaggaatccaatggtaggtgaacccgcaattaatgcacatacagctgcttctgcatgggtacgtttaaaaaatttgtagcaaccaaaccaggagaaaaagaaacatccgacaataaccacaagtgatacaagggtcagacgagtgtccgcaaaaatcatttccctgtttgcccgggtaatagaaacaaatagagccgcaggaagagcgtagtttaataccagtttattaaatgcgcgggcttgatcttctgaaaaagtttctcgtctgccgctaaaataacccaacagcatgattacgataataggcaataaatcgccaataaaaaatgttagcataatagtatttccgataagggtcccctcaccatcgcataatgagttggcaagaggagacgatgtcagtatttaattaccagcgacttgttttgggttaagtttggtaatatggccactttcagttcctgctgcagggtcgatgaccacattaataatggtcggtttgcgcgactgaataccggtggttaaagcatgacgaagttcatctgtcgtggtgacgttatagccaacgccacgaaacgcatccattaatttgtcataccttgcatggtgcaacagatccgttggtgatggtgcaccagcgccactgagatcaacaccgtctcctctgtagatgccgccattattaaaaataacgatcgtcaccggcaggttatatcgacaaatcgtttcaatttccatcccactgaaaccaaaagcactatcaccttcaatggcgacaaccggagaaccagaagtcacgctagcaccgatggcatagcccataccgatgcccatgacaccccaggtaccacaatccagacgacgacgtggtttatacatatcaataatatttcgtgcattatccagggtatttgcaccttcattaactaaataaatatcctggttctcgcgcaatacgtcgcgcacagcacttaatgcattaaagtaatttaatggttgagtatctgtacttaatttttcatgcattttttgtgcattttgctgcttgtggatatttaaaatatcgcgccataccagtggagtcgtaaatgtgttttgtttcagttctgccagcataccttgcatactggatgcaatatcaccaacgactggcacagcaatggggcggttgctgtcaatttcctgcggttcaatatccagttgaataaactgtgtatctgccgaccatccttttttaccgtgtgccaataaccaattcagtcgtgcaccaacaagcatgacaacgtcagcatttgccagggcaaacgaacgcgcagctgccgcagaaagtggatgcgtatcttcaaggatccctttcgccatagacattggcaggaatggaatctgagtactttcaataaattcacgaagctgttcatcagcttgtgaatacgccgcgcctttgccaaggataattaatggccgttcagcttttgctaaaagcgaaattgcgctagtgactgacttcgggcatggcaataatgctggcgacggattttcaactttaacaatcgtggttaacgcttcgtctttttccatcgtcgcggccaggacatttgctggcaaatcaagataaactccgccagggcgacccgatacagagacccggatagcgcgtgccaatgcaatgccaagatcctgcggctgattaacgcgaaatgctgctttggcatacggttttgccgcattcatttggtccagctcttcataatcaccttgctgtaggtcgacgatcgcgcggtcgctggagccgctaatcatgatcatcggaaaaccatttaccgttgcgttggccaatgcggtcaaaccattgaggaatcctggcgcagaaactgtcaggcagatccccggtttttgggtaagaaaaccgcttgccgcagcggcatagcctgccgactgctcatgacgaaaaccaatataacgaatgccttccgcctgggcatggcgtgccatatccgtcacaggaatacctacaacaccataaatagtgtcaatattattctgttttaatgcttcaacgatgatatgcataccatctgtcatttgaagttgatctgacatgattaataacctcgaaatttttataaattgggagccagaagcccccgttaatatcagatggcgtggttttgcttcattgcagcaatttcatcgtcgctataacccagctcctgcaatacagcagcggtatgttcacctaatagcggcgcagctttaatatccggcgtaaaggcagagaatttcattggacaaccaacggtcagatattttccacgcaacggttgttccacttcaacaacactgccactttggcgcaaagagggatcaagtgaaatttctttcatacttaaaaccggtgcacaaggaatatcaaactgagtcaaataggccaccgcttcatgtttatcaatagtgacagtgtatttttcgatttcagcaaaaatatcgaaaatatgtggctgtcgtgcatgggctgtactgtatgccggatcggtaatccattctggtttgccgatggctttacaggtgttttcccagttttgctcctgaatagtgaaataaatataggcgttaggatcggtttcccagcctttacatttcaggatccagccaggctgaccgccaccacctgcattaccaccgcggggaactgcatcaccaaatgtaccattcggatactgcgggtattcttccagataacccaatttatcgagacgctgctggtcacgtaatttcacgcggcaaaggttcaatacggcatcctgcattgacatggtgactcgttgcccacgccccgttttttcgcgatgcagcaaagcagcaagtaaaccgatcagcaaatgcattccggtgttgctgtcacccaacgctgcagcgcttaccagcggcggaccatcccaaaaacccgtagtggatgccgcgccacccgctgcctgagcaacgttttcataggcttttacattcacataaggcgaacactcatcaaaccctttgatcgaaccaaaaatcagacgtggattgatttcttgaatatgctcccaggtgaagcccatgtgatcaatggcccctggatgaaagttctcgactaagatatcagcttcgcggatcagcttttccattacctctttgccttccgctgttttggtatttaactcaatagaacgtttgttactgttaagcatggtgaagtaaagcgcatcgatatcaggaatatctcgcagctggtgacgcgttacgtcaccaacgccgggacgttcaattttaataacgtcagcgccaaaccaggccagcatttgagtacaagatgggccagattgcacaccggtgaaatcgagaactttaattccttgaagtggagttgacatagcaatacctattagttaattaaatatgtgttaatttagcgtttatttaaggcgtaatatcttctataaataacccgcaaaatatcgtcgtagctgcactcgatatttttaaaatcctgtatcaagtgctgaaaatcatttcatcgccacttccaattcctttctgcatggtaagtagtgaggacgaaaagaagaatatgataaatattgattcgtggtaatcagagagagtcgcgacatttgtgatgttattcttacaactgtaagaagcgccggtgatttacaagtaagggtatgattacgctttttaaagcgtaccataaaacataacataataaatgatttgtgatgacacgggattattgggatttactttgaggaagataaaatgcgtgtttatagaaccgcgagcgccaaataattttatgaccacaacctgtcgtattgtggtcataaaaaattgtcggctggagggagttaaatcctttacctcaatatactgcctgtcagcattagttcacaaacagtgcttcgctgtcgacgatgattccatcttccgcacctttaagcgccaggtttgcctcgtagtattgctttttatcaagcagtttctgcgcatcagcaagtgcattacgagtctgtttaagcggcatcagatattggttttccattacgccaacaccggccaggcgaagctcttccattgcgccctttttatcccctttcgccattttttcattggcaatttttatcgcggcttctttttcgggtgttgctacataactctcagaaattccgacagatgcattaatgacaatatattggtcatcattgagattggtctttttacctggcttagcgaactttgcccattcggtactgtcatctgacaacaaagctgaagcttcattggtcagttcttttgccttttccggatcgccatgaaacagagccaggcgcgctacctgcacgtcacgcatcgcatataaaccttgttcagagatacgctctgctgctgccgttttctgggtttgctgaacttgctgagtttgctgttgtgccgctaccggtgcattatcagcagcccatacagttgaagatgccagaattgctgtgaccatcgtagccataattaaacgtttcatacttacctcattctttaacagttttagaaaacgccgccatcatattgggtgagcatgaaatgagaaatcagagagcaacggtcattttgaaagggttatcttacagttgtagttattatcgcaagaagtattttagtcttacaattgtaggaatctgcttcctgtcgcagagaactattcttatgtaccacaaagagatgtcatttattatatcgatgtaaatattgattaattatatgtaaatacagccataacatcgtaggttctcagtgaaccattttcaggataactttctatgaaagtaaacttaatacttttcagcttatttttattggtctctattatggcatgcaatgtttttgcattttccatttctggtggtgtaagtgagaggagctataaagagactgaaaaaacatcagcgatgacgaccacacactctacaaaacttcagccatcacaggcgattttgtttaagatgagagaagatgcgccaccattaaacctcacagaagaaatcacgcctacttatccgacaaaggcgaattatcttattcatcctgtgcgatagcgtctgtcacatggcaggtgaacaatcatgtctgatgctgatgtgaacacctgcccaaatgagccatcctgacccactatcgcctgccataccccaccataaagcgaatcatcaagccacaagccggggcaagaaacataaatatccccgtcactagttcattaccgccagttaaccacatggtgaagtaataaatgagtgcagcgaggctcaccatgccgaagaaagaagagaccgccgataccacgttcagtacctgaccgatgtagccgcttacgcagacaatacacagggcgagaaacatccataaataaatcatagctcaacctcctgccgcgctaaaaaacctgtaacttcagtcactttaatagtaagacaatccttaacctctggcaatttttgctaagcatcaatgaaaacagcatgttaaatgcaagactgttgtgtacggaaaaatatttactttgcacgattaataatcagtagctgaaagcagtcagcgagtgataaagtacagataccgcattcatgctcctcgtggttatgtcctgactagtctttacactctttacaggaaccattgtcgtacatgatggcccaaccaattgagtgtaccgctgtcgacatggaatcttctgcgatacaacaattcgtatctacagaaggtaactatgtttccacaatgcaaattttcccgcgagtttctacatcctcgctactggctcacatggtttgggcttggtgtactctggctttgggtacagcttccttatcctgttctctgctttctcggcacgcgtattggcgcaatggcgcgaccattcctgaaacgtcgtgaatctatcgcccgtaaaaacctggaactttgtttcccgcagcattctgcggaagaacgcgagaagatgattgccgaaaactttcgttcactcggcatggcgctggtagaaaccggcatggcatggttctggcccgacagtcgcgtacgtaaatggtttgatgttgaagggttggataaccttaaacgcgcacaaatgcaaaatcgcggcgtaatggttgtcggcgtccattttatgtcgctggaactgggcggccgcgtgatgggactgtgccaaccaatgatggctacctatcgtccacataataatcagctgatggaatgggtgcagacccgtgggcgcatgcgctctaacaaagcgatgatcggcagaaataatctgcgcggcattgtcggtgcactgaagaaaggtgaagcggtatggtttgctcccgatcaggattatggtcgtaaaggcagctccttcgcgccgttctttgcggtggaaaatgtcgccacaaccaatggcacctatgttctctcccgtctctctggcgcagccatgttgaccgtaacgatggtaagaaaagcggattacagcggatatcgtttgttcatcaccccagagatggaaggctacccgacagatgaaaatcaagccgctgcctatatgaacaagattatcgagaaagagatcatgcgcgcaccggagcagtacctctggatccaccgtcgctttaaaacgcgcccggtgggagaatcgtcgttgtacatttaacaaactgctcttactctttccctcctcaaatcggccataataacctcatggtttttatggctttttcttaaggttttttccttcgctgaatatctaattattaccgtcagaaattaaactgtcgccgatatgagacacttgtaagttactaaaagtaaataagaaaatgcctcttgtctcgtttcagttttaggcgtacattagcgccgtctcgagcagtttagctcagaattctggggtgatgcccacggtaaaatacagggcttttaaggtcgctttgcccggtgtcaactcactgtatcaggtgtaatgaagtcattcaggcgtaacagtaattacgcggagagatgtaaagtgaaatatttctttatgggcatttcttttatggtcatcgtttgggccggtacttttgccctgatgatctaaaagcaaactgtgcaatgaaaaacaggagccatcaggctcctgtttgcatttctgacgacggtgtttattccgcgttttcgtgaatatgtttgctgctggcgggtagtaaaccgtcggcacggaacatcgctttaatccctctgatggcctgacgaatacggtcgcggttttcaatcagtgcaaagcgaacatgcgtatcaccatagtcgccaaagccaatccccggcgagacacaaaccttcgcttcgttaaggagcttcttggcaaattccagcgatcccatggccgcatatggttccgggattttcgcccagacatacatcgaagccttcggcatttcgaccatccagcccgcttcatgcagccctttaaccaatacatcacggcggcgtttgtactgttcggcaatgtcgcgcacgcactgttgatcgccctcgagtgccgcaatcgccgccacctgcaacggcgtaaaagtgccgtaatcgtgatagcttttgattcgcgccagggcactgaccagcgttttgttgccgaccataaagccgatacgccagcccgccatgttgtagcttttcgacagcgtaaagaactcgactgccacatcgcgtgcacccggtacctgcataattgacggcgctttccagccatcgtagacgatatcggcataggccaggtcatggaccaccagcacatcgtagcgtttcgccagcgccactactttttcgaagaactccagttccacgcattgcgcggttgggtttgacgggaagccgaggatcatcatcttcggtttcggataactttcacgaatggcgcgctccagttcgttgaagaaatcgacaccttccaccagcggcactgagcgtacctgcgccccggcaatcaccgcgccataaatatggatcgggtaacttggattcggcaccagcaccgtgtcaccatgatccagcgtcgccagcatcagatgcgccaggccctctttcgaaccaatagtgacgatggcttctgattccgggtcgatttcaacgtcgtagcgatcctgataccagcgggaaatggcgcgacgtaaccgcggaatgccgcgtgaagtggagtaaccatgcgtgtccgggcgctgggccacagtacataatttttcgacgatatgcggcggagtcgcaccgtccgggttacccatgctgaaatcgataatatcttcgccgcgccgacgcgcagccattttcagttcagcggtgatgttaaaaacgtagggcgggagacgatcaatgcgcgtaaagcgacgttcagggcgagtgtcagccataatttcctcagattaacgttagcgcccggaccgtccgagcgacgctgccacaatggtggctgttttgaaaatagcctgattaatttctgtctgtccagcgttttagaacatttttatcaatggctttaaatgaggaactccacttcaaaaacaggaaatttttctacgctaacaagaaaattaccaccaattttattaacattataatttcaataaatttaccagccagaagtgcattatcaagagatacattgctaatacaccatttatctttcaatccccttttaaatttatggtttttcctcaaaaacggcctgctggtcatcagccttcaggttacctatcatagaggtttaatccttattcagagtcacccgtgcacgaaatattcaacatgctgctggcggtcttcgatcgggcagcgttaatgcttatctgcctgttctttctcatccgtatccgcctgtttcgcgaactgttgcacaagtcggcgcactccccaaaagaattgctcgccgttaccgccattttctcgctgttcgccctgttcagcacctggtccggcgttcccgtagaaggctcgctggtgaacgtacgtattatcgcggtgatgtccggcgggattctgtttggcccgtgggtaggcatcattaccggcgtgattgcgggtattcaccggtatttaattgatatcggcggcgtgacggcgatcccctgctttatcaccagcattctggcgggttgtatatcaggctggataaacctgaaaatccccaaagcacagcgctggcgcgtcggtattctcggcggcatgttgtgtgagacgttgaccatgattctggtaattgtctgggcaccaactaccgcgttggggatcgatatcgtctctaaaatcggcattccaatgatcctcggtagcgtctgtatcggctttattgtgcttctggtgcaaagcgttgagggcgaaaaagaggccagcgccgcgcggcaggccaagctggcgctggatatcgccaacaaaacgctacctctgtttcgccatgtcaatagcgagtcattacgcaaagtttgtgaaattattcgcgatgacattcacgccgatgcggtggcgattaccaataccgatcatgtgctggcctatgttggcgtgggtgaacataactatcagaatggcgatgacttcattagcccgactacccgtcaggcgatgaattacggaaaaatcatcattaaaaacaatgatgaagcccaccgcacaccagagattcattccatgctggtgatcccattgtgggagaaaggcgttgtgaccggaacgctgaaaatttactactgccacgcgcatcagatcacctcgtcattacaggaaatggcggtcggtctgtcgcaaatcatctccacccaactggaggtttcacgcgccgagcagctacgtgaaatggcaaataaggcagagcttcgcgccctgcaaagcaaaattaatccccatttcctgtttaacgctttgaacgctatttcatcatcaatccgtctgaatccggatactgctcgccagctgatctttaatctgtcgcgttatctgcgctataacattgaattaaaagacgatgagcaaatcgatatcaaaaaagagctgtatcaaattaaagactatattgccattgagcaggcccgctttggcgacaagctgacggttatctatgatattgatgaagaggtgaattgctgcattcccagcctgctgatccagccgttggtggagaatgccattgtccacggtattcagccttgcaaaggtaaaggcgttgtcaccatcagcgttgcagagtgcggcaatcgggtacgcattgcggtgcgggataccgggcacggcatcgatccaaaggtgattgagcgggtcgaagcgaatgaaatgccgggcaataaaattggcctgctgaatgttcatcatcgcgtgaagttattgtatggcgaggggctgcatatccgccgcctggaaccaggaacggaaattgcgttttacattcctaaccaacgcaccccagtcgcctcacaggctacgttattgctttgagccggagtgatattgtgaaagtcatcattgttgaagacgaattcctggcacaacaggaactgagctggctaattaaagagcacagccagatggagattgtcggcacctttgacgacggtctggacgtgttgaagtttttgcagcataaccgcgtcgacgccatttttctggatatcaatattccgtcgctggatggcgtgttgctggcgcaaaacatcagccagttcgcccataaaccgtttattgtgttcatcaccgcgtggaaagaacatgcggtagaagcgtttgaactggaggcgtttgactacattctcaaaccgtatcaggagtcacgtattaccgggatgctgcaaaaactggaagcggcctggcaacaacagcagaccagcagtacgcctgccgcgacggtaacgcgtgagaatgacaccattaatctggtgaaagatgagcgaataatcgtcacgccaattaacgatatctattacgccgaagcgcacgagaaaatgacctttgtctatacgcggcgtgaatcctacgtaatgccgatgaacattaccgaattttgcagcaaactgccgccgtcgcattttttccgctgccatcgctcattttgtgtcaatctgaacaaaatacgcgaaatcgaaccgtggtttaataacacctacattctgcgactgaaagatctggattttgaagtgccggtcagccgcagcaaagtgaaagaatttcgccagttaatgcatctttaatcgggaactttcatgaaagcaccaggcttgcccgccgatcaacaatttttcgccgatctgttcagcggcctggtgcttaacccgcaactactggggcgcgtctggtttgccagccagcctgcctcgttaccggtgggcagtttatgtattgattttccccgtctggatatcgtgctgcgcggcgaatacggcaacctgctggaagcaaagcagcagcgaatggtggaaggagaaatgctgtttattccggcacgcgcggctaatttaccgatcaacaacaaaccggtgatgctgttaagcctggtgttcgcaccgacctggcttgggttatcgttttacgatagccgcaccacgtcgttgttgcatcctgctcgccagatccagcttcccagcctgcaacgcggtgaaggtgaagcgatgcttaccgccctcacccatcttagccgttcgccgctggagcagaatatcattcagccactggtgttaagtttgctgcatctttgccgtaacgtggtgaatatgccgccgggcaattcgcagccgcgcggcgattttctctatcacagcatttgtaactgggttcaggataattatgcccagccgctcacccgcgagagcgtggcgcagttttttaatatcacgcccaatcatctgtcaaaactgtttgctcagcatggaacgatgcgttttatcgagtatgtgcgttgggtgcgaatggcgaaggcgaggatgattttgcagaaatatcatctgtcaattcatgaagtggcacagcgttgcggttttccggatagcgactatttttgtcgcgttttccggcgtcagtttggtctgacgccgggagagtacagcgcccgttttcagggctaacgtcagaaggttaattctgtttccagcagcgtcaggatactttgtgcatcttgcgcggcaaacaacgactggcggaagtttttattcaccagtttacgcgccagctgcgagaagactttcacatgattcatcccttcgttagcacccagcgtcagcatgatcaccagttcgacttcgcccatttctgactgccagtcaatcggtttcgccagccgggcaatgctgatactgaaatgacggatccactgagatttggtgtgcgggatcgctacgccaaaaccaacgccggtggtaacaatctcttcccgctgccagacatcttcttccagctcaaacggatgttcagtgcgcccgttaacgccgaggttgccgcacaggaactggatcgcctgctctttattgctaaaatcctgatcaacaaagatattctccagcgccagcagtgggcgaacgtcttcttccggcgtaaaggcggtgagtaacgcttcaatttcctgcgcactgcggcattcacatgcctgacgcgccagttcccgacacgcctcgctatccagttgacgaagctggcttttcaccgccggaatacgcgggctactcatactcagctcatccaggcccagcccaagcagtagcggcagataacggctttcaccgcccagttcaccgcaaatgcctacccatttgccccgctgatgcgcagtggtaacaatctgctgcaacatgcgcaggaacgatggcgtaatcgggttatacagcggcgatacgcgcgggttattacgatcgaccgcatacagatactgggtcatatcgttagaaccgatactgaagaaatcgacctcatcgcagaagtggtcgatgatgtaacacaccgacggcacttccaccatgatacccagagtaatcgtctctgcatgacgcaggccatcgcgcttaagctcaacgatcgctttttggatctcgcccttcacccataagatctgatcgaggctgtgaaccatcgggatcatcaactgggcgttgccaaaactggcagcgcgcaaaatcgcccgtagttgagtgcggaacagggcagcaaattccgggtaaatacgtaccgcgcgatagccgaggaacgggttctcttcctggggaatattcagataaggaatgcttttatcgcctccgatgtccattgtgcggaagataatcggcttgtcgcccgctgccagtagcacctgctggtaggcttcaaattgctcctgctcgtccggcgcgctgtcacgatccatatacagcatttcggtacggaacagcccgacgccttccgcgccgttggcaaacgcgcctggtgcttccagagcggtgccaatattcgccgcgatatcaatacgcttgttatcacgggaataggccagctgcgcggcagcctgcgcctgttgtttttggcgtttatccgccagcgtctgcgcaacctgataataaccgctcaccgcgtcattcgggttaatcgccagcacgccgcactgggcgtcaagcaccgccggttgcccggcataacgggcaatcgcatccagcggcaggccgctcagtaccgggatcgccgaggcgcgggccagaatcagggtatgcgaggtgcgcccggttttctccagaatcatgcccgcaagatttttcaaatcaaggctcaaaaactggcttggggttaaatcttcagccaccagaatggtcggttttccagcaccagattgttgcgcggcttcagttccggccgggtgatatgcagcaactgttcgctaatatcgcgaatgtcgctaacacgttcgcgcagataatcgctggcagaagcagaaagcttggcgcaaacctgctccatattgctgatgatcgccgcccccagtccctgatgctgttctgtcatcaggcgacggatattgcctgcaaattcatcatcctgaatcagcgacaaatgagcgctgaggatagttttgctttcgccgtcacgctcacgcaattgctggttcagttgctcggcaagcgttgccaggctgtgctccagccgggtggaatcttgcgcactggcggggattgcccgataactgtcgaggctgtcgctttgtaacagggtcagcgtacccacgccgacgccgcttgccagcacattgccgtacagtaaatccgggttaaggcggcttaatgaacgcggcagcggatgcgccgtcagttctgcctgcgtaggctgaacgctgtcgctgtcgataaagcgcacctggatgtactcttccagcacgcgccgcgcctgctcttcatcgctgccgctaatgttcaggctgcaactgtcattaaatagggtgccggtgccaatcagcgccagcgaacttttcgcatcggcctttgcgttctggcgatggttaataaaggtgacttcactttgccactggctgcactgttctttaagttcccacgccggacgagcatgcagaccgttaggcaaaggacagagaaattgaatcgttaacataaccgctccgggttaatcaggagatcatctgaaatccgtcagttgaacaaccgtctcacgggtaagacgttgaataagggcagataaaagttgctgcatctgcaaaatgtcgcggcaatcggcaatcgatgccgcacaatgtccgtggcgcgtcgctggccccatcaccaccgtgggcacgccggtgccggttaaatgcaccgctccgccgtccgtgccgccgttgctgaacatatccgcctgcaacggcacgccaatttctgccgcgacggtttcgatccaggcggtaagttttggcggcgcaatcagcgacttgtcgcttaacaccagcatcggcccgttaccaatctggcgatggttagccgcgctataatcaaagtttttcgcccagcaggcggtatcaagcacaatggcgacatccggcgacaccgcgcgggtggcagtttgcccgccgcgtaatcccacctcttcgctggaacttgccaccagccacacctccgcaggcagttcggcgtcgtgcagctcacgtagtaacgtcaccagcagatagcaaccgaggcggtcatcaaaggctttccccatcacccgctggtgagggagaacctgaaaagttgtatcaaaggtgacgcgatcgcctggacgaattcccgcctgcatcacttcgtcatacgagcgcgcaccaatgtccacgcgcatggcgctgacgtcattcccctgccggtcgccgtcaagcaggcctggaattttgcactcttcacgggtggtgatgcgcaccggctgcagctggcgggcagccatgcgcacgttgccaaccggcagcacgtcaatagcgccttcgcgggagatgctgcgcaccataaatcccacttcgtccatatgggcgcagatcatcaccttcggacctgtcgattcattgaggcggatcagcaccgatcccagaccatcaaatcgcacttctttttgcaggcgatccgcttcttccagtaggatctgccgcacttcctgttccgaggaggcgatcgcatctgcctcgctcaacgcttttaatagcgataaatccattatgcctctcccgtgagcaacactgttttcggcatggcgtagagcacttctgcgccttgcggggtaaccagcacaacatcttcgatgcgcacgcccccttgccctggcaaataaatccccggctccacggtcagcaacatgcctggctgtagcgtcgtggtgtcccgcggtgaaaaacgcggatcttcatggacttcaatgccgatagcgtgaccagtgttatgaccgaaatagtcgccaaatccagcctcggtaatgacccggcgcgcggcgtcgtcaatctgctggcagcgcacgccggggcgaattgcagagattgccgcgagctgtgcctgcaggacaatctgatagacgtcaaacagcgggtgagattcggcgctcaccccttcgccattcaccagcaaggtgcgcgtcatatcagagcagtagccctgatacagcgcaccaaaatcgagagtgacaaactcgcccgctgcaacaatcttgtcgctggctttgccgtgcggcagcgccccgcgccagccgctggcgacaatggtgtcaaaagaggctttttctgcgccctgctggcgcataaaccactccagttcagcggctatctcgcgctcgctcatccccgcctgaataaagcggcgaatatgctccgctccgcgatcggcaatcccacaggcgaggcggattatctccacctcctctggcgttttgatttgccgcagcacatccggcgtggcgctaaccagtttcgcattgagttcagactgccagcggtgcgcggtttcccaactcacctgctggccctcaaaaccgagcgtttgcaactgttcatcggcaatgatttgattgacgatagtggtaagcgtgttcgttgcgtcaagcaaatgcagctggtagccttgcgcacgggcttccacctcaacgtaatagcgcgaatccaccagaatgtgcgcactttcacggctaatcaccacataacctgatccggtggagatccccagatgcggctgtttgttctgccgtgaggagagaagcactgcatccagttgttgcgccttaagccagtcgcgcagcgaagcgagtaatgtcatctggattttccttcttacaggctatcgattaacaatttgcctttacggaacatcatcagacgcaggaacaccaccatcagcgcagttatgactgcccccagcgcgatccccgccatatagacgcccaggttagtgaccagcggccatgcccagatagcggactccgggaaccattgcactgcgcccagccagacagcggcggttgagccgacaatagcgccgaccatatacgacggaatggcggtgatggggctttccagcgcaaacggaatcgcaccctcactgatccccataaacgccaggaacatggcggtcttaccctgcggataaagttgagcgttgaacaggcgtttgccggttaaacgacggtcgataatggtcgccagccccagaccaatcggcggaataacgatagcgatagaacgcgcggtaaccggtaatacgtggtcggtggtaaagctgaaggcaacgaaacctgccgctttgttgattgggccaccaaggtcgattgcggtcgccgcggcaatccccattgcatacatcagcgcgcccttctcacctgcggcagtcagcacggtacggataccgccgttgatccagccaccaaatggggtgatgacatagtacatcgccagcatgacaaaaatggcggaaagaatcggtagcaaaaatgtggttttgaacgctaacaggaaatctggtaactggattttctggttcatccatttcacaaggtaaccagcaacgatagatataatcagcgcaccaatgaaggtggacggcaccggcgaagaggtcgcccattgcatagtgctgggatcgaagttcagcagttgcgtcggctgggtagacatcaacccgccgataaaaccagccgggaacgccagtttgccgccgatagagttcgccacaaaagcggcaaacatcggaatagcaaagccaaacaacacgccgccgaaggactgcgacagccaggcaaatttcagtaaggagaggtcgaaaccggagaatttcccgctattaagagcatccatgatgccgatctcagcaggaattttaagccagctataagcaatcagctggctgaaagcgaggatcacaccgcccataattaaggtcggcaccatgcgtgaaatccctgacatcacatgctgcgggagttcaccccagaagctgcttttagaggcctgcggattcttaactgccgctgccgcaccggatgcgccaggcacaacggttgcactgcgttttttaatggccataacaattatccctgtcgaatattactgttgttcagaggcaatcatctcttcgatttctttgatgatgcctacagcgtttttaattgcgtcctgcaaagtgatttcataaacgtcgcgtgattcgaaacgttcgttatcttccggggtaactgccacggaatggatgatgatggtcgcttcggcgatatcctgcgccgtcaggcgattctggatgccgtccgcgccctgggtttcaattttcacttcataaccggcttctaccgccgcttcttccagcgcctgagcggccataaaagtgtgagccaggcccatcgggcaggcacataaggcaatcagtttcttactcatcgttaattcctcgttcagtgatagttgacgagtgaaattatgaacgtgcaaaacaaatcgccgttaccagacaaataatgcatttactggagaattaatcccgctgtatggaagtgtgacgcaggtcggccttgtgaggggacacaaagaaaaattgaattaactgtatgatttaaaatattatcgggagagttacctcccgatataacaggaaggatttacagaatgtgacctaaggtctggcgtaaatgtgcaccggaaccgagaagacccggattgtcatggacgatgagatacaccggaatatcatggacatattctttaaagcgccctttatcttcaaatgcggcacggaaaccagaggctttgaagaactcaaggaagcgcggcacgataccgcccgcaataaacacgccgccaaatgtcccgagattgagcgccagattgccgccaaaacggcccataatgacgcaaaacagcgacaatgcgcggcggcaatcggtgcagctgtcagccagcgcgcgttcggtaatatcttttggcttgagattttctggcaggcggttgtcagctttcacaattgcgcgatacaaattcaccagcccagggccagaaagcacgcgctccgccgaaacatgaccaatttccgcacgcaatatttcgaggataatggcctcttcttcactattcggcgcaaaatcaacgtgaccgccttcgcccggcaagcttacccaacgcttatcgacatggaccagatgcgcaaccccaagccctgttccggcaccgtaaaccgcaataggtttaccttctaccggttctgcgccaccaaactgaatcagatgctcttttttcagcatcgggatcgccattgatacagcggtaaaatcgttaataatttccagatggctaaaaccgagattctttttcatttcggcaattgagaacgcccaggtatggttggtcattgccacccagtcaccggtaattgggcaagcgatggcaatacagccgtctttcacctcgaccttatgttcttcaagataaacgcgaatgaccgcttcgaggctggggtaatcaagccctgaataggtcttagcctgcgagatttcaccactggcaatatcacacagagcaagacgtgcgttggtgccgcccacatcaccgactaatgcatactttgtcattcttcaactgctccgctaaagtcaaaataattctttctcacactgtaaatacctgggggcataacaacaacgccggaaaggcaggctccctgtaaatatcgatctgggtcacacaattactttatcgtttcagcaccaattgcagcgatgcctttttgcaagctgggcaaactaagtatctgaccccgcataaggaatagaacatgctccatccgcgagccagaaccatgttgttattatcgctccccgccgtggcaattgggattgcgtccagtcttattctgattgtggtgatgaaaatcgcctcggcattacagaatttgctctggcaacgactgccgggaactctggggatagcccaggattcacccctctggatcatcggtgtattaacgctaacgggtattgcggtggggttggttatccgtttcagccagggtcatgccggaccagaccccgcctgtgaaccgctgatcggcgcaccggttccgccctctgcgctaccaggacttatcgtagcattaattcttggtcttgctggtggcgtcagcctggggccagaacatccgatcatgaccgtcaatatcgcccttgcggttgccattggcgctcgtctgttaccgcgcgtcaaccgaatggagtggactattttagcctctgccggaaccatcggcgcgctgtttggcacacctgttgcggcggcgttgatattttcgcaaaccttaaatggcagtagtgaagttccgctatgggatcgtctctttgcgccgttaatggcggcagcagctggtgcacttactaccggattatttttccatcctcatttttcactgcccattgcgcattacggacagatggaaatgaccgatattctcagcggtgcaattgtcgcggcgattgccatcgcagcagggatggtcgccgtatggtgcttaccacggttgcactcaatgatgcatcaaatgaaaaatccggtgctcgtgctgggtattggcggatttattctcggtattctgggggttattggtggaccagtttcgctgtttaaagggctggatgagatgcagcagatggtggcaaatcaggctttcagcaccagcgattactttttgctggcggtaattaaacttgccgccctggtcgttgctgccgccagtggctttcgcggtgggcgaatcttcccggcagtgtttgtcggcgtggcattagggttgatgctgcatgagcacgttcccgccgtaccagcggcaataaccgtttcttgcgctattctcggcatcgtgctggtggtaacacgcgatggctggttaagtctttttatggcggcagtcgttgtacccaataccacattgctaccgctgctctgtatcgtcatgcttccggcatggctgttattagcaggtaagccgatgatgatggtcaatcgtccgaagcaacagccaccccacgataacgtttagcaaaaaatgctctcctttatgatttaagagttatggcgatgatacggggctttacctccccgtaatattgcgttaacaggccgctgacggcttcgatcgtgaaggagaataacaatgttcaggtcactgtttctggcggccgccctgatggcatttaccccgcttgtagcaaacgcaggtgaaatcaccctactgccatcaatcaaattacaaattggcgatcgcgatcattacggtaattactgggacggtggtcactggcgcgaccgtgactactggcatcgcaattatgaatggcgtaaaaaccgctggtggcgtcatgataatggctatcatcgtggctgggataagcgtaaagcgtatgagcgtggctatcgtgaaggctggcgcgatcgtgacgatcatcgcggaaaaggccgcggacatggacaccgccattaaacacattcgccaatggagcacaatgcctgatgcgacgctagcgcgtcttatcaggcctacaaaccggctctttaacgcgtagggcggataaggcgtttacgccgcatccgccaatagtgccagatgcgacgctcattcaactacaatcccagcgccgttcctaccagcaaccagatattcagcgccactaccagcactacaatcacccagcctgtctgttttacgcgtttgctgttcaccagatcgcccatcaacttgctgtcactggtgaaaatcagcagtggaaccagcgccagggcgataccaaaacttaacagcacctgactcataaccagaatccgtgtcggatctaatcccatcagaatgacaataaatgacggcaacatggtgactgtacgacgcacccacagcgggatatggaagcgaatgaacccctgcatcaccacctgccccgccagtgtccccaccaccgttgaggacagtccggcagcaaccaggcttaatccaaagaccgttgccgcagcatggcttaacaacggttgcagcgtcagatatgcctcatcaagatcggcaacaccagtatgaccggaaaagtggaacgccgccgcagctgtagccatcatcgccagattgacaaaaccggcaatcgtcatggcgatagccacatcccatttggtggcggaataacgttgttgacgcgaaccgccatgtaaatgctgagtgagcgaagagtgcaaataaatcacatgcggcataatcgtcgcccctaacacgcctgctgccaggaagaccgcctccgaagtaggtaaactcgggatcaccattcctttacccagctgcgccaggttaggctgggagaaaatcaactcgacaatgtaagccgcggcaacaaacaacagtaacccgccaatcactttctccagcggtttttgcccgcgacgttgcagcattaaaatcaggaaagtcgcgatccccgtcagcaccgcgccctgcaacaacgaaacaccaagaatgagtttaaaaccgatcgccgcaccaataaattccgccaggtcggttgccatcgcaataatttctgcctgaacccaatagaaccacactacgggacgcggatagtgatcgcgaatctgctccgccagattttaccggtggcaatccctagtttggcagagaggatctgaatcagcatcgccatcaggttggcccaaacgacaacccacagtagctgatagccgaagctggcacccgcctgaatattggtcgcaaagttaccgggatcgatataaccaatcgccgcaatgaacgcaggtcccattaatgcgagcctcatcttgcgcgccgcccgtccgctgctactctcaacgcgatagttcgtcatcttgtgcctctaaaacatagcctttgctatgtttcatgctatgccaaacgagaatgattatcaaattcatttaaatgggttgtggtgatttctctgatagacctggattatgactacgaaaagattgatgacttgaatgttatggttatgtttaatgttagcacatttacataactttcagcttccatacacaacatagcagaaatgtatgacagatcactatttttgaagcttgtcacaggacgtcattatagtgtgtgtcagatctcgttttccttaaccatgttacatagaatgtgcacggaaatttaacctgcctcatatttggagcaaatatggaccgcgtccttcattttgtactggcacttgccgttgttgcgattctcgcactgctggtaagcagcgaccgcaaaaaaattcgtatccgttatgttattcaactgcttgttatcgaagtgttactggcgtggttcttcctgaactccgacgttggtttaggcttcgtgaaaggcttctccgaaatgttcgaaaaactgctcggatttgccaacgaagggactaacttcgtctttggtagcatgaatgatcaaggcctggcattcttcttcctgaaagtgctgtgcccaatcgtctttatctctgcactgatcggtattctccagcacattcgcgtgttgccggttattatccgcgcaattggtttcctgctctccaaagtcaacggtatgggcaaactggaatcctttaacgccgtcagctccctgattctgggtcagtctgaaaactttattgcctataaagatatcctcggcaaaatctcccgtaatcgtatgtacaccatggctgccacggcaatgtccaccgtgtcgatgtccatcgttggtgcatacatgaccatgctggaaccgaaatacgtcgttgctgcgctggtactgaacatgttcagcacctttatcgtgctgtcgctgatcaatccttaccgtgttgatgccagtgaagaaaacatccagatgtccaacctgcacgaaggtcagagcttcttcgaaatgctgggtgaatacattctggcaggtttcaaagttgccattatcgttgccgcgatgctgatcggctttatcgccctgatcgccgcgctgaacgcactgtttgccaccgttactggctggtttggctacagcatctccttccagggcatcctgggctacatcttctatccgattgcatgggtgatgggtgttccttccagtgaagcactgcaagtgggcagtatcatggcgaccaaactggtttccaacgagttcgttgcgatgatggatctgcagaaaattgcttccacgctctctccgcgtgctgaaggcataatctctgtgttcctggtttccttcgctaacttctcttcaatcgggattatcgcaggtgcagttaaaggcctgaatgaagagcaaggtaacgtggtttctcgcttcggtctgaaactggtttacggctctaccctggtgagtgtgctgtctgcgtcaatcgcagcactggtgctgtaaaaccatacataaaaaagccggggatcattccccggcttttttacgcctgttaatcagctaatggctgcgggcgaccaatcaaatacccttgcagatattgcaccccgagcttatgcaatagcgcctgctgctgttgcgtctcgacaaactccgcgaccacactcaatgacttcgctttcgccagatcggtaattgatctcacaatcatcgcatccagcgtattcgtgacaatatctttcacaaagacgccatcaattttgatgatatcagcctgcaaacgctttaaccgttcgtagttggcatatccggtgccaaagtcatcaatcgcaatccggaaaccaaacttatgcagctgctcgatgttgtacatgctgctttctgcgttagaaaacgcctgctcctcggtgatctcaagaatgaccgcctgcggggagatgtgataacgcttaaacagacgaataatccgcccggcaatattcttttgcagcagcgtgagcggcattaaattgactgaaaagcgcggtccttttttgtcgcaagggtgtgttgccagccacttcaacaaggattccagcacttgcaaatcaaaacgcgcgctaaggttaaactgagcaataaggggcagaaacttatccggggtcataatgccgccgtcatatttcagtcgcgcgaggatctcatcataaccttcaccctctttgttgcgaattggctgggcgtagagcagcaaatcaccctgatctaacgccgtgcgaatggtattcagcaatagcacctgtttagtggtctgcccggaaaccatctcctctctgctatccagcgccagcacatgatgatgtgcgcaggattgctccgccagccagcttaactgccccaacaagggttgcagggtttcctgatttccatcaaaacgcccccaggcagcaccatagcccatatccagcccggtattgttccagtgaatttgccgactattcaggatgttaatcatatgctggagtcgcccttccgtttccggcccgctcagcactaacagcagttcactacccggcaattgatacaacttttcgttttcctgcatcaacggcagcagcgtacggcaaattgagcggatacagtgaacgcgcatcattaagccgtaatgacgactcataaactcaagattatcaatgcgcaggcagcaaaaactcttgcccgcctcttgctccggcgcttgttccaacgcacgaaagttgggtaggagcgttaacggatctgtcagcgcctgcaaatgccagcggcgattaagccattcactgcgatgataaatgcgcaccatatagagcaggcaaacgctaaaggaaatcagcaccgcaagaataaatgccagcgaatattcggtttccaccccttgcaaaaagttctggttgtaattcagcaggcaaagcgttgaaacagcccaggtgagatttaaaaacggatagcgaagcttaccgaccccgagggtaaagatgatgaagaaaacgggtaccaagtaaccggcaataaagtcgttttcataaggtgtgcacaacagaagtagcagcacgcttaacgctgccagccagcttaaggtaaatgcgcgtttctctttgcccaacgacggagcgatatccctgcgccacaatatctgcgcaaagtggggacttacaatcatgcgagtgagatagtagaaaagcatgttgtaaatcagcacagcggtgaaaaggcttagcaaatcaacgaccgtgaaaatggcatccgcatcgccgaaaaaggtggatatctttagcgggaaatcaaagaagctccccacaagatacatgctgcatttgatgccgatcggcgtcaccaaaccaagccagaacagacgttgccagacatatcggctggtcaatccataacgccaacgcgtccccagctgccagcgtaatattgcgcaggcacacaacacgacaaacgtctggctaccgagcatgaccgcagtctgtaaaaaagagagatgaaagttccacagattggtgcaaaacatcccgcataaaacgggaacgacaccgcgccagccaaagataaacaagattgacagcattacgcacagtggcatccacgccagaaagatataactggaatggataatggcaagtggcgaaataaaacgggatagctgaataagtaccacggtgagcgtaaacgctagtgtgaatatcttgatattttttatcaggttatgctccacaaacatgagtacactactctcactgatcggggttttcaggcacacaaataataagtttattcgcatcgcgaagcaaacaggggccagcctgttgccgatttttcatccaatgatgctttcaccaggcggcgctaacccggacgtagactgtattacaaaagcggcaaaaagcagagacaaaaaacccccgctttgcagcgagggttggaaatttggtggagctaagcgggatcgaaccgctgacctcttgcatgccatgcaagcgctctcccagctgagctatagccccacgatgcgtttacgtaccaaatttgctgggtgcaaaatttggtggagctaagcgggatcgaaccgctgacctcttgcatgccatgcaagcgctctcccagctgagctatagccccgtcacgtaaagcttgtcgagttgacgggcggcatcatatgaattccgcccgaatgtgtcaacggcaaattgcaacgtgtagtttcaatcgctgaaaaatcaggcaaatgaacaattttggaaaaccgctcgcattcagtagttattcatgtcacggtttcctgtaaagtggtgttataaaatgaactactaatagacccacatacattcagggaattgttatgttcaaggagaggatgacaccagatgaacttgccagactgaccggctatagccgccagaccattaataaatgggtacgcaaggaaggctggacaacgtcaccaaaacctggcgtccagggtggcaaagcccgactggttcacgtcaatgaacaggttcgtgaatatattcgcaatgctgaacgtccagaaggtcagggagaagcgcctgccctttctggtgatgcgccgcttgaagtattgctggtgacactggcgaaagagatgacgccagttgaacaaaaacagtttacatccttgcttctgcgggaagggattatcggattgttacaacgcttagggattcgcgatagcaaataatatgaaaagattacgcaacaaaatgaccaccgaagaactggctgaatgcctcggtgtggctaaacaaactgttaaccgttggatcagagaaaaaggctggaaaacggaaaaatttcccggcgtgaaaggcggtcgtgccagacttattctggtcgatacgcaagtttgcgagtttattcagaacacgccagccttccataacacaccaatgttgatggaagctgaagagagaattgctgaatacgctcctggagcacgcgccccggcgtatcgacaaatcatcaacgcgatagataatatgacagacattgagcaggaaaaagtcgcgcaatttttgtcacgtgaaggaattcgcaatttcctcgcccgtctcgatattgacgaatcagcataaataaaaaacggcaggatattatctcctgccgtttatctttttacacgctaattactgctgattttcgcgttcagcaataaaatccagcgctttgttgatacgctcgatactgcgggtcttaccaattgcgtgaacggtaacatccagtgctggagactgccccgcaccggttacggcgacacgcagcggcataccaactttacccatacccacttccagctcatccgccgtcgcctgaatagcgtgatgaacgttttcagcggtccagtcagtaatcgcggccagtttgtcacgaaccacttccagcggctgacgcgctaccggacgcagatgttttttcgccgcatcggcatcgaactcagcaaaatcttcgtagaaataacggcagctctgtgccatctctttcagcgtcttgcagcgttcgcccagcagtttcaccagatcagccagctgcgggccgttacgggtatcgatattttcctgctcaatgtgccactgtaagtgagtagcaacatactccggcggcagcgcgttaatgtagtgatggttcagccacagcagcttgtcggtgttgaacgcactggcagatttgctgacggcattcaaagtgaagtatttgatcatctcttcacgagtgaagatttcctgatcgccgtgggaccagcccagacgcaccagatagttcagcagtgcttctggcaaataaccgtcatcacgatactgcattacgctgactgccccgtgacgtttggacagttttttaccgtcatcgccattgatcatagaaacgtgcgcgtaaaccggcactggcgctttcagggccttaagaatgttgatctggcgcggcgtgttgttgatatggtcttcgccacggataacgtgggtgatttccatatcccagtcatcgacaaccacacagaagttataggttggggaaccatcggtacggcggataatcagatcatccagctcctggttgctgaactcgatcggaccacggatctgatcgtcaaaaacaacagaaccttcctgcggattagcaaaacgcacgacacacggttcatcatcagcatgatgctcatggctgtggcggcagcgaccgtcataacgcggcttctcacctttcgccatttgctcttcgcgcagcgcttccaggcgctctttagagcaatagcatttataagcagtgccctcttccagcatctgatcgatcaccgcattgtagcgatcaaaacgtttggtctggtagtacggaccttcatcccactccaggctcagccagttcatgccatccataatggcttcgatagcttccggcgtggaacgctcaagatcggtgtcttcaatacgcagcacgaactcaccgccgtggttacgtgcaaaaagccaggagtaaagagcagtacgcgcgccgccaacgtgcagatagcctgttgggcttggcgcgaagcgagttttgattttcatgaaatggccttacgtttagaaagatgccgacaaccggcaaatcctggaaaaattgagtgggcgatattctatcactcccgcctgattcctcaatgtagttcgggtttctaccttacgcattattgttttcgttgacaaattgcgcaacacggtctgttttgcgatcatcttgcttaaatttacgacgaacgaacaatttctttagaaaatgcgttgactcattttgaactctccctataatgcgactccacacagcgggggtgattagctcagctgggagagcacctcccttacaaggagggggtcggcggttcgatcccgtcatcacccaccaactactttatgtagtctccgccgtgtagcaagaaattgagaagtgggtgattagctcagctgggagagcacctcccttacaaggagggggtcggcggttcgatcccgtcatcacccaccactttctcgccagctaaatttcttgtaaaaatgtgaagtaccgaagtgggtgattagctcagctgggagagcacctcccttacaaggagggggtcggcggttcgatcccgtcatcacccaccacttcgggtcgttagctcagttggtagagcagttgacttttaatcaattggtcgcaggttcgaatcctgcacgacccaccaatgtaaaaaagcgccctaaaggcgcttttttgctatctgcgatactcaaagattcgaacctgcagcaggtttgagttgagcgcagcgaaacaacggagccgctcgcggcgacggcccgaagggcgagcgaagcgagtcatcctgcacgacccaccaatgtaaaaaagcgccctaaaggcgcttttttgctatctgcgatttgcgaaattgcctgatgcgcttcacttagcagacgactatttccggcaattcctgtctcctcacctactgtgtcaatgcagccaacagcttaaccatcgcgggcgtcacctgctgtgtttcataaacaatatataaatctgcagggatgcgctgtttgagcggacggaaaatgacacctggccagttcatttgtgcgtagctgtccgctatcaatgtgataccaatacccatactgaccatggcgagtaccgtttgcggttcattaacttcgcgaataacaaccggtgaaaatcccacctgctggcaaactcgctgcaaaaaatcccagtcagtgtacacgggcggcattgtaacaaaatactcgtcacgtagcgcttccagcggaacggtggaaaatgatgagagatgatgctcttcaggcatcgccaccagaaacgccgattcatgcaaccgtaagctggtaaaacctgtcggtggttctgtcgccattcgccagatcccggcatcgagttcacgtcgttccagcagggccatttgcatcgcgggcatcttttcgcgaaaaagaacttcaacgttaggattttccctgaggaatcgccgcataaccgggcgcatccgtccccacatagccgttcccactacgccgagttcaatccgccctgcttctccccgacctatttgttcaacccgagccaatacattattagcattcaccagcaatcgacgcgattcttccatcaagattttgcccgcgtgtgtcagtacgacgctgcgcgaatggcgaatataaagctgcgtgccgagttgattttccagctctttaatatgaatactgagcggaggctgagacatatttaaacgcgctgctgcgcggccaaaatgcaactcttccgctacggcaagaaaataacggagcaacttaagatctgttctgtatacgcgttccataattaagtgctccatataataaatacatcgtattaaattatcatggcataaagtatttcaccaccagatatccgacatacataaacacaatggataatatacctggtaatacatttggtacaggaataggcaagcgcacgattgtaaacaaagcaccaatgccaaaaccaacgccggaagaaaataaaatatctttcactaattaacctttatcataaaagcagctctgaagagcagagctgcgaatccttttaatgagccaccgctcgatgctttatcttttcagggtcatgattatatttaaacccaaagaaaaatatcactgcgagaaaaagagcatatcctgcaaacaccagccagatagtttgccagtcttttacgccatccaccgaaaagtaatctactgccatgccactcagaatcgagccaacccatgcgccgacaccatttaccatggtcataaagagcccctgcgcgctggcacgaatgctggaatcaacttcctgttcgacaaataccgaaccagaaatattgaagaaatcgaatgcacagccataaacaatcatcgacagcagcagcaaaataaatccggttgttgacggatcgccataggcgaagaagccaaagcgcagcgtccaggccaccatactcatcagcatgacggttttaatgccaaatcgctttaaaaaaaatgggatagtcagtataaagcccacttctgccatctgtgaaactgacagtaaaatggagggatatttcaccacaaaactgtcagcaaactccgggttacgggcgaaatcatgtaggaacggattaccaaaaacgttggtaatttgcagtaccgcacccagcatcatggcaaagaggaaaaagatggccatgcgtggatttttaaacagcacgaaggcatccagacccagcttgctggcaagcgatgtggtcgctttttctccgcaaccggaatcttcggcaaagtcagcgcataagccgacagcagcaatgacgcaccggacgcgatatacagctgcagactactcaattccagatgcagcaggcttactgcccacatcgcgacaatgaaccccaccgtaccaaaaacgcgaatgggcgggaaagcggtcaccgggtcaagccctgcctgggcaagacaggaataagagacgctgttcgataacgcaatagtcggcataaacgccatcgcattgactaacatcacccaaaacatcatatccggatcagttacggatgccgcataaaaaagtacgcccgcacacaccaggtgacacagcatgtatgcacgttctgcgcgcagccatttgtctgcgatgatccccattataccaggcataataatcgcggcgatccctttggaactgtaaaccatgccaacattagcgccggtgaaatgaagggtattaatcatgtaagagccgagggtaaccagccagctcccccagataaaatattgcaaaaaggacattacctttaagcgcatcgcgatgctcataatcgtttccttgtcgcatcatttggcctcacccgcgaggccgtttcttattgtttttctcaggcaattttgcgcagaaagccacaaataaggttgatgaagttctgcttagagagctccgcagccgccagcgtttgcgcatgtgacaatttcacatcgcttaaaccttccgccatattggtaatcgcagagaccgcaacgactttaaggtcgcaatggcgagctgaaataacctcaggcaccacagacataccaacaacatccccaccaataatttgcatcatgcgaatttccgccgcagtctcgaaattcggccccggatacgagacgaacacgccctccgtcagagggaaaccctcttctttcgccactttttgtaacagtgcgcggtattccgcatcgtaggcatttgccagtgagaagaagcgctctccaaaacgatcatcgttaagacccaccatcggcgtaccgggcatggtgttgatatgatctttcaatgcgaccaggctgcctgcccccacttccggacgcagcgagcctgccgcattggtgcagaacagtagctcgcagcccagcagcttaaaggtacgaattgcgtcagtcataatggtcattccacgaccttcgtagaaatgtccgcgacctttcatacataccaccggtacgccctggagatggcccagcactaactcccccgcatgaccatgtaccgtacttaccgggaagcccggcagcttttcgtaggaaattgcgacagcgttctcaatctgatcggccagcgcgccgagcccggaacctaaaataaaggccactcgtggcgtgaaatcaggtttataagtcttgataatatctatgcaaaacagcgggttatgagaaaattgaacctgagacatacatatcctttttctgtagggtggaatctaacgcctttttatagcgaggttgtcccggctcttaccaatacacttttctcacgcattcaatagcgattcgatatcgatggatttatatcttttctctattaatccacggtaaaaactgtattggcgatattaattcctttgcattaacaatatgtcgtttttagcaaaccactttattaagcaatctactaataacgatcggcatagggaattatgctatgaaaaaacatcttttaactctgacactttcctctatattagcgatacctgttgtatctcatgcagaatttaaaggcggttttgcagatatcggcgtgcattatctggactggaccagccggactaccgaaaaatcgtcgaccaaatcacacaaagatgattttggttatcttgaatttgaaggtggcgctaactttagttggggagaaatgtacgggttcttcgactgggaaaacttctataacggtcgccataataaaccaggtagcgagcagcgttatacctttaaaaataccaaccgtatttacctgggtgacaccggatttaatctctacttgcatgcgtatggcacctacggttctgcgaatcgcgtgaatttccacgacgatatgttcctgtacggtatcggctacaatttcaccggcagcggttggtggttcaaaccgttctttgctaagcgttatacagatcaaacctattacactggcgacaacggctatgtcgccggctgggttgcaggttacaactttatgctgggcagcgagaaattcactcttaccaactggaacgagtacgagtttgaccgtgacgctacctatgcagcgggtaatggcggtaaagaagggctgaatggcgcagttgcactgtggtggaatgcaacatcacacattactacggggattcagtatcgatatgcggatgacaaactgggcgaagatttttaccaggatgcgataatctactccatcaaatttaacttctgattgattactgccggggctcccggcagtatgaattcactctatatctgatacaacggatccccttcccgaccagccattagcgcattgccctggtctcgtaccacgtcccataacgcttcagcggcggtggaaagtgaacggttcttcctgcgcaccagcatcaactggcgttcaacaaccggcgtaatgcgctttaccaccagtgggctaccttcaggcaatggtagcgccagtgcgggaagaatactgatgccgatgcctgcggctaccatcgggaacagcgtcgccggatgtccaatctcctgcacaatattcgcctgaataccattgcgcgccagcgctgcgtcaatcagcggtcggctgcctgacgcgtaatcctgcaacaccaatttcgctccctgtaatgcctgccagggtacataatcttcgacggccaaagcgctatcgcgatggcaaagcagaaagaaaggctcggaaagaatcgcttcacattgcagatcgcccactgggcctggatcgatgacgatgccaaagtcgacatctccctggcgaatactttccatcacccactgctgcggacgatcgtgcaggacaaactgaatatctggatagcggcgatggctttcagcaatgcattgcggaataagatgcgcggaaatggtctggctggcagcgacccgaacttttccgctcagttgttgccccatacgcccggtatcgcgcaacgtgctgttcagttcatccagcagtcgctcaagacgcaaagccagctgctgccctgcatctgtaagcaccacttcacgcgtggttctgtccagcaggcgaacaccagtatgattttccagttccttcacactgtgactcactgccgactggctcaggccgatacgctctcctgcacgactaaaacttttctcctgcgctactgtgacgaaaacctttaattgttttaaagaataattcatctgttttcttcatgaatggatgcaataaatcaattttatttctcaaactggaagaagcacaatagaaccatcgatcatctggagtctttatgaaactttttcgtatcctcgatcctttcaccttaaccctgatcacggtggtgttgctggcctctttctttccggccagaggcgatttcgtccccttctttgaaaatctgaccaccgcagcgattgccctgctgttctttatgcacggcgcgaagttgtcgcgtgaggcgattattgctggcggtggtcactggcgactgcatttgtgggtaatttgcagcaccttcgtgctgtttccgattctgggtgtactgtttgcctggtggaaaccggtaaatgtcgacccgatgctctactccggttttctctacttgtgcattctcccggctaccgtgcagtctgcaatcgccttcacgtcaatggcgggcggtaacgtcgcggcggcggtttgttctgcgtcagcatccagcctgctggggattttcctttcaccattgctggttggtctggtgatgaatgttcacggtgcagggggcagccttgagcaggtcggtaaaattatgctgcaactgctgctgccgtttgtgttggggcatctttcccggccgtggattggtgactgggtgtcgcgcaataaaaaatggattgcgaaaactgaccagacgtccattctgttggtggtttatacagcgttcagcgaagccgtcgttaatggtatctggcataaagttggctggggatcattgctgtttatcgtggtggtcagctgcgttcttctggctatcgtgattgtagttaacgtctttatggcacgccgactgggcttcaataaggcagatgaaattactatcgtcttttgtggttcgaaaaagagtctggcaaatggcatcccgatggcaaacattctgttccccacatcggtgatcggtatgatggtgctgcccctaatgattttccatcagatccaattgatggtctgtgcggtgctggcgcgtcgatacaaacgccagaccgaacagttacaggcacagcaggaaagcagcgccgataaagcttaaagcggacgcttcaggggctggaccagttgcgtcagcccctcggttttaatcagcagcgtgatttgcattagctcaccgagcttccctgccgggaattcatctttgcgggcaaaccacagcagatactcctccggcaggtcgattaagcgacgccctttatatttgccaaacggcattatcgtattggctatttcaatcagctgctcttttccatctcagctacccagcaaacgcagcatttccgcttcgtcgatgacttcaatgcccagttcctgcgctttcgccagtttagaacctgccgcttctccggcaatcaccagatcggttttcttcgacacgctgcccgcgactttcgcgcccagttcaaccagtcgagctttagcgtcatcacgcgacatctggcttaagctgcccgtaagcaccacggttttaccagcaaacgggctgtcaatctcttccgcgttgataacgatcggcgcaggccagtgaacaccttccgccaacagctcgctgatgacattgcggttgctttcttcggcaaagaagttgtgaacgtgggatgcaacgacaatgccaacatcaggcaccttttgcagctcttcaatcgaagcggcttccagcgcttccagcgtgccgaaatatgccgccagacctgctgcggtggcctcgccgacttcacggatgccaagtgcatagaggaagcgagcaaaggtggtttctttcgctttttctagcgcgttaaccacgttttgtgccgattttggccccatacgctccagtccggtcagtttgcctgcggtgagtttgaacagatctgccggagtatggacatattctttttcaaccagctgatcgatgattttgtcgcccattccgtcaacatccatcgcacggcgggaaacaaagtgtttcagcgactctttacgctgcgctccgcaaatcaggccaccggtacagcgggcaaccgcttcaccttccacacgctcaacgtcagaaccacataccggacaatgcgtcgggaatacaacctcacgggtatcttccgggcgttcagaaagcacgacgttaaccacctgcgggatcacgtcgccagcgcggcgaatcaccactttatcgccaatgcgtaaaccaagacgttcgatttcatccgcattgtgtaaggttgcgttactcaccagcacgccagcaacatggacaggttccagacgcgcaacaggcgtaatcgcgccagtacgcccaacctgaaactcgacgtcacgcacaaaggtcatctgctcctgcgccgggaatttaaacgctaccgcccagcgcggggcacgcgcgacaaagccaagctgctcctgctgttccagtgagttgaccttaatcaccacgccgtcgatatcaaagcccagcgtcgggcggtcttcttccactttgtgatagaacgccagcacttcttccgccgattcacaaagcgttacccgatcgctgaccggcaacccccactttttaaattgcagtaaacggccaagatgagtatccggcagctcgccaccttccagaacaccaacgccatagcagaaaaaagtgagcggtcgcttcgctgtaatacgcggatcaagctgacgcagtgaaccagctgccgcattacgtgggttagcaaaaactttcccgcccgtgcgtcgcgcatcttcgttaatcttttcgaaccccgcctgcggcaggaacacttcaccacgcacttccagacgcgccgggatattctctccgtgcagcttcagcggaatagcgcgaatagtacgcacattagacgtgatatcttccccggtggtgccatcgccacgggtcgcggcactgactaaaacgccattttcatacagaatactgacggcaaggccatccagcttcagctcacagcaccaggtgactttctcgttgtttttcagacggtcctgcacacgtttgttgaaagcaagaaagctttcttcatcaaaaacgttatccagtgacagcattggtacttcatggcgtatctggctgaaagccgccagcggcgcagcgcctacacgttgggtaggcgaatcaggcgtaatcagttctggatgtttggtttccagctcgcgcagttcgcgcatcagcctgtcgtattcagcgtcgggaatttccggcgcatccatcacatgataaagatattcatgatggcgaagcgtcgttcgcagttctgtcagttgttgttcgattgattccatatcgcaccatcaatgctaaaaacccccgacaagcgggggttcgaagaggagttaatttgccttaagtgtatcaggcgttggcgtctttgacttcgcggatgatgtcctggtactcgcgcaatttctgcggagtcatcatacggcgctgatcgtcaagcacgacaccgcccacttcatcggcaatatgctgcgcagattgcagcatcagcttgaagttctgcagctcgtcaccgtaagacggtacctgcataaagatggtgacacccggagtagtgaaatccttcatttcaggatcaaaggttcccggtttcaccatattcgccaggctgaataacgccgggccgctgccatccgggctaagatgacgatggtaaatattcatatcgccaaaaatgaagcccgcttgttgaatgctgttaagaagcagttcaccgtttagctcgctaccgtgatgcgccgcgacgttcatgataatcaccgcttctttgcgcttcggtttatccataactggagccggttccgctacaggctcaggctgtggtgccgctacgggttctgcaggctggaaagcctgttgtgccggttgcggtgctgaatgcacaggctgcggcgctggcgcgacctgtggcgaaactggctgctgcaacggctgttcaggctgcggctgataggcaggctgctgcaccggctgcgctggacgcggagcatgttgcggcggtacctgcgcttcaggcggctgctggaccggttgacgcggctgcgcagacgcataaggcggttggtactggtgttgcggcgacggacgagcagcctcatgctcctgagcgttagccggggcatgattcacgcggtgaacacgaacctcaccaacgccctcatcatcttcgacatcctcgtcataagaatcgtcgtcacgttttgacttcattcgttttaatggccgatcgcggaacatagaagatcgttctttacggctggtccagaaaccatgtaccagtaaagcgattatggcgatcgcgccaacaatgattaatatcagacgcaaatcctgcatcattatattctctgttgttctaacaccttgccaccacggcaaacatttactcactaagagtatttgccgattacctcaagtgcaagtgcactattaactttcacagcacaaagatagatgaaatcgtgctttttgctgttttttcgaacatatcctaactgtccattgcgcaattacccggtaaaatacgcagaattttcctgggattggtcaaaaggagctcatcctgattatggtttcatcattcacatctgccccacgcagcggtttttactattttgcgcaaggctggaagctcgtctcgcaacctgggattcggcgtttcgttattttaccgctgctggtcaatattttgttgatggggggcgcattctggtggctctttacacagctcgatgtctggatcccgactctcatgagttacgttccggactggctacaatggctgagttatctgttgtggcctctggctgtcatctctgtgctgttagtgtttggctatttcttctccacgattgctaactggattgccgctccgtttaacggtttattggctgaacaactggaagcacgattgactggcgctacaccgccagataccgggattttcggtatcatgaaagatgtgccgcgaatcatgaaacgcgaatggcaaaaatttgcctggtatctgccgcgcgcaattgtattgctaattctttacttaatccctggtattgggcaaaccgtcgcgccggtactgtggttcctgtttagcgcctggatgttagccatccagtattgcgattaccccttcgataaccacaaagtgccgtttaaagagatgcgcaccgccctgcgcacacgcaaaatcaccaatatgcagtttggtgctttaaccagcctgtttacgatgatcccgctgcttaatctgttcatcatgcccgttgccgtttgtggcgcgacggcgatgtgggtcgattgctatcgcgataaacacgcgatgtggcggtaacaatctaccggttattttgtaaaccgtttgtgtgaaacagggggtggcttatgccgccccttattccatcttgcatgtcattatttcccttctgtatatagatatgctaaatccttacttccgcatattctctgagcgggtatgctacctgttgtatcccaatttcatacagttaaggacaggccatgagtaagatttttgaagataactcgctgactatcggtcacacgccgctggttcgcctgaatcgcatcggtaacggacgcattctggcgaaggtggaatctcgtaaccccagcttcagcgttaagtgccgtatcggtgccaacatgatttgggatgccgaaaagcgcggcgtgctgaaaccaggcgttgaactggttgaaccaaccagcggtaataccgggattgcactggcctatgtagctgccgctcgcggttacaaactcaccctgaccatgccagaaaccatgagtattgaacgccgcaagctgctgaaagcgttaggtgcaaacctggtgctgacggaaggtgctaaaggcatgaaaggcgcaatccaaaaagcagaagaaattgtcgccagcaatccagagaaatacctgctgctgcaacaattcagcaatccggcaaaccctgaaattcacgaaaaaaccaccggtccggagatctgggaagataccgacggtcaggttgatgtatttattgctggcgttgggactggcggtacgctgactggcgtcagccgctacattaaaggcaccaaaggcaagaccgatcttatctctgtcgccgttgagccaaccgattctccagttatcgcccaggcactggctggtgaagagattaaacctggcccgcataaaattcagggtattggcgctggttttatcccagctaacctcgatctcaagctggtcgataaagtcattggcatcaccaatgaagaagcgatttctaccgcgcgtcgtctgatggaagaagaaggtattcttgcaggtatctcttctggagcagctgttgctgcggcgttgaaactacaagaagatgaaagctttaccaacaagaatattgtggttattctaccgtcatcgggtgagcgttatttaagcaccgcattgtttgccgatctcttcactgagaaagaactgcaacagtaatgccagcttgttaaaaatgcgtaaaaaagcacctttttaggtgcttttttgtggcctgcttcaaactttcgcccctcctggcattgattcagcctgtcggaactggtatttaaccagactaattattttgatgcgcgaaattaatcgttacaggaaaagccaaagctgaatcgattttatgatttggttcaattcttcctttagcggcataatgtttaatgacgtacgaaacgtcagcggtcaacacccgccagcaatggactgtattgcgctcttcgtgcgtcgcgtctgttaaaaactggcgctaacaatacaggctaaagtcgaaccgccaggctagactttagttccacaacactaaacctataagttggggaaatacaatgttccagcaagaagttaccattaccgctccgaacggtctgcacacccgccctgctgcccagtttgtaaaagaagctaagggcttcacttctgaaattactgtgacttccaacggcaaaagcgccagcgcgaaaagcctgtttaaactgcagactctgggcctgactcaaggtaccgttgtgactatctccgcagaaggcgaagacgagcagaaagcggttgaacatctggttaaactgatggcggaactcgagtaatttcccgggttcttttaaaaatcagtcacaagtaaggtagggttatgatttcaggcattttagcatccccgggtatcgctttcggtaaagctctgcttctgaaagaagacgaaattgtcattgaccggaaaaaaatttctgccgaccaggttgatcaggaagttgaacgttttctgagcggtcgtgccaaggcatcagcccagctggaaacgatcaaaacgaaagctggtgaaacgttcggtgaagaaaaagaagccatctttgaagggcatattatgctgctcgaagatgaggagctggagcaggaaatcatagccctgattaaagataagcacatgacagctgacgcagctgctcatgaagttatcgaaggtcaggcttctgccctggaagagctggatgatgaatacctgaaagaacgtgcggctgacgtacgtgatatcggtaagcgcctgctgcgcaacatcctgggcctgaagattatcgacctgagcgccattcaggatgaagtcattctggttgccgctgacctgacgccgtccgaaaccgcacagctgaacctgaagaaggtgctgggtttcatcaccgacgcgggtggccgtacttcccacacctctatcatggcgcgttctctggaactacctgctatcgtgggtaccggtagcgtcacctctcaggtgaaaaatgacgactatctgattctggatgccgtaaataatcaggtttacgtcaatccaaccaacgaagttattgataaaatgcgcgctgttcaggagcaagtggcttctgaaaaagcagagcttgctaaactgaaagatctgccagctattacgctggacggtcaccaggtagaagtatgcgctaacattggtacggttcgtgacgttgaaggtgcagagcgtaacggcgctgaaggcgttggtctgtatcgtactgagttcctgttcatggaccgcgacgcactgcccactgaagaagaacagtttgctgcttacaaagcagtggctgaagcgtgtggctcgcaagcggttatcgttcgtaccatggacatcggcggcgacaaagagctgccatacatgaacttcccgaaagaagagaacccgttcctcggctggcgcgctatccgtatcgcgatggatcgtaaagagatcctgcgcgatcagctccgcgctatcctgcgtgcctcggctttcggtaaattgcgcattatgttcccgatgatcatctctgttgaagaagtgcgtgcactgcgcaaagagatcgaaatctacaaacaggaactgcgcgacgaagataaagcgtttgacgagtcaattgaaatcggcgtaatggtggaaacaccggctgccgcaacaattgcacgtcatttagccaaagaagttgatttctttagtatcggcaccaatgatttaacgcagtacactctggcagttgaccgtggtaatgatatgatttcacacctttaccagccaatgtcaccgtccgtgctgaacttgatcaagcaagttattgatgcttctcatgctgaaggcaaatggactggcatgtgtggtgagcttgctggcgatgaacgtgctacacttctgttgctggggatgggtctggacgaattctctatgagcgccatttctatcccgcgcattaagaagattatccgtaacacgaacttcgaagatgcgaaggtgttagcagagcaggctcttgctcaaccgacaacggacgagttaatgacgctggttaacaagttcattgaagaaaaaacaatctgctaatccacgagatgcggcccaatttactgcttaggagaagatcatgggtttgttcgataaactgaaatctctggtttccgacgacaagaaggataccggaactattgagatcattgctccgctctctggcgagatcgtcaatatcgaagacgtgccggatgtcgtttttgcggaaaaaatcgttggtgatggtattgctatcaaaccaacgggtaacaaaatggtcgcgccagtagacggcaccattggtaaaatctttgaaaccaaccacgcattctctatcgaatctgatagcggcgttgaactgttcgtccacttcggtatcgacaccgttgaactgaaaggcgaaggcttcaagcgtattgctgaagaaggtcagcgcgtgaaagttggcgatactgtcattgaatttgatctgccgctactggaagagaaagccaagtctaccctgactccggttgttatctccaacatggacgaaatcaaagaactgatcaaactgtccggtagcgtaaccgtgggtgaaaccccggttatccgcatcaagaagtaattcttgccgcagtgaaaaatggcgcccatcggcgccattttttatgcttccgccagcggcggcaaaatcaattcatcgctctcatgctgctgggtgtagcgcatcacttccagtacgcgcaaccccgaacggtgcaccgcatcgtttaacgccttccctttcagcaaaccactgataagctgagcacaaaacaggtcgccagtccctttcaggtcggtttttacccgtgaatgggaaatgacattcacgctgtcggcactgaccaccaccacctgcatctcctgattttcttcattaccggaggcgctggtaatcaccacccattttaatgtgtctgaaagcagactttttgcggcagcaatggcactgtcgagatcgcggcaatttttaccggtcaggatttccagctcaaagatattgggggtaattccctgcgccagcggcagtaaatattgtcgatacgcctcgggaaggtcaggtttgacataaattccgctatcaatatcgccaatcaccggatcgaccatgatcaataggtcaggatggtctttgcgtagcgcagtcagccactcggcaaggattttgatttgcgatgccgttcccatatagcccgtggttacagcgcgcagctggcgcagcgcatcacgctcatgaagcgcacgcaaataaccgctaaaccattcatccggaatcgcaccaccgtagaaagtgtcataatgcggcgtattgctcagcaataccgtcggcacggcaaaaacattcagaccgttctgtttgatagcaggcacggcaatgctgttgcccacgctgccgtaaaccacctgcgactgcacggcgacgatatccgcctgcagcgccctgctcttatcgttaaacaacaacaaactactcatttaattttttctccttgccgatgatcctcatcgtattccaaccgaaactttacctgattctggcagtcaaatcggctatcacaaaacaaggataaggtaattcaatgaagaaaatcatttgtctggtcattacactactaatgacactccccgcttacgcgaagttaactgcccatgaagaagcccgcatcaacgccatgctggagggattagcacagaaaaaggatttgatatttgtgcgcaacggtgatgaacatacctgcgatgaagcggtttctcatctgcgtctgaagctgggcaatacccgtaaccgcattgacactgccgagcagtttattgataaggttgcttcgtcgtcatcgattaccgggaagccgtatattgtgaagatccccggtaagagcgatgagaacgcacagccttttttacatgcgctaattgcgcagacggataaaacggtgcctgcgcaataatcttaaatccccgccccctggctaaaatgctcttccccaaacaccccggtggaaaggtagcgatcgccacgatcgcagatgatcgctaccaccaccgcaccagggttagcttttgccacccgcagtgctccggcaaccgcgccgccggagctgacgccacagaatattccttcccgcactgccagttcgcgcatggtgttttctgcatcgcgctgatgaatatccagcacctcatccaccagagaagcgttgaaaatccccggcagatattccgcaggccagcggcgaatgccgggaatactgctgccttcttccggctgcaggccaacaatcgttactggtttggattgttcgcgcataaagcgtgaaacgccggtgatagtgccggttgttcccatgctggagacaaaatgggtaatgcgcccgccggtttgctgccagatttccggcccggtagtggtgtaatgggcgtaagggttatcgggattattaaactgatcgagcagctttccttcgccacgattcgccatctccagcgccagatcgcgcgcaccttccatgccctgctctttggtgacaagaatcagttccgcaccataagcacgcatcgccgcacggcgttcctggctcatgttgtcgggcatcagcaatttcatgcgatagcctttcagcgcggcaatcattgccagcgcaatgccggtgttaccactggtggcttcgattaagacatcacccggtttaatttccccgcgcttttccgcctcgacgatcatcgaaagtgccgcacgatctttcaccgaacctgccgggttattgccttccagttttaaccacacttcactgccgttatccggccccattcgctgcaacttcaccagaggcgtattgcctattgtttgttctaatgtactcacgatctctatccatacgtggtgttgcctgatgcgacgcttgcgcgtcttatcaggtctacaggttacaaaccttgccattaaaaagcccggatcgcgggaagcgcctccgggcgtttaacattcactcaacctatcaggcgctttgtgcgagagcaagttcctcatcgcgggtttcgatacgctcgtcgccgttatacagccgcgcatgttgcagaccaacgaataaacgctcgccacgctgcggggcatcgtcgccatgcatcacgaccgtcagcggttcgttgtaccaccccagcggctgcaccactaattgggtgtagtgacctttcgggctggcttccagtacctgtaccggcagcggcgaatcgagactggtacggcggctgatatccacttcccacgggcgcaggaagagatccaccggcccctgataagcaggtgtgtagcccagcggccagcgatgtgcgccaacatggaactgcccgccgcgaatggttccctgcaggcggttcacttcgcccataaattcgagtacaaaacgggtcgctggttcgcgccatacctgattcggcgcatcagcctgttcaatattcccctgactcatcaccactacacgatcggctacttcggtcgcctcttcctggtcgtgggtcacaaacacgctggtgaatttcagctcttcatgcagttgacgcagccagcgacgcagctctttacgcacctgcgcatccagcgcgccaaacggttcatcaagcagcagaatttgcggttctacagccagcgcgcgcgccagcgccacacgctgtttctggccgccggaaagctgcgccggataacgatccgccagatgcgcaagctggaccatttccagcaattttgtcactttcgctttgatggctgcggcattcgggcgctcgcgacgcggcagcaccgtcaggccaaaagcgatattgtcgaataccgtcatatggcggaacagcgcgtaatgctggaacacgaaaccgaccttgcgatcgcgcgcgtgcaggcggctgacgtcggtgccgtggaagcgaatatgcccgctggtttgatgctccagcccggcgataatgcgcagcagcgtggttttcccggaaccggacggccccagcaacgcgaccatctgacctgaaggaatatccagtgagatatcgttcagcacctgggtgcgaccaaacgacttcttaatattggcaatctcaatgctcatgatgttcctcctgctgtgcgcgtttatcctgattctccaggcgccactgcaacatactttttaaaaacagggtgataatcgccatcagcgttaacagtgccgcagcggtaaaggagccgacggtgttgtagtcctgctccagcaattcaatctgtaacggcagcgacagggtttcgccgcgaatcgagccggaaaccaccgacaccgcgccaaactcgccaattgcgcgggcgttggtcaacaccacgccataaagcagcgcccagcgaatgttcggcaatgtgacgcggcgaaacatctgccagccagacgcgccaagcaaaatcgccgcttcgtcttcctggctgccctggcttaacatcaccggcaccagctcgcgcaccacaaacggacacgtcacaaagatggtgaccagcaccattccgggccaggagaacataatttgcagattatgttcatccagccagccgcccagcgggccgttagagccgtagaacagcagatacaccagaccggcaaccaccggcgatacggcaaacggaatgtccagtagcgtcagcagtaactggcgtccagggaagttaaagcgcgtcaccagccaggccagcagaatgccgaacaccaggtttaccggtacggcaatcagcgcgatcatcaccgtcagccagatggcgtgcagcatgtccggatcggccagattctgtaaaaccggcatcagccccttgctgaatgcctgcacgaagatgtaaatcatcggcaccagcaggatgaacgctgaaaccagcatcccgatgccaattagaaaccatttgccccagttaatcgggcgcgcgtcataacgcttcaattgggtaacttccgccattaatgacctaccacacgccgaccaaagcgactttgcagagtgttaattgagaacagcagcagcagggatgccgcgaggatcaccgaagcaatcgcgctcgccgccgggtaatcaaactcctgcaagcgcacaaaaatcatcagcgacgtcacttccgtcttccaggcgatgttcccggcgataaaaatcaccgcgccaaattcaccaagactacgggtaaacgacagcgccacgcccgccaccagcgccggagaaagctccggcagcaccactttgcagaaactctgccagcgcgttgcaccaagcgtttccgccgcttcttcatattccgggcctaactcttccagcaccggctgcacggtacgcaccacaaacggaatgctggtaaaggccatcgccaccgcaatccccagccatgtataggtgactttgatatcaaacttcgccagccattcaccgtaaaaaccgtttacggaaaagagcgaggccagcgttaaaccggcgactgccgttggcagcgcaaagggtaaatccatcagcgcatcaagcagcgtgcggcccggaaagcgataacgtgttaaaatccacgccatcagcagaccgaaaacgccgttaaaaatcgatgccacaaacgccgacagcagcgtcactttgtaggccgcgaccacttgtgggttggtgatcacctcccagtactgcgcccagctcatctgagccagctgcatcaccagcgcggagagcggcagcagcaaaatcaggcacacaaacagcagactggtgccgaggcttaaggtaaagcccggcagcacgcgtcttgatgaaactgcaaacatcagttacgccccgccgctaacagcttgtctaactcgccgccgctggtgaagtgggttttcatcacttccggccaggagccaaatttgtcttccacgcggaacagctcggtctgcgggaatttatctttcagtttgtccatgacttccgggttatttacgcggtagtaatagtcggtgatgatggtctgcgcctgcgggctgtagagccagttcaggtaggcttttgctgctttttccgtaccgttggcctgcacgtttttatcgacccacgccaccgggaattccgccagaatattggttttcgggatcaccacttcaaagccctgtgcttcatactgtttacggatgttgttcacttccgattcaaagctaatcagcacatcgcccaggccacgctcggcaaaagtggtggttgcgccacgaccgccggtatcgaacacttcaacatttttcaggaactgggtcataaactgttcggttttggctttatcgccaccgtcagctttatccgctgcgccccatgccgccagataggtataacgcgcgttacccgacgttttcgggttcgggaaaatcagcttcacgtcggagcgcaccaggtcgttccagtcgtggatattcttcgggttgcccttacgcaccaggaagcccatggtggagtagaacggcgagctattattcggcaggcgcgactgccagtccgccgggatcagcttgcctttgtcatgcaggatttgtacgtcagtcacctggttataagtgacaacgtcggcttttaagccctgtaaaatcgccagcgcctgttttgatgacccggcatgagattgtttaatcgtcagtttgtcgccgccgttatctttggcccattgctgttcaaacggcgggttcagggcggcaaacagctcgcgggagacgtcataagaactgttcagcagttccgttgcctgtacatggcctgccagcagcagagaagcgaccagcgcgagtgagttctttttcagtaagttaacggccattgcgcacccttatatatttaatgactttctaatagccatcatatttataacggacgtgaaaggagtaacggttttatataccgtttggtgatttggaagttgaaaagggaataagaaccgggtttaaaacgaaatcctccccacacatgcagggaggaaacagaggtgaatcagataccgacgctaaccgtctccggcagtgtgctgccgccatcaatcacattctgtgtaccggttaaatagctggattcatccgatgcgaggaaggccgccagttcgccgacttccagcggatcggcgaggcgacgcatcgggattgctttcgccatttcagtcagcaccgactctggatcttccgggttcgactggcgggcaatgctttccgccattggtgtgcgcacgtatcccgggcaaatggcgttaacgcgaataccagactgcgcgtactccaccgccagcgattttgtcaggccaacaatcgccgctttcgttaaggcgtacgccgtttcgccaggatcggccaccatatcgccagtgaccgaagacatcatcacaatgcgaccatctttgcgggcaatcatctccggcagcaccgccttcgtgacgttccatacgcctttaatattgatgtcaatatggaaatcgcgatcgtcatcgctcatatcgaggaaactgcccagacgacaaacgcctgcgttattcaccaggatatcaatgcgcccttctttttccttcgcgcgtttgatagctgcggctaccgacgccgggtcacgcacatcggcgacaaccgccgtacagcgatgaccacgaccacacagttcgtccgccagcttttcgatctcaggggagatatccagcaagattaggtttgcgccatgacgcgcaaaagttctggcaattccttcgccaattccctgcaatgcgcccgtaatcagtgctgtcttgcccgtgagtttacccattttaatgctctccttgttaatacagagcgttacactccattccctctgaaaatacaggataaacaaaatattgctgcggatcagctcactaattcaggaaaatctcaatccagtcgctgctttatgcatcatttcaggcgttgtgttagctcactgctgcgctgaatcattttcaatgactccacatcattgagttgcacaagaccaacaaacagtaaatcggtaacagaattttgcgccgtgcgggtagacatcgacgagctacgccattcggtttcaccggaaacggtatcgagcgtgaaatgcgccagccgccgcagcggagaatcagccagagaagtaatggcaatcaccgttgccccctgctttcgtgccgcttctgcgcataagacaatctcttttttactgccgctgtaagagatagcgatttgtacatcgccttttttcaacgcctgggaaacggtggcttgtacgtgcgtgtcggcttcgcaggccacgcgatagccaattttcatcagtttgaacgacagatcgcgccccaccagcgccgatccgcccaggcccgttatctggataaacggtgctttactgatgacctcaatgattttttgcagccgcgcgtagtcgaacaacgaacaggtttgctccagcgccagctctttttcgcgattcaatttgcgggcaatcacttccagcgaatcatcactggtaatcgaactgtgcaggtgcagcgccgtggcattcgttttctcccggctggcactgtattcgcctattaacgccatacgcaattcagtaaatccttgcgcgccgagtttttgggcaaatttcactatgctcgactggctaatgccgagctgtttcgccatctgccgtgaagaaacggattgcagctcactcacgttggcctgcagaaagtcagcgattttttgctcgttttcggtgaattcactccccgcattgcttattttcgtcaggtacaacatcttccactctcctgggctggcagcataaattccgcttaagttcttatgacgctcttcacactctgcgagtgtagactcaatgattcctttaagtctgtcaattcgggatatatgattccatacatctgcaattatttgatcgtaaatagtaaggtcaccaccgatgcaactagaaaagatgattactgaaggctcgaacaccgcctcggctgaaattgaccgcgtatcgacgctggaaatgtgccggattatcaacgatgaagataaaaccgtaccgcttgccgttgagcgcgtcctgccggatatcgccgcggcgatcgatgttatccacgcccaggtcagcggcggcggtcgtctgatttatctcggtgcgggaacatccggtcgtctggggattctggatgccagcgaatgtccgcccacctacggcgtgaaaccgggtctggtggttggtttgattgctggaggcgaatatgccattcagcacgcggtggaaggcgctgaagatagccgggaaggtggtgttaacgatctgaaaaatattaatttaacggcacaggatgtggtggttggcattgctgccagcggtcgcacgccgtatgtgattgccggactggaatacgcacgccagctcggctgccgcacagtgggaatttcctgtaatccggggagtgccgtttccaccaccgccgagtttgccattacaccgattgtaggtgccgaagtggtcactggttcttcgcgaatgaaagcaggcacagcgcagaaactggtgctcaatatgctttccaccgggctgatgattaaatctggcaaagtgttcggcaacctgatggtcgatgtggtcgccaccaacgaaaaactgcatgtgcgccaggtcaatatcgttaaaaacgccaccggatgtaatgccgaacaagcggaagcggcgttaattgcctgcgagcgcaactgtaaaacggccattgtgatggtgctgaaaaatctcgatgccgcagaagctaaaaaacgcctggatcaacacggcggctttattcgtcaggttttagacaaggaataacccatggccaaagagatcagcagtgaacttctgaacaccatccttacccgtgtcggcggaccgggaaatatcgccagttgtggtaactgtatgacgcgcctgcgtctgggtgtacatgacagttcactggttgatcccaatatcaaaacgctggaaggcgtgaagggcgtcattttgaccagcgaccaggtgcaggtcgtttttgggcctggtaaagcgcatcgtgccgcaaaagcgatgagcgagctgctgggcgaggcaccggtacaggatgccgcagaaatcgccgcccagaacaaacgtcagttaaaagccaaacaaacctccggcgtgcaacaatttctcgccaaattcgccaccatcttcacgccgctgatccccggttttattgccgccggtctgctgctggggatagcgacgttaattgccacggtgatgcacgttccggcagatgctcagggcacgctacccgacgcgctgaattttatgaaggtgttcagcaaaagtttgttcactttcctggtgattctggtgggctataacgccgcccaggcatttggcggcacgggcgtcaatggcgcaattattgccgcactctttttgctcggttataaccccgctgcaaccaccggttactacgccggttttcacgatttctttggtctgcccatcgatccgcgcggcaatattatcggcgtgctgattgccgcgtgggcctgcgcccgcattgaaggcatggtgcgccgctttatgccggacgatctcgacatgctgctgacctcgttaatcaccctgctgatcaccgctacgcttgcgtacctgatcattatgccgctgggtggctggttattcgaaggtatgtcatggctgtttatgcacctgaacagtaatccgttcggttgtgcggttttagccgggctgttcctgatcgccgtggtatttggcgtgcatcagggctttattcctgtttacctcgcgttaatggacagccagggattcaacagcttatttcccatcctttcaatggcaggcgcgggccaggtgggcgcggcgctggcactctactggcgggcgcaaccgcacagtgcattacgcagtcaggtacgcggggcgattattcccggtctgctgggcgttggtgaaccgttgatttacggcgtcaccctgccccgcatgaaaccgtttattaccgcctgtttaggcggcgcagcgggcggtttgtttatcggcctgatagcctggtggggtctgccgatgggcttaaacagcgcctttgggccgtctggtctggtggcgctgccgctgatgacttccgcacaaggcatccttccggcaatgtcggtttatgctggcgggattctggtggcatgggtttgcgggtttattttcaccacgctctttggctgccgtaacgtcaatctggactgatatcatgaaacggacaatgctctatctttctctgctggctgttagttgtagcgtcagcgccgcaaaataccctgttctgacagaaagttcgccagagaaagcagggttcaacgtcgaacggcttaaccagatggatcgctggattagccagcaagtggacgccggttatcccggcgtaaacctgctgatcattaaagataatcagattgtgtatcgcaaagcctggggagcggcgaaaaagtacgatggcagcgtgttgatggaacagcctgtcaaagccaccaccgggacgctgtatgacctggcctcaaacaccaaaatgtacgccacgaacttcgccctgcaaaagctgatgagcgaaggcaaactgcatcctgacgatcggattgcgaaatatattccggggtttgccgatagtccaaatgacaccattaaaggcaaaaacaccctgcggatttctgacctgctgcatcacagcggcggtttcccggcagatccgcaatacccgaataaagcggtcgcgggcgcgttatattcccaggataaaggccagacgctggagatgatcaagcgcacgccgctagagtatcagcccggcagcaagcatatttacagtgatgtcgattatatgctgcttggatttatcgtcgagtcggtcaccggtcagccgcttgaccgctatgttgaagagtcgatttatcgcccgctcggcctgacacatacggtatttaacccgctgctgaaaggctttaaaccgcaacaaattgccgccacggaattgaacggcaatacccgcgatggcgtgatccatttcccgaatatccgcacctccactctctggggtcaggtgcacgatgaaaaagccttttattcgatgggcggcgtttccgggcacgcaggtttgttttccaataccggcgatattgcggtgttaatgcaaacgatgctgaacggcgggggctatggcgatgtgcagctgttcagtgcggaaacggtaaagatgtttaccaccagctctaaggaagatgccaattttggcctcggctggcgcgtgaatggtaatgccaccatgacgccgacgtttggcacgctggcaagcccgcaaacctacggtcacactggctggaccgggacagtaaccgttatcgatccggtcaatcatatggcgattgtgatgttaagcaacaagccccattcgccagttgccgatccacaaaaaaatcccaatatgttcgaaagcggtcagttaccgattgcaacttatggttgggtagttgatcaggtgtatgcggcgttgaagcaaaagtaataaaaaggccagtcagtttttactgcctggcctttaatcatagaatcagaaacgcttacagcgccatcagcttgtccagcgacggcgcgaagtaatagccgccggttaccggtttggtgaaacgcaacatcgcatcacgcttaccatcggtatcgccaaacatgctcagcagttgctgctcaatgttatgcagacgcgcgcagtaggcgcagaagtacagaccgtgagtgccactggcggtgccgtacggcaggctctggcgaacaatcttcagccctttgccatcttctttcagatcaacgcgggtgaggtgagaggtttccggacgttcgtcgccgtcaatctcttcgttggcctctttggtgcgcccgatcatcatctcctgatcgtgaacgctcatccggttgagctgcttcaggttgtgctcccaacgctgcacaaacacatagctgccgccggcatccacgccgtctttgataaccgccacttcgcgacgcgtctcttcacccgccgggttttctgtaccgtcaacaaagccgctcaggtcacgctcttccacccaacggaagccgtggatctcttctttcacttcaatgcagtcaccaaaggcttccatcgccgcctgagcgacagagaagtttacgtcgtgacgcagagaaagaatgtggatcaacacatcgaactgggtggtcggcgcaaggcctttaccgtagcccggaaaatctttcagctcttctgccccaacgccgccgctcagagcgcgccaggtgttgttaccaaaggcaaccaccgcaccaagatgcgcgtccgggaatttcgcttcaaaagttgccagtttgtcggcaaatgttttactggccgcacgcagggcgtcaacttcccctttcacgttggcttcgatccaaatcgccgcgcggcaatgttctggcaaaatgccactctgaacctgagacattgttcctcctgaaaataagaatgccacgcaatccgtggcattgttgagcgctattttacgtgttttttcgcggcggcggtttgttcagacgcaaattaacgccgccagataattttactgactttccagtttttcagggtatcgtccgaaggcattaacccttcaggaccactccattccccgctgaactggtagctaatatgttgactgccttcggctttacattcgacggcacgattatcatcaccatcagctttttggcaattgccaaatgctttgctgtaaaggtcgctaaacggtgtaccgattttaacaccggtgtcagcaggaatatcgctatccagcacgtcaatgcgactgatcgtgccttgatcgccgttaatcaccatcgccacgttgtcgcccttcatcacttcaaaaaagcgcaccacgttgccgttcgcggttttcattccgctgcgcaggcgataatcgccatcaagcgcatcggcaatggcttgttcttgcagtggtgtggacgccgttaattcacccacgccctgctcgctcactttggtggacgatccaaaccagttccacgggttagcggccgaccagttaactgacgacatcgtggaacagccggtcagcatcaacggcatagcgcataacattaaacgcagcgatttcatgtcacttcctttggttattcaataacgttgcttggagtgcaaattcaccaaaaagtgccgttattctttttcttcattaaaacaagcgcgtaaacgtcgattggtcagcagccagattaacgccacaatatccgccactaccagcgccagaccgataccgctaacggattcaccgttcagccacagccacggttgccagcaaagtaaaaccacctgcgccaacagcaacagaaaatagagtacacgccaggtgcgaggaaaatgtagcccgccgaccgctcaacaaaaacgccagcaccgccggaatgccaggaatcagcccagccagaaattatcgtgatcgggataaaacagatttagcagcgcagtaccctgctcacgcgacgcaccggcaatgacaaacagcacccaggttcgcgcctgaagcaatagcacaagccagaagagcaagggtaaacgcaggcgtccgtgcgcatcataatggacaggatggaactcagtactcttcatcttcaatcaaacgcttacccagactcagcacgtcggcgtgttcatatcccaggcgttcatacattccgagcaccatgtcgttatcttccggcacattgatctgaattttcgggcagccacgagcaatcagctttttctccagccgattaagcaacgcattggcaatcccacgcccacgaaactctggatgcacgccaagataataagcagacccgcgatgcccgtcataaccgcccatcaccgttccgaccacttcaccgtttacctcagcgaccaaaaacaaactgacgtcatggttcatcttacgctcgatgtccatttccggatcgttccacggacgcagcaagtcgcaacgctcccaaagggtgatgacctcttcgaaatcttcctggcgaaatacgcgtatctccatggtattcgttacctttttgcgggttaaaaggctgattatggcgtgaacggtcgaattagccaatatctgacgaaaatcggttgaaaaagtggcataatggggagttgtcaactattgaaatgaaaagtaaaacaattctcaacatcaaaccgtcgtaacggattacgcgatacgatataacatctggaactttattattacaactcaggccgtatgagcacttttaaaccactaaaaacactcacttcgcgccgccaggtgctgaaagccggtttggctgccctgacgttgtcaggaatgtcgcaagccatcgccaaagacgaacctttaaaaaccagcaacggacacagcaagccgaaagccaaaaaatctggcggcaaacgtgtcgttgttctcgatccaggccacggcggaattgataccggagcgatcggacgcaacggttcgaaagaaaaacatgtggtgctggcgattgctaaaaacgtccgttccattttgcgtaatcatgggattgatgcgcgtttaacgcgttctggcgatacgtttatcccactttacgatcgcgttgaaatcgcccataaacatggcgcagatctgtttatgtcaattcatgccgatggctttaccaacccgaaagctgccggtgcttcggtatttgccctctctaaccgtggggcaagtagcgcaatggcgaaatacctgtctgaacgcgaaaaccgcgccgatgaagttgccggtaaaaaggcgactgacaaggatcacctattgcagcaagtgctgtttgatctggtgcaaaccgatactattaaaaacagcctgacgctcggctcgcatattctgaaaaagattaagccggtgcataaactgcacagccgcaacaccgaacaagccgcgtttgtggtgttgaaatcgccgtcggttccttcggtgctggtggaaacctcgtttatcaccaacccggaagaagagcggctgttaggcacggcggcgtttcgtcagaaaatcgccacagcgattgctgaaggcgtgatcagttatttccactggttcgacaaccagaaagcacattcgaaaaagcgataagttatgaaacccgacgcacaccaggttaaacagtttctgctcaaccttcaggatacgatttgtcagcagctgaccgccgtcgatggcgcagaatttgtcgaagatagttggcagcgcgaagctggcggcggcgggcgtagtcgggtgttgcgtaatggtggtgttttcgaacaggcaggcgtcaacttttctcacgtccacggcgaggcgatgccagcttccgccaccgctcatcgcccggaacttgccgggcgcagtttcgaggcgatgggcgtttcactggtagtgcatccgcataacccgtatgttcccaccagccacgcgaatgtgcgtttttttattgccgaaaaaccgggtgcagagcccgtctggtggtttggcggcggcttcgatttaacccctttctatggttttgaagaagacgccattcactggcaccgcaccgcccgtgacctgtgcctgccatttggtgaagacgtttatccccgttacaaaaagtggtgcgacgattacttctacctcaaacatcgcaacgaacagcgcggtattggcgggctgttctttgatgatctgaacacgccagatttcgaccactgttttgcctttatgcaggcggtaggcaaaggctacaccgacgcttatttaccaattgtagagcgacgtaaagcgatggcctacggcgagcgcgagcgcaattttcagctctaccgtcgcggtcgttatgtcgagttcaatctggtctgggatcgcggcactctgtttggcctgcaaactggcgggcgcaccgagtcgatcctgatgtcaatgccgccactggtacgctgggagtatgattatcagccaaaagatggcagcccagaagcggcgttaagtgagtttattaaggtcagggattgggtgtaaccccctcacccccattcccgcatccgctgatgcaacgtcaacgacggcttctcggcaaacagctgctggtaatccgtggcaaattgccccagatgccagaatccccactgcatggcggcgtcttttaccgttgtgctttgcgaccacgggcttatcagttcgcggcgtacggcgttcaggcgaatgcgtttcagccacgcgtttgggccaatgcctaaaatagcgtgaaacgcgttttgtagcgtgcggcgactgacatgcagttgattacacaagtccagcaccgtcaccggctcagacatattttccagcacatattcacgggcgcgggaaagtaatctacggtaactctgatgactgatgctttccgccgtcaccattggttgcgcgtcttccagcatcgcccccatcgccattagcaaattatcccccagcacttttcgcactgcaggctgatggagattttccgggttctcgcaaaacgtcgccagcgcctgttggacaaagccccacagcgcggctttatgctgctctttcacttccagcgccgactggctacgcagcatatgtaatacccgatccgggttatgcaaaaagttagcctgccgggtgatgacatcttcagaaagcaccacgcccaggatcgtgtaatcatccggcgtgctcagttcaaattcagtgccaccagggcgggtggcgatttccgcgcttcccagacattgcgaaccgataaatccctgcacaccgcgcgtcgccggaatgccaaaccagaacgagttcggccagaccaggcacgactgacgcagcgccagaccggtgtattcacgaaaaacctgaatatcatcgagtagaatttccgtaaattcaccatgaaacttgcccggatgcagctgatcgtaaatctgctgccaggcggtaatcgttaaagcatgttcatagacatccgttgtctgtcgttgatgaacattatccacttcgaccttcggcgtgagcttcaggttttcgggtaagggttcatgataaagatggtgcaaattggctgtacgggtctttttcatgatgttaatgccgggtgttgtaggacacccggcacctccgacaggttaatggggcttgagacgataacgactactgcgtttacgtaacgtcccggcagaaaagagctgttcgagcgcatttctggctttttccagcggccagccaaagtgggcagccacttctcctgccgtcattccctgacgtactgatgttaacagcgccaacaactcgtcagcagattccgcgacgataactggcgcgtcgggttcccttacgggttgcttcggctggcggttaaagccagtaaccagccactgggtgtcatcgtctggccgaccgatctccttgcggctgatgacacgcccggtacgcatcgcggcagcacaacctgcgtccagcgccgcacgacacgccgccagatcgccttccaccaccagcgttaagcgaccagggtcaagcacttcgtgactgagcagacgaacgttagctgctttgagcatggcatccgctgcatctatcgcggcgaccatgccgtccacttccagcaatcccagtgcattgatcatcggcaacctccgttacgcacgctggattggattacgcgcgatttccagcactgcatcggtaaaggcgttacaggctgctttacacgcggcctggctaccggttaaaaatgctgccgagtagttggtttcagacggtggcgggacataggtcaccagctgtacgtcggcagatttcaacgctgcatcaatgccataggtcgcttccagcggcggtgccaccagatacgccatcggatcgccaagcgtgatcccggcggttgatgagagataagaaccggtacgcgaaaccacatgcgccaggaaggcggtgttttctgcgtcattggcccactggaatgctgcaccattttcaatatgtgcaaccatcgcatccagaccggcacgcacttccgccgggtttggcccaccaagcataatcagcacttcaccggcagtcggtgacgggccgtgtgcagcgcccgcatacagcgagcgaccatataccacttccaccatcgcctgcttggtcgcttcatcagcggcaatgtaggtgacgtcatcggaatcagcagaaatcagcccgaggctacgaatatgcggcggcaattttagttcacgcgcaaattcagcgttaacggaggcaatcacccgcatggcggttaccgacggtcgaatcaaatctaaagctggcatgatgcctccttatcgggtcatgttgatgccggatgctttctgctccagcatacgtttcgccaaatccacaatgacggctgcggcttcaaccggcggcgtgccgccctggtgaatgttagagatgcaggtgcgatcggcctcaacggtggtcgccatacgcggcgagtaaacggcgtaacaggagaggctttctgactgacccaaccccggacgttcccccaccagcaggatcaccactttcgcgccgaggatctcaccgatctgatcttcaatcttcacgcgaccataacgaacaaagaatggcgtgccgactttcagcccggcctgtttcaggcccgccatcagcggcggcaggatctcttcgtagttgacggtgatggcatcagttgacaggccatcagaaataacgacctgtacgtccggattagcaacacactgtgctttcagcgcttcaacagcttctgcacacaggcggcggcccatatccgggcgagtcaggtagagatttttgtcgctaatttcagagcgtacttccagcaagccctgcgctttcacccactcttccggcacttctttcagtacggtatctttcgaacgagagtgatcggccaggaaacgcagcagcgcctgcgtacgcggacgcggaccggcacgaccggtacaaacgcgggccacggtgctgcggcgcagttctgttaatacgtctgcgcgatgcgggttttcaacaccaatccacgcttttgcttcagcggaacctaaatccagcgcacagctttccgaggtcaccggtgccgcacagttggtggtggcgcactttgcttctgacggcgcgggggccgtttgtcccattgacgccatcacgctgcgtacaatttcttcaatctgtttttgatccatgatgtgttatctccgcgtcatcagaagaacagtgacggatcgcccgcccgtttggtcaggcgaccgtttgccataatgcccatgctttccagccagcgttcaaactccggtgacggacgcaggttgagtaactgacgcacagtggcggtatcgtggaatgcggtggtctggtagttgagcatgatgtcatcacccagcggcatccccatgatgtagttgcagcctgcggtggcgagcaggatcatcaggttttcgttgaggttctggtcagcgtcagcgtggttggtgtaacagcagtcacagcccatagagatgccgctcagcttgcccataaagtgatcttctaagccagcacggataatctggcggtcgttgtagagatactccggcccaataaagccgaccacggtgttgacgataaacggatcgtaatgacgcgccagcccatagttacgtgcttccatcgtcacctggtcagcgccgaagttagcgccagcggatagcgcagagccttgtccggtttcgaagtagaggcagttttccccggcgatacggttgaactctgcacccactgcgcgcgcttcgtcgagcatcgccagttccacgccaaactctttcagccctttttcgctgccacagatactctggaaaatcagtccgccaggcgcgccgcgacgaatcgcttcgatctgggtggtgacgtgcgccagtacgcagccctgagttgggatgttgaatttgtcgatcacgccgtaaatggtgtccaacacgcggcttaagttttccacgtcgtcagtcaccgggttaacgccgatcaccgcatcgcccaccccgaaggaaagcccttcgtagatttgcgcggcgatactttgcacgtcgtcacgggtgtcatttggctgcaaacgggcgctgaaggtgcccggaataccaatggtggtattggcctttttgattaccggcattttcttcgcgccgtagatcaggtccgcgttggagcaaatcttcgctaccgccgcgaccacttccgaggtcagccctttgcgggtaaaggcaatgtcgtccacgctggtttcatcgctcagcacatactcacgcagttcgctgatgctccagtttttaatctggttgtaggccgtttcgttaacatcgtcctgaatcagccgcgtcacgcagtcatcttcataggcaatcaccggattattgcggatgtccgctacggtcatttccgacaacacctgctttgccgccacgcgctcctgtgaacttgccgctgcaacgcctgccagcacatcccccgaacacagttcgttggctttagccagcacctcttttacatccttaaactgatatacattgccgaacaatgtggtctttagtttcataagtcgttccctcaggaaggaaatgcgagtgatttcaccgtcaccggcacaaccgatccgccaaaaagaggcgtaccaatgtcgatatagtcccccgcgcggacaatcacttcgtcaatgactgccaacgggagttgttgtagctgtgggcgcaacaacatgcccagagctttaccaaagtcctgcccggccaccaccagcaggggatgcggattcggaaaacgcgcgacgaaatcgaccagcgcgttgatgaccgtcagtaccgcggcgtaacgcacaggcagcgaggcgggaagcgccagcacgtacgcgtcagtttggatcaagatccagctgaagcagcgcctgttgccaggcactcaccagatccgtttcatcaatcgggatcgccaccggcaaattgcgcagcggcagttgtacgccctccagccagattgtgctgccagagagcgaaagggtatgtgcacccgcgccaatcaccgtggcgcgtacggtttgcgccggaaactgcacattcatctcacgcaggcgcggatggtcatgcagcgccgttgccagaagtgggccaatatcggcaaaacagaacgggtcggcgggctggtggcgataacattcgcccacgcctccagaaagcgtaatgatttcgggcgtaacacctgcgggcagcaaaccggtttgcatcaatgcctgcgcgagcggcgaaagcgttccgtcaatcacttcgacaatcagcgccgccatccgccgggtaacctgcaccagctgcgcgccggtcagcgaacgggcgtcagtgcctgcaccgaagcactcatccacaatcatctgccccggtttatgagcgtaaaccacgcgcccctggctgtcggtttccagcaggcgaccaccgacgttgagacaggcagtgccgctgatttttccggcatcgaacagggcgtagttcgcggtgccaccgccgatgtcgatattcagtacccgacacagccgttgttcagaaagggtttgcgccccagctccgtgaccggcgatcacggattcgaggtgcggcccggcgctggcaacgacaaaatcccccagcgattgagagagcgccatcaccgccgggcgagcattgcgggttttcgcgctttcaccggtgatgatgatggcaccagaatcaacgctttccggcgcaatacccgcagcctgatattgctcgagtattaaggttttcagttccgcttcttttaaaccgccctgtttatcgacaggggtaaagaacaccggactttgccagctaatttcgcgtttaatgaattcgtagcgcggcacctgcgacaccgccgcacggttaaccagctccaggtgggagaaaatcacctgggtggtggtggtgccgatatcgataccgacgctcaatagctggcgagtgttcacgattgtgcctccgcttcggttttagtcgcggtcgcgtcttcttttggcaccagcatcatcgccacgccaatcgccgttacgccgccgatcaacttgccgacaatcatcgggaagatcatggcgttcatgttggcagcggcgaagcctaagtggtcgcccagggcgaaagcagcggaaacggcgaaggcgcagttgatgactttgccgcgggtatccatctgcttcatcatgccgaacatcgggatgttgttggcaagcgttgccaccatgccggctgccgcgatgttgttcatattcagtactttaccgacgctcatcagcggtttttcaaaccagcgagtcagcagcagcaccattggatacgcccctaacagcacgcaggagatagaaccgataacttcaatggcgcgcatcacttcaccgggtttatcgccaggggccataaagataggatccagaccggggatcagttcccagccaagcaggaatttcactaccgcagcggcaagaccgagggtgatcaatgcaacgaggaatttggcgaagatctggaagccgttgatcattttttccgggatgaatttcagccccagcgccaccagaatcgcgacaatgatcaccgggatcatgttcatcaggatcagggcgaaagtgaattccaccggctgaccgttgatctgcacaccggagtacatagcaaccagaccaccagcaatacagccaatcggaatggtcacaatgcccgccagcacgccgagcgccagataacgacggtcagaaggttcgataatgccgagcgccaccggaatggaaaacacaatcgttggccccatcatcgacccaagaattaacccagagtatagccacgctgctacgtcgccgcccgccagctctttggcgaggaagaaaccgcccatatcgcacgccagcagcgttccggcgaacattgacgggtttgcgccgagcatttcgtaaaccgggataattaccggcccgagtacgtgagccagtaccggtgccagcgcggtcataccgaccatcgccagacccagagcgcccattgccataaagccttcttcgaactgaccgcctgatccttcgatacttttaccgaacttaccgaggaaacgagcagaaccgccgaactgcgacaggatcctgtctacggcagctatcagcataaagaacatcatgatgtacatgatgatttcgttaattcccatcgcctttactccctgttagttgttatttattggcggatgcggcgtaaacgccttatccgccctacatgtgcaatcccgaaggccggatcagacgcggcaagcgtcgcatccggcaattgcaccgcgccactggcggatgcggcgtgaacgccttatccgccctacatgtgcaatcccgtaggccggataagacgcggcaagcatcgcatccggcaattgcaccgcgccactggcggatgcggcgtaaacgccttatccgccctacatgtgcaatcccgtaggccggataagacgcggcaagcgtcgcatccggcatttattgcgccgccgcgtacagtccgacaatctgttccaggctggcggtacgcgggttgctgcgcagacaaatatcttcctgcgcggcctgcgcccatgcaccgtaatgcgcagatgtcgcgccaacatcgcccagtcgtttaccaatcccaacttccgcaatcagctcacttaccgcgttaatagcgtcacgatcgtcggatttttagttcgcagtgcccgaccaatctgactaaaccgttcgcgacaaaccatccggttaaattccatcaccgttggcagcaacatggcgttcgccagaccgtgtggaatatgcagcgccgcgcccggctgatgcgccatcgcgtggcacaacccaagacccgcactggaaaacgccattcccgccatacatgaagccagcaacatgctctcgcgcgcggcaaggtcgtgaccgtagcccaccgctttcggcagcgatttgccaatcatcgcaatggcaccaatcgccagactgtcggtaaacggtgtagcgttcagggcgctgtatgcttcaatggcatgggttaacgcatcaatgccggtcatcgccgtgacatgcgacggcacaccttcggtcaacgcggcgtcgagaatcgccacatccggcatcagcgaagcatgggctaacacctgcttgcgcccgctcaccgcatcgataatcaccgttacgttggtggtttcagagccggttccggcggtcgttggaatggcaatcaacggcaggcgcggttgcagaacgctggtttctgacatttccgccagcgtgctatccgggttcgtcaccagcaacgccacggctttcgccgcatccagcaccgagccgccgccaaatgcgatcaccccatcacagcctgactcacgcaactgcgccacggctgcacacacgtcggtgatgcacggttcgcccaccggacatggccagagcgtcatggcgatgcctttaacagccaggctgcgcgtcagcccggcggtcatccctgcctgatgcaaaaagctgtctgccatcacgaacagatgtttcagcccacgcgtttgcgcttgctgtccgcaactgctcaccgagcccggaccgcaaagcgtcaccggtggaacgctaaatgtttttacccgttgcagattcagggtatcgaacgcctgaaagagcgcggtctgcaattcattttgcatatagcccctccgctttctctcgcccactactggcgatcgccagcggggtcataaacaaactgtgctgcggtaaatgcacctgtaacgccgggaattgtttgcgaaacagttccgccacgcccggttgcatacaagagccgcccgccagccataaatcagtaatgccctgcccttcaatatgccgggcgacaatgtccgccattttttcgtacaccggtttcaccgcgggccaaatctcgtcaccatgaccgcgcttgtactgctctgcctcttccagcgaaatacgacgatttccggcgagagtcagagagatgtgatgtccgccggtggcttcatccgccgagtacgtcaccttgccctttttcacgatggcaatgccggtagtgccgccgccgatatccactacaccggcgttgtccagttgcagcagatccgcgactgcggttggctcatccagcacatggctcacttccagcccggcagattccagcacgttgatggaaatacgcgggtccgtacctggaggaaatgaagtcgccgcatggctaaaacggcgaccgaattgctgctcgagcgtgtcgagatggcgacgaacaatggtgacagcgccgaagaaatcccagacgatgccgtcgcggaccacatcggcccagtcgaggcataccgccaccggctgaccgtcgcggtcgacaaccatcgacaccacatcgcaggtgcccagatccacccccagccacagcggagattccgtcgcggcgggcgtctggttacacagcgttgccgccgtttgcagacgtggggtgagccattgttcgtcgtgcgccatctgttactccttaaacaatgcgaaacgcatcgactaatacacagcgacgcagacggacaaacgtacgcgcgctggttaccccttcaccggttggcgtggtgatggtcatggtggtccagccttccccgcccagccccagcccggcaatgcacggtccgttcttaacgaaaatgctggtatcaatagcattcgccatctggttcatgttttcgatgttgcgcgagtgcattgccgccgtgtggtggcaaccgccttccagtttcaccgccagcgcaatggcatccgccacgttggcgacgcgcacgacgggcagcaccggcatcatcagttcggtcacggcaaacggatgttctgcagtggtttccacaaacagcaaacgcgtttcttgcggcacgttcaggccgattgccgccgcgattttcgccgcatcgcgaccaacccagtcacggctgacggtgccttttccgcgctcgtcgatatttttcagcaacaccggttgcagctgctgcgcctgttctgcggtcagtttcaccgcgtgctggccttccatcagacgcatcagttcatcggctacgctatcaacaacaatcagtaccttttcgtcggcacaaatgatgttgttatcgaaagaagcgcctttgacgatggactgagcggcacgggcgaggtcggcggtttcatccaccactaccggcgggttgccagcgcctgcggcaatcagacgtttattggtgtgtttacgcgccgcttctactaccgcttcgccgccggtcaccaccagaaggccgatgcccggaaacttgaacaaacgctgcgcggtttcgatatccggatttgccacagtaaccagtaagttttccggcccgcctgcggcaacaatcgcctggttgagcagcgtgatcgcccgctgggagacttttttcgccgccggatgcggggcaaaaatgacgctgttgcccgcggcaatcaggctgatggcgttgttaattacggttgccgccgggttagtggaaggcgtcaccgaagccaccacgccccagggtgcgttttcaattagggtcaggccgttgtcgccagtcagcacttgcggagagaggcactcaacgcctggtgtgccgcgcgcctgagcgacgttttttgcaaatttatcttcaacgcgccccatgccggtttcactgacggcaagttccgctaaatctctggcgtgtttttcgcctgcttcacgaatggcagcaatggctaactggcgcattgccacgctttttaacccttgctgggcgactttggctgccgcaacggcgtcatccagggacgcgaaaacgcccatctcatgaacggcggcggacggcgtgtcactgctttgcattttcagcagtaccgctttcaccacctgttcaatatcctgttgattcatgatgttctgccttatttgtggaaaattacctgaccgccagacaccacctcatcgacaatgccaatcacgcacagatcgaccggtgacgtttcgcttttatgcgcctggcgggcggaactgccactcaccagtaacacccactccccggttcccgcgccaatattgtcgatggcgacggcgcattgcccgtcaggattaccttgtggatcaatcatttccaccatcagcaatttgtcatgcgccagtccgtgatggcgtacggtacaaacaatttgtccagtgacgactgccagtttcatacccgcctccgtggcgtatttcaggtaaaagctccccctaccctccgcagaaggtaaaatgaaaaaggagagagcgtgacgcccgaatcgacgtcacacagggtgattacaggttgctgctatcgcctttcaggccgatcgggaagacttcttccaggtcgccgtgcggacgcgggataacgtgtacagataccagctcgccgatacgctgtgccgctgcggcacctgcatcggtcgcggctttacaggctgcaacatcaccacgaaccatggcagtacacaggccgccgccaatctgcttaacaccaaccagcttgacgcgcgcagctttcaccatcgcgtcagaagcctcaatcagtgcaaccaggccccgggtttcgatcattcctaatgcttccattgtgctttcctctttatcagggtccagaacgggaccgttcattcaaccagtgtttgtaaactgctttcgcggttcacttctgtctgacgcggcacagctgccaccagcgccagctcgataatttcctgcacgctacaaccacgagagagatcgtgcatcggcgcggcaagtccttgtatcagtggcccgacggcacgatatccgccgagtcgttgtgcgattttgtaaccaatatttccggcttccagcgacggaaaaaccatcacattggccttgccctgtagcgggctggcaggcgctttttgcgccgccacttccggcacgaaggcggcgtcaaactgtaactcgccatccaccaccagctttggtgcgcgctcacggacgatttctgtcgcctgctggacgttagcaacacaggggtgacgggcgctaccattgctggaaaacgacagcatcgccacgcgcggctcttctccggtgatggcgcgccaggtttcggcactggcaagcgcgatatccgccagctgcgccgccgtcggctgtggcaccacgctgcaatcggcaaagcccaacgccgggccgctgtactgtggcaacatcaggaaaatggaagagagcgttttacagcctggctgcaagccgataatgcgtaatccggcacgcagcacatttgccgtggaagagaggttgcccgcgatacagacatccgctttaccggcgctgaccattgctgcggcgaacatcagagggtcggtaagtttttccagcgcatccggcggcgttttttcgccgcgcgggccagccagcgatgagcaaattcttcccgcattgcgaggttgccatgcggatcaatcacctgtagcccgtccatcgccacgccgtgactgagcgcaaactgacgaagttcaaacggattggcgaccagaatgggcgttgccagaccttgttgatgtaaatattgcgcggctttcagcacacgttggtctaacgcatccggaaaaaccactctggcgggcgctcgcaacgccagttcacgacaacgttcaataatcattgcgtttcccccagtcgttgttggatctgcttcaccgttagcggctgcttcgttacgctcaggatcatcatcacgtagaccgtgctggaaaggcggttcagcgcctgcaaaatgtccgggcgtaatacttcaaagctgcgggtgataaacacctgcgccgctacggtttcggtttcccgcactttggtacgtagcagattgagcaacgccgcatcgcgcccgtggctggcttccggcaccagatgatcgtggtcgagatagcgcagcggctggtgagaaagtcgatgcagatcttcgtcagaaagcccgacaatcgcctggcagcccagcggttcacccagcgcatcggcgcgcataatgttgccaagacgcgaacggatatccgccagccacggctgccacggttccgccagttcaatttgcagccacactgccagcgcaatggtgctgtcgagaaccgcgcgaaaacccagacgcggatcgcttttggcgaccattttttccgccgacaggtgagtcagcgtatccggcttttttgccaccggctggcggcacagttcgcagcacgcctgcggatgttcatcgctactggtcagcccatgaacgggctgcggctgctgctgttcatcgtcaacaaacaggcggccctgctcgtcaataaacttgatgcgcagatggcggctttccagcaactcccgggcagagggcgtcaggcgactgtccgcagggagatggatctctgcgccttcgctgagcgtatggttcgctcttagccatgcttcggtgatgaaatctttcatagggattgccagttagccggccaggcgacatacaggaatttcacgctggatgtcgtaccaaattcgatgctggagcctttcgggataaacatcacgtcgcctgctttggcgatcatggtttcgccttcgtggcgaacatgtagctccccttccagcaccatgtcgatttcgtcgtagttcagggtccacgggaagaatgcgttctcccactgcataaaaccggcggccatgctgctgccgtcgtctccggtcacaagatcagtcaagcccacgcaatgcggctctgcgccgtcgaaacgaccaaacttgacgctgctgccatcaatcactttgatgccgcctttgccggtcaccgatttgaagctcggctgcattgcgccctgctccagcgactgtttttccttcatcactttttccatcagctgtgcgaccaggctttcggtaaactggccttccggcagctgggcaatgatggtttcgcggatgcgctggctttcggttttgtcggctggcacgctggcgggcacggacgccgttaccgggatcgattcatcacattcggtgatggtaaaacccagtagatccgccacttcacgggcttccggggtaataatgctggcgcgcagaaccacggacattgcctgttcgccgcgcgcgtgtgcttcacgaatatcattcgctgtgatgagttttttcacctgcttcctcctgtttggtgagagatgccagataatccaccagttgctgcacgctttgcgggtcgtggctgtttagctcgaaaatcggctcttcgaaacccgtctcaagcaataactttcgcgttgcggcgacgtcagcatctggcatgtccgttttactgatgacggcgatttgccgtttgctgacgccaatatccagcaacccggcaggcaaccgactttccgggtcatttgcgccatggacatagatcagcatgtctacatcctgtagcgtggtaattaaggcgtgataccagcggggatggctaaaatattcacccggcgtatcaatatcgcccttatcattaaattccacggcctgtgtttttctggcgagggtataattcccctgcaacgcattaaataacgttgtttttcctgccccgacgctacccacaaacgcaattcgtttcatgaatgcctcgtattaacttttggtcatttcacaaagcgtataatttaataagcgacctaaaccgctgacggtttgtgataacgcttcttctactgcgcccaccgagccataaatcaccaatgcaccgctgaagcggtcgagaaaaccgatatgcacatcagcggctttcagcgctaaatcaccggcgatcatcgccgtttcgccgggagttagcgtcataatgccaattgcgcccgcatccggaacgccgattttcttcgccagttcctcaccgggatgcgcgatgagatgcgccagtgtgacctgtttgccgggcacaaattcctgaatgatgcgttctttatccatgagtcgccgcctgtgaaaaactttcgtgtatcgtgacaatttttcgtcagagtaaataacaaaattcggcaagcgcgtttaaaaggtgaggtagatcactaagaatggagagatattcgctgtggtgcataaactttcatatgcaacgcatgaatataaataaaataatatcgagatattatatagactgctttttttattattcgcaaactcagtaataagctttactaatatattgcagccaaaccgcttaccctgaatattcagggtaagcgtgagagttaaaaaagaattacagcggttgggtttgcgcttcaaccacggccagcgccaccatgttgacgatacgacgcaccgatgcgatcggcgttaacacgtgaaccggtttcgccacgcccatcagcaccggaccgacagtcacaccttccgagctggaaacgcgcagtaagttgtaactaatgcgggcagcttccatgttcggcatcaccagaatattggcagaacctttcaaagggctgtccggcatacggtcgttgcgaatcgcttccaccagcgctgcatcgccgtgcatttcaccatcaatcatcagatctggcgcacgatccctgaccagttccagcgcctgacgcattttgctcgacgacgggcagtcagaagaaccaaagttggagtgcgacaacagagcaacgcgcggctcaataccaaaacgacggacagtttctgccgccatcaaggtgatctccgccagctcttctgcgtctggttcgtcattgacgtaggtatcggcaataaaggtgttaccactcggcagcagcagcgcgttcattgcacctgcggtgtgaacgccatcgcgataaccaaagacatttttcaccacgctaaaatgttcatgataatcgcccaccgtaccgcagatcattgcatcggcttccccacgctgaaccatgatcgcgccgatcactgtcgggttactgatcagcgcccgctgcgcctgttcctgagtgacaccgcgacgcttcatgatctggaagtattcggtccagtactctttaaagcgcggatcggattcgttattgacgatctcaaaatcaacgcccgctttgatctgcaagcccagtttctgaatgcgcatttcgatcacgttcggacgaccgataaggatcggtttcgccagtcccagcgttaccagttcctgagtggcatgcagaacgcgcgcctcttccccttctggcagaacaacgcgcttcggcgctttgcgagcctgggagaaaatcggcttcataaacaggttggttttgtaaacgaactcagtcagcttgtcgatgtagacgtcgaaatcagcaatcggacgcgtcgccacgcccgactccatcgcggctttagcgaccgcaggagcgatcttaacgatcaagcgcggatcaaacggttttggaatgatgtattccggaccaaagctcagatcctgatcgccatacgctgaagccaccacttcgctctgttcggcgtgggccagttccgcaatcgcgcgtaccgccgccagtttcatctcttcattgatagccgttgcgccaacatccagcgcgccacggaagataaacgggaagcaaaggacgttgttgacctggtttggatagtcagaacgaccggtgcaaatgatggcatccggacgcacttctttcgccagcggcggcagaatttccggttccgggttcgccagcgccaggatcattggcgcacgagccattttcttcaccatttcctgggtcagcactttcgggccggaacatccaaggaaaatatccgcgccttcaatcacatcatcgagggtacgtttgccgtcatccaccaccgcatatgcggctttggtttccgccatgtttggctcacggccctgatagataacgccttttgaatcgcaaaccacgatgttatgtttttgcagacccagcgctaccagcaggttcatacaggcgattgctgcggcacccgcgccggaaaccaccatccgcacgtcggagatgtttttctccaccacgcgcaagccgttgaggatggcggcagtgctgatgattgccgtgccgtgctgatcgtcgtggaataccggaatattcatccgctcgcgcagtttctgttcaatatagaaacattctggcgctttaatgtcttcgaggttgattccgccgaaggtcggttcgagcgcagcgacaacttcaataaatttgtccgggtcgagttcatcaacttcaatgtcaaatacatcaatcccggcgaatttcttaaacagaacgcccttgccttccatcaccggtttgccagccagcgcgccaatgttgcctaaccccagcaccgccgtaccgttagagatcaccgccaccaggttaccgcgcgcggtatatttgtaggcttttaacgggtctttttcgatttcaagacaaggtgcggcaacgcctggtgagtaggccagcgccagatcgcgctgcgttgccagaggcttggttggagaaacctggattttccctggaactggaaattcatggaaatcaagtgcactttgttttaactggtcatccatttggttgttcctttcacgtaacgttcacaaataaagtgtgtgggcaacagcccctgcccacaacgtggcgcacattattaccctgccggagtcttcagactttgagcaagtccaaactctcaccattaatataatgttttggtaataatcctataacactgatgttacctgcttaatccagcaataccatgcctgtctgctatgctttttgatgcgtttagcgaaatttctcagaagtgtgaattaacgcactcatctaacactttacttttcaaggagtatttcctatgaacgagttagacggcatcaaacagttcaccactgtcgtggcagacagcggcgatattgagtccattcgccattatcatccccaggatgccaccaccaatccttcgctgttactcaaggctgccggattatcacaatatgagcatttaatagacgatgctatcgcctggggtaaaaaaaatggcaagacccaggaacaacaggtggtcgcagcgtgtgacaaactggcggtcaatttcggtgctgaaatcctcaaaatcgtacccggtcgcgtgtcaacagaagttgatgcacgcctctcttttgataaagaaaagagtattgagaaggcgcgccatctggtggacttgtatcagcaacaaggcgttgagaaatcacgcattttgatcaaactggcttcgacctgggaaggcattcgcgcggccgaagagctggaaaaagaaggtattaactgcaacctgacgctgctgttttcttttgcccaggcgcgggcctgtgcagaagcgggcgtttttctgatttcgccgtttgtcgggcgtatttatgactggtatcaggcacgcaagccgatggacccgtatgtggtggaagaagatccgggcgttaaatcggtgcgcaatatctacgactactataagcaacaccactatgaaaccattgtgatgggcgcgagcttccgtcgcaccgaacaaatcctcgccttaaccggctgcgatcgactgactatcgcaccgaatttgctgaaggagctgcaggaaaaagtttcgccagtggtacgtaaattaatcccgccttctcagacgttcccacgcccagcacccatgagcgaagcggagttccgttgggagcacaatcaggatgcgatggcggtagaaaaactgtctgaaggcattcgtctgttcgccgttgatcaacgcaaactggaagatcttcttgccgccaaactataaaccagccacggagtgttatatgtcccgaaaagaccttgccaatgcgattcgcgcactcagtatggatgcggtacaaaaagccaattctggtcatcccggcgcgccgatgggcatggctgatattgccgaagtgctgtggaacgattttcttaaacataaccctaccgacccaacctggtatgatcgcgaccgctttattctttccaacggtcacgcgtcgatgctgctctacagtttgctacatctgaccggttacgacctgccgctggaagaactgaagaacttccgtcagttgcattcgaaaaccccaggccacccggagattggctatacgccaggcgttgaaaccaccaccggcccgcttggacaaggtttggcgaacgccgtcgggctggcgatagcggaacgtacattggcggcgcagtttaaccagccagaccatgagatcgtcgatcacttcacctatgtgtttatgggcgacggctgcctgatggaaggtatttcccacgaagtctgttcgctggcaggcacgctgggactgggcaagctgattggtttttacgatcacaacggtatttccatcgacggtgaaacagaaggctggtttaccgacgatacggcaaaacgttttgaagcctatcactggcatgtgatccatgaaatcgacggtcacgatccgcaggcggtgaaggaagcgatccttgaagcgcaaagcgtgaaagataagccgtcgctgattatctgccgtacggtgattggctttggttcgccgaataaagcaggtaaggaagaggcgcacggcgcaccactgggggaagaagaagtggcgctggcacggcaaaaactgggctggcaccatccgccatttgagatccctaaaaagatttatcacgcctgggatgcccgtgaaaaaggcgaaaaagcgcagcagagctggaatgagaagtttgccgcctataaaaaggctcatccgcaactggcagaagagtttacccgacggatgagcggtggtttaccgaaggactgggagaaaacgactcagaaatatatcaatgagttacaggcaaatccggcgaaaatcgctacccgtaaggcttcgcaaaatacgcttaacgcttacgggccgatgctgcctgagttgctcggcggttcggcggatctggctcccagcaacctgaccatctggaaaggttctgtttcgctgaaggaagatccagcgggcaactacattcactacggggtgcgtgaatttggcatgaccgctatcgccaacggcatcgcgcaccacggcggctttgtgccgtataccgcgacgttcctgatgtttgttgaatacgcccgtaacgccgcgcggatggcggcactgatgaaagcgcggcagattatggtttatacccacgactcaattggcctgggcgaagatggtccgacgcaccaggctgttgagcaactggccagcctgcgcttaacgccaaatttcagcacctggcgaccgtgcgatcaggtggaagcggcggtgggctggaagctggcggttgagcgccacaacggaccgacggcactgatcctctcaaggcagaatctggcccaggtggaacgtacgccggatcaggttaaagagattgctcgtggcggttatgtgctgaaagacagcggcggtaagccagatattattttgattgccaccggttcagagatggaaattaccctgcaagcggcagagaaattagcaggagaaggtcgcaatgtacgcgtagtttccctgccctcgaccgatattttcgacgcccaggatgaggaatatcgggagtcggtgttgccttctaacgttgcggctcgcgtggcggtggaagcaggtattgccgattactggtacaagtatgttggtctgaaaggggcaattgtcgggatgacgggttacggggaatctgctccggcggataagctgttcccgttctttggctttaccgccgagaatattgtggcaaaagcgcataaggtgctgggagtgaaaggtgcctgatggtgatcgccggatgctgattgccggatgcgacgctgacgcgtcttatccggcctacagcgtcttatccggcctacatgtccccgcaattttgtttaacgggtgatccacaacgtgggccaggcgtctggcccatgccagttatcgcaggtgggttctgcggcataacgcaccaggcgaaaacgctgaccgtcaaagcgccagcgcgcctgaatgccacaatcgcttaatccgcgccctttcgctaaggtcaccagttcacgcgatttctcatcaaatgttgcgttcatcagttccagttcattcgtctcctgaccgttgttgaacggcaaacgcaaccgaaccgggcgcgaggctagtggctttttacgcgacacaatccatgccaaatcaatggtgttataggcccctgcctcacagctaatcatcatcagcgctttatcatcagtcagcgcagtgacattcacctcacgacgtaacggatcaagcgagcagcgcagaccattcatccgccagtttccataatccagcaaatcgttgcgttcttcgagtgagagtggcgtcggcgttgggttaaccaccgcgacctctttcagcgcaggcgcgggcggtacgctgagcggcggttcgtcccctttcttgatccacgcggtttcactgccaacgcgcttttgctgagcatcaataaacaacaacgccgcttttaagccactcagagaaatggtctgattgccgtcgcgtaaggtgatcgccttcccttcctgaatcatctgcaaaaacgcggtgatggttgccgtatcatcggttactaataaccatggtgaaatccgccacttgtcaccacttaacgccaacggctcaccatctaacagcagccgtggcgctatctctccttcagacgcatccggcgacttcaacccgccgcgctcaatacgtaaaacggcatcggtatgcgccccggcgctgcggctcagggtcatcaccagtccattatgatcgcccgtattgcgcgccacgcagaagttttggttattacaggtgacctgccagtcggaaaacgcccgttgcgctggtgccgcccacaccaaagacgtcggcaacaaagcgaaaaaaaagagaaggaaaatgcgatagcgcatggacggtacgaccccagaagttcaaacaaacagcacaagtcgtatcttcgttgcgcaggtagcgcggctcaatcagatttgtcggattgagccaataataaacaacgaaatattattgttatttttcagtccattaaatgtgacgtttgcaaatagttaagcaataacaccgtcttaccgtcacgtatctcgccggttttgatcatctccagcgcctggctgaacggcagctcgagcacttcaatatcttcatcttcaacaccgccaccggcgttagcgcgctgattgtcactgtattcggcgataaaaaagtggattagctcagtcacaccgccaggcgacatatacagttcaaataatttgcgcacttcgcccacttcatagcccgtctcttcaatcgcttctttacgaatgcacacttccggttcgtcgttatccagcagcccggcgcaggtttcaatcagctgcccgctttcattgccattaacccaggtagcgacacggaactgacgaatcagaaccacggtctttttcttcgcgttgtacaggaggatcgtcgcaccattaccgcgatcgtaaacttcacgtttatggcggataacttcgccatctttgcgcgtgagatcgtaagtaatgttgtgcagggtgaaatagttatcggagagaattttgtctttaatgagggtgatttgttgcgtcataccgactccacagcgcgaaatgaacaattatattacgctgtgaagtcgggtttgtctgcgcaggctatcagtgagatttgactgattttacccccagccagtcaataatcccctgtgccgcatgacgtccttctgccattgcggtaaccaccagatccgcaccacgcacggcgtcgccaccggcgaagattttcggattggtggtctggtaacggtactggctttccacatccgcgatgatgcggccccatttgtctaccgttacaccgtgcgactccagccacggcatcccgtgtggattgaagccaaacgccataatcaccgcatcggctggcatgacaaattcactgccctcaatcggtacaggtcgccgacgcccctgggcatccggctcgccaagacgcgtgcgcaggaaacgaatcccgcagacgtgaccttgttcattcagctcaagcgccaccggctggacgttaaattcgaagttggccccctcttcgcgggcgttcctcacctctttcttcgagcctggcatgttagcttcatcacgacgataagcgcaggtgacgttactcgcgccgtggcgcagcgcagtacgcacacagtccatcgcggtgtcgccgccgcccagtaccacgacgttaagtccggcggtattgataaacggctcttccggtagctcttcgagccccatcacctgtttagtgttggcaatgaggaacggcagcgcgtcataaacgcccggcgcatcttcattgggtaaacccgctttcatggaacggtaagtgcctacgccaacgaagaccgcgtcgtattgttccaaaagcgaatccaaagagacatctttacccacttcacaattgagttcgaagtgaatccccatcgcgctgaagatttcccgacggcgtgccagcagggatttatccagtttgaaagaaggaatgccgaaagtgagcaagccaccgatttctggatggcgatcgtacaccgtcacccccacgccattgcgggtcagaacatccgcacaggccagccctgccggacctgcaccgataatcgccacccgcttgtccactttggtgacatggcttaagtcaggacgccaacctttcgccaacgcctgatctgaaatgtagcgttcaatgttgccgatagttaccgcgccgtgctcatcgcgaatagtacaggcaccttcacacaaacggtcttgcggacaaacgcgtccggtaatttccggcagggtgttggtctggtgagaaagctcgacggcggcgtcgatgtttccggctttcaccagttcaatccactgcggtatatggttatgcagcgggcaggtccattcacaaacgctgtgctcgccgcacttaaggcagcgcgaggcttcccgttgtgcctggtcggcgcgaaatggcagataaatttcatcaaaaccggttttgcgcgcttcaatcgccagtttatccggctcgccacgcgcgggcgttgcctgcatttgttcgactttactcattaccggcatttcttgcgccgcggtactggcatgccacggttgatgttcctgacgcgcggtgcgcaagcggcgggatttcgccatgccggagagtgcgacgtcagtgaccagttgcagcgcgtccgccgggcaattctcaacacaggcaggaccgttttcgcgccccgcacaaaggtcgcatttatgcgccgtggcttttacttttcctgccgcgacgggtgtcaggacgatttgcatcgtaccaaaaggacaggccaccacgcaggatttacagccaatacacttttgctgattgacctgaatgctgtcatcaacgtggctgattgcgccattagggcagctacgggcgcagggcgcatcttcacaatggtgacaggtcactgcactacgttgctgttgatgtttgataaccgtaattcggggatgaaaatggtgttggctcaggacatgttgctcatcattgtgagccatgacacaggcgatttcacaagcatgacaacccagacattgctgactgttggccataataaaacgattcataacgaccttcttttttggttgtaaaaaccttattctttatatgagtgttgttattacccgacttacaggggaatcggcaatgttcatgtgcccagaataagtaactatttcgctataaactgtggcagatcaaataatcccatcactgactaaattgtgtttcagcgaactggaacattaatgattttttgtggagaagacgcgtgtgattgttaaacgacccgtctcggccagtctggcccgggcctttttttacattgtgctgctgtcgattctttccacgggtatcgctctgctaactctggcgagcagtttgcgcgacgctgaggctatcaatattgccggatcgctgcgtatgcagagttaccgcctgggctacgacttgcaaagtggcagtccacaactcaatgcacattgccagttgtttcagcaggcactgcattcaccggtattaaccaatctcaacgtctggtatgtgccagaagcagtaaaaactcgctatgcgcatctgaatgccaactggctggagatgaataatcggctcagcaagggcgatttgccgtggtatcaggccaatattaataattatgttaatcagatagacctgttcgtgctggctttacagcactacgctgaacgcaaaatgctgctggtggtggcgatttccctggctggcggtatcggtattttcacgctggtcttttttactttgcgccgcatacgccatcaggtggttgccccgctgaatcagctggttaccgccagtcagcgtattgaacacggacagttcgactcgccgccgctggataccagtctgccgaatgagcttggtctgcttgcaaaaacctttaaccagatgtcgagcgagctgcataaattgtacctttcgctggaggcgtcagtagaagaaaagacccgcgatctccacgaggccaagcgtcgcctggaggtgttgtatcagtgttcgcaagcgctgaacaccagccagattgatgtgcattgtttccgccatattttgcagattgttcgcgacaatgaagcggctgaatatctggagctgaacgttggggataactggcggattagcgaagggaagccaaaccctgagctgccaatgcagattttaccggtgacaatgcaagagacggtttacggcgaactgcactggcaaaatagtcacgtttcatcatcagaaccgctgcttaacagtgtttcatcgatgctgggacgcggtttgtactttaatcaggcgcagaagcattttcagcagttattgttgatggaagaacgtgcaaccatcgcccgcgaattgcacgactcgctggctcaggtactttcttacttacgtatccagttgacgttactgaagcgttcgataccggaagataacgccaccgcacaaagtatcatggccgatttttcccaggcgttgaatgatgcttatcggcagttacgcgagctgttgactactttccgcctgacgctgcagcaggcggatctcccctccgcgttgagggaaatgctggatacgttacaaaatcaaaccagcgccaaactgaccctcgactgccgtctgccaaccctggcgctggatgcgcaaatgcaggtgcatttgttgcaaattattcgcgaagcggtgctgaatgcgatgaagcacgccaacgccagcgaaatcgccgtcagttgcgtcaccgcgccggacggcaatcacacggtttatatccgtgataacgggattggtatcggtgaaccgaaagaacccgaaggtcattatggtctgaatatcatgcgcgaacgcgcggaacggctgggtgggacgctgactttttcacaaccttccggcggcggcacgttagtgagtattagctttcgctctgcggagggtgaggaaagtcagttgatgtaatgcctcctactgaccaaagaatacttgcacttaaggttcagtataaaagggcatgataatttacattaactcctttttttctccacgattggctcgtaccttgccgctacagtgaagcaagtcaagcctacaacgatacgcagaaacacgaggtcctcttttaatggcgaatttctttattgatcgccccatttttgcctgggtgctggcaatcctgttgtgtctgacagggaccctggcgattttttcattgcccgttgaacaataccccgatctcgcgccaccgaatgtgcgagtgaccgctaactatcccggcgcatcggcccagacgctggaaaacaccgtgacccaggttatcgagcaaaatatgaccggcctcgataatctcatgtatatgtcatctcagagcagtggcaccggtcaggcatctgtcactttaagttttaaagcaggcaccgatccggacgaagccgtgcagcaagtacaaaaccagctgcaatcagccatgcgaaagttaccgcaggcggtgcaaaatcagggcgtgacggtgcgtaaaaccggcgataccaatattctgaccattgctttcgtctctaccgatggttcgatggataaacaggatattgccgattatgttgccagtaatattcaggacccgttaagccgcgtgaatggcgtcggggatatcgatgcctatggttcgcaatattccatgcgtatctggctggacccggcgaaactcaacagtttccagatgacggctaaagatgtcactgatgccattgagtcacagaacgcgcagattgcggttggcaacttggtggtacaccttccgtcgataagcaggcgctcaacgccaccattaacgcccagtcactgctgcaaacaccagaacagttccgcgatatcaccttgagggtgaatcaagacggctcagaggtaaggctgggcgatgtcgccaccgtcgaaatgggggcggagaaatacgattatcttagccgcttcaatggtaagccagcctccgggctgggggtaaaactggcctccggcgcaaacgaaatggcgacagcggagctggtgctcaatcgtctcgacgagctggcgcagtatttcccgcacggactggaatacaaggtggcgtatgaaaccacctcgtttgttaaagcctccattgaagacgtggtgaaaacgctgctggaagctatcgctctggttttcctcgttatgtatctgttcctgcaaaacttccgcgccacgctgatacccactatcgccgtgccggtggtgttgatgggaaccttctccgtactttacgccttcggttacagcgtcaacaccttaaccatgttcgcgatggtgctggcgatcggtctgctggtggatgacgcaatcgtggtggtggaaaacgtcgaacgtattatgagtgaggaaggactcactcctcgcgaagccacacgtaaatcgatggggcagatccagggggcactggtcgggattgcgatggttctttcggcggtatttgtaccaatggccttcttcggcggcaccaccggtgccatctatcgccagttctctattaccattgttgcggcgatggtgctgtcagtactggtagcgatgatcctcactccggctctgtgtgccacactacttaagccactgaaaaaaggtgagcatcacgggcaaaaaggcttttttgcctggtttaaccagatgtttaaccgcaacgccgaacgctacgaaaaaggggtggcgaaaattctccaccgtagcctgcgctggattgtgatttatgtcctgctgcttggcggcatggtgttcctgttcctgcgtttgccgacgtcgttcttaccgctggaagaccgtggcatgtttactacctcggtacaattgcccagcggttcaacccaacaacagaccctgaaagtcgttgagcaaatcgagaaatattacttcacccatgaaaaagacaacatcatgtcggtgtttgccactgttggttctggccccgggggtaacgggcaaaacgtggcgcgaatgtttatccgcctgaaagactggagcgaacgcgacagtaagaccggcacctcatttgccattatcgagcgtgcaacgaaggcgtttaacaagattaaagaagctcgcgttatcgccagcagcccgccagcaattagcggtcttggtagttctgcaggttttgatatggagttgcaggaccacgctggagcaggtcacgatgcgctgatggcagcacgtaaccagttgctggcgctggcggcggaaaacccggagctaacccgtgtgcgccataacggcctcgatgacagtccgcagttgcagattgatatcgaccagcgtaaagctcaggcgctgggcgttgctatcgacgatattaacgacacactgcaaaccgcctggggttcgagctatgtgaatgactttatggatcgcggtcgcgtgaagaaagtctatgtgcaggcagctgcgccgtatcgcatgctgccagatgacattaatctctggtatgtccgaaataaagatggcggcatggtgcccttctctgctttcgcgacctcacgctgggagacaggctcgccgcgtctggaacgctataacggttattctgcggttgagattgttggggaagccgcaccgggggtcagtaccggtacggcgatggatattatggaatcgttagtgaagcagttgccaaacggctttggtctggagtggacggcgatgtcgtatcaggagcggctttccggcgcgcaggctccggcgctgtacgccatttccttgctggtagtattcctgtgtctggcggcattgtatgaaagctggtcggtaccgttctcggtaatgctggtcgtgccgctgggggttatcggcgcgctgctggcaacctggatgcgcgggctggaaaacgacgtttacttccaggtgggcctgttaacggtcattggtttatcggcgaaaaacgccatcctgatcgtcgagtttgctaacgagatgaaccaaaaaggccacgacctgtttgaagcgacgctccacgcctgccgtcagcgtttacgcccgattctgatgacctcgctggcatttatcttcggcgtattgccaatggcaaccagcacgggtgccggttccggtggtcagcatgcggtgggtactggcgtaatgggcgggatgatttcggccactattctggctatttacttcgtgccgctgttctttgtgctggtgcgccgccgcttcccgctgaagccgcgcccggaataagcaataaaaaaggcgacatgccaatgtgtcgcctttttcaactttccgattaagaacctgctcagcgggttcttgctgtttatactttgtctcgggaattacttacgaagcataacttcgataaagtctttccagttccccagttcacgttcaatcataacaacctctcttataattatgggtattctacggaaacaatataccgtggtgaagctaatttactcgattgctgcgatgactacctccgggggacaaaccttatgtaaatactatggtcctgcggtgataatttgtatgtgatacacagcaacatttcgagatattcatacggcatctaatactgatttaattctggttaaaatacagacagataacaagatgaatattcttaatgtttacgttaaaaatgtttaatattatttaatagttgttaatttgaatacttcgataatgttatatttcctgataatcatttgcaggcaaaatgttttcacccttaaatgagtatttattctcatagatcgaaaaaggattcattatggttacactttacggcatcaaaaattgtgacaccattaaaaaggctcgccgttggctggaagccaataacatcgactatcgttttcatgattaccgcgtcgatgggctggacagcgaattattgaacggttttatcaacgaattaggctgggaagcgttactgaacacccgtggtacaacctggcgtaaactggacgaaaccacccgcaataaaatcaccgatgcggcctctgcggcggcattaatgactgaaatgcctgcaattatcaaacgtccattgctctgcgcgcctggtaagcctatgctgctgggtttcagtgattccagttatcagcaatttttccatgaggtgtagtctatgtcgtgcccggttattgagctgacacaacagcttattcgccgcccttccctgagtcctgatgacgcaggatgccaggctttgttgattgaacgtttgcaggcgatcggttttaccgttgaacgcatggattttgccgatacgcagaatttttgggcatggcgtgggcaaggtgaaacgttggcctttgccgggcataccgacgtggtgccgcctggcgacgccgatcgttggatcaatccgccgtttgaacccaccattcgtgatggcatgttattcggacgcggtgcggcagatatgaaaggctcgctggcggcgatggtggtagcggcagaacgctttgtcgcacaacatcccaaccatacggggcgactggcatttctgatcacctctgatgaagaagccagtgcccacaacggtacggtaaaagtcgtcgaagcgttgatggcacgtaatgagcgtctcgattactgcctggtcggcgaaccgtcgagtatcgaagtggttggtgatgtggtgaaaaatggtcgtcgcggatcgttaacctgcaaccttaccattcatggcgttcaggggcatgtggcctacccgcatctggctgacaatccagtacatcgcgcagcacctttccttaatgaattagtggctattgagtgggatcagggcaatgaatttttcccggcgaccagtatgcagattgctaatattcaggcgggaacgggcagtaacaatgttattccgggtgaactgtttgtgcagtttaacttccgcttcagcaccgaactgactgatgagatgatcaaagcacaggtgcttgccctgcttgaaaaacatcaactgcgttatacggtggactggtggctttccgggcagccatttttgaccgcgcgcggtaaactggtggatgcggtcgttaacgcggttgagcactataatgaaattaaaccgcagctactgaccacaggcggaacgtccgacgggcgctttattgctcgcatgggggcgcaggtggtggaactcgggccggtcaatgccactattcataaaattaatgaatgtgtgaacgctgccgacctgcagctacttgcccgtatgtatcaacgtatcatggaacagctcgtcgcctgatgagtggttctgcaagaggaaataagcatggactggctggctaaatattggtggattctggtgattgtctttttggtaggcgtcctgctgaacgtgattaaagatctcaagcgcgtcgaccataagaaatttctcgccaacaagccggagcttcccccgcatcgtgatttcaacgataagtgggacgatgacgacgactggccgaaaaaggatcaaccgaagaagtaagctgagtgctcaaccgtaggccggataaggcgttaacgccgcatccggcaatggtgaacgatgcctgatgcgacgctcacgcgtcttatcaggccaggtaatctgtcttttacatcatttcaatcacatcatcatcgccaggcttaccgccacttagcgcttcgtcgaaataatgtttcggaatggtataacgcaagtgatccagggcaaattgcatactgcgattgtcgatcgcatggcctaaatcctccacgatatccagcgtcacgtcaccaccggcactgattaacgcttcctgcgccgcaaccgcatgcgccagatcgataaccggatcttcaccgccatgaatcaggtgaattgtcgtggctgtagacgcagtttccggcaggctcgcatagcgtccgttaaaagcaatgacgcgtgaagcaaggcccggttcggctttaatgctctccagcaccataatcgcgccttgagagaaaccgatgagcgccgtggcgttagcccctactccgctctgtttctgccagtagcgcaccgtttcaataaacgtcggcatgatcgcatccacacgcgcctggcgattatcttccgtaataccctgcaccgaaaaccactgacgccccgccggattaccgctcggctccgcgccaccgacactcaccaccagcgcatcaggaaacagcggtgcaaaccagctacctatttcccccattgccaccgggttatccccgacaccgtggaaaagcagtaacaactgttgcgcaggtttatccgggctttgaacaacaaaatggtcatgtttcatggcgaactccttaactgatgtcattaattttacgccgctgactcacaatgaccatgggagaaaattgaaggagtcagtgaaaaaattgccattgcgttatgcgatcgcgcagacgctcagtgcgaacatcattaagtgcgaacagcgcctgcgcggcctcttcccgctgacggaccagtaacatcttgcggcctgaaagtttaagtgtggtacataactgcgcgtcgctgacgtttttctgtaaacgcccacgcagcgccggtaatgccagttcactggtttgtagcagacgcaataagcaacctaacgatgttaatagcggacgatgagcgaaagcaaaaccggccagttcaagccagtcgtcgtcagaaaggacggcatcgtttagtggatcaacaggaagcgtttcgccattccactttgcgagagcttgcgcatcgcgacgtaaacggtaatgctcacgttcagccagttgtttacccgcattactcatcggtaacagcgccatcgccgtatagcaaccgctgctggcttcacgatgattacccatccgcaccagcacaaaaccgcagcggtgccagaaacgccataactccccggtgtaaccaaaactcaccgaaagatagtcgaggtcacgcgtatattgcaaagcaccagcaataagttgctgccctgtgccttcccgctgacgcgccggatgaactgctatccggctgacccgccgtccacgcaatgtcgctgccagtggattgctaccgtgcgccgccagcgactgggccaccagattaccccgcgggcgacgaaaacctgcccataccgcctgactgagttgttgagataatccgccctcatccaccagccacaacgccccggcaatctcgttttcgccagccgcctgtaaaaaaatgttgccctggtgcatccatcatccggcgtaaatccagcggcgaggtccggtagtgcgcaccagacaataactgataaacctttaacggcgtttctggatcgcttcgccataacgtttgttcaaatgcggaaatgacgatattgccttgtggtgtatgggtgaagttttcatcgtcaaaaaccagtgcctcgctgaccattttttccagcgggcatccctgtgcccagcggatcggctgttgcagttcaaaacggtgtaaatgcggaaagcgagcgcaaaatttcagcaaaaaaccacgtccggtgccttcgtagccctgcaccgtagtggttaacaacgttcgaggaaaacgcgataccagttgatgcaacaacggcgcaggtatggctgcggcttcatcgaccaccagccagtcggcttgctcatcgctggctaacaaggcatccggcgcaataaagcgaaacttctcgcccgcaaattgtgccagtacatccgttgccgcttttgcgggcgcagtgacaatcgcactacccgcaatacgagaaatgagttgccctgccagcgccgatttaccgcgcccacgcgcagccgttaccgctgccacgcccgacggcatggtcagtagctgctgtaagagttgctgttgttctggttgtggtgcgccggtcgcggtgtgccagtcagtacggggagtaaaatgcgccaacgagaacggctggttttgccgccagagaatagcgtcgttatccgccgtaagtacacgtttgaaatgctggacaaaatgcggcgtcgcaatagggtcagggcaatcactccagcgcagcgagtcggtatcaggttggttttcccactcttcccatacagggagtaacaaaaccagccagcttcccgctttcaacgttccgctaagtgccgcaaaggcagcggcatcaaagccgtggcgggcgtcgaataccgcatgccggaactcgcgcccaagtaaagtttgtagtgccgagggagaacagtggttttcagcatctggctgcggcgaaatccacagccagtcgccaggtaaggcatcacgcaacttaagcgcatgatcaaaacaccaaccctcttccccgctcaacaccagcaagcggcggatcccttcacgtttcatttgcgctgttaatgtgtgaaacgcagtcagttcagccatccctgccccggaagttaaatgcttttaccaaaagtattgcattgtgccggatcgccgctgtcgaaaccacgtttaaaccagctgtagcgttgctgagaagtgccatgagtgaaactgtctggtactactcgcccctgactttgctgttgtaaacggtcatcgccgatggcctgcgccgcgttcagcgcctcttccagatcgccggtttccagaacgccttgctgctgcatactatgcccccagacaccggcaaaacagtcggcctggagttccatacgcacagataagcggttcacttccgcctgcgtcgcgttttgttgcagttgacgaactttcggctcgatgcctaacagtttctgcacatgatgaccgacttcatgggcgataacgtacccctgggcaaaatcgccatccgcgccaagtttgtctttcatgtcatcatagaaggagagatcgatataaaccgtgccatccgccgggcaatagaacggccccattatggactggcccgccccgcatccggtacgcgtcattccacggtacatgaccagcttcggttgctgataggtcttacccatcttctcgaactgttgtccccaggtgtcttccgtggttgccagaatcaccgaggtgaattttgcggcttcgtcttcattagggctaattgaccgcgttgattgctgttgggaaaccggctgcccggtcatcaacccggttaaatcaacgccatagtagcctgcaaccagcacgactatcagtaaaatcagcccgcctttaccgcttggcaggcgaaaaccgggaccgcccatagacggaccaccagagctgttgcgcctgtcttcaacattgtcactttcacgtcgtccttgccaacgcatagatacctcaacaatatattcattatagaaatgatcgtaggtggttcagaggaagattaccacaggaaagcgggatgaaatggcggaggaattaaggcttcatgccacgttatataatttacgaatgttagaagtaaaagagaatgttagctccaatcttctagtctgattcccgccactcgctcaaactctcgggtattgttggtaaccacaatcaaaccgcgactgcgagcatgtcccgctatcatctggtcaaaaggtccaacaggccttccctgccgggcaagctcggccctgatttgcccggtatgcgtcgcagcagcactatcataatcaagcacttccaaacgagatacgaaaccttcaatcaccgccaaattgcgttctggcatctgacttttttctgccccatagataagctccatcaatgttacagaacttatacacatccggccagaattcaggttaaaccgctctctgacatgtactggtttattcttaatagtgaaaatacagatattggtatccagcatgaatttcagcatcagaatgattccctttcctgcattgcgggttgatcacggatatccataaaatccgcactcacattttcgccatcaaaccaactgtcccaggactcaccggcgggagtgatgattcttgtacgaccaatcgcaataatttctactttcttaacatcctctggcagagcgaccgctttcggtaatctgacggcctgactgcgattacttaaaaatacagtagtttccatagcccccccttttttgggatatacgtcatgtatatacatattggcctgttattactttcctgtcaaagggagataatgcgaagtattgtagcgggggtatcgaagacatttagccggagtaccctccggctaaataaacaagcaaccagaaaaatcagtccagctgtacacccaggcggcgggcgacggcttcataggcctcgatcaggccaccgaggctctggcggaaacggtctttgtccattttctccagtgtttctttgtcccacaggcggctgccgtccggggagaactcatcgcccagtaccacttcacctttgtacagaccaaactccagcttgaagtcgaccagaatcagaccagcatcatcgaacagttttttcagcacgtcgttcgctttgtaggtcagctctttcatacgcgccaggttctctttgctcacccagccaaaggtttcgcagtaagattcgttgaccatcggatcgtgcatggcgtcgtttttcaggaacagatcgaacagcggcgggttcagctcaataccttcttcgattccaagacgtttcaccagagagccagcagcacggttacgcacgacacactcaaccggcaccatatccagctttttcaccagacattcggtatcggagagcagacgctccatttgagtcgggatacccgcttcagccagtttgctcataatgaagtagttgaacttgttgttcaccatacctttgcgatcaaactgctcaatgcgcgcgccatcccctgctgacgtatcattgcggaattcgagcaccaacaggtccgggttttccgtgctgtatacggttttcgctttaccacgatacaactcagcttgcttttgcatctttatcactcctgggtgtgaattaacgttttaaaatcttttgctgtctggtgtgccggatgttttgtcggatgcggcgtgaacgccttatccgaactacgtccgacaaacaaatttcgtgcgaattaccgctaaaatcgcgttttcctgccgacgcacacgtttgcgtatcatatcagaaaaaagggccggatgattccagccctgtatttttacttgctaaacgcagcctggaagacagctaccagcgcgtcgttctgactctgagtcagagtatgacctttcggatcgatgaactgtaggctgctgcggttatctaaatcgccaacctgcagtttatagtcaccggatgccaggcctggatcgctcgcgcccagttcctgccagtcgctgtcagacagcggcttataagttacggccatgttgccctgcgaacgggtgctgtcggtcactttcatgcccactttttccagcgccgctggcagacgttgccaaaccacattgaacggcccgcgtacgaccagcattggtaaaccggtgtcatcagctgcactttgtacgtccatagtggtggaggcacgattttgcgcagcgttcgcggcgtcagtggcagatttatccagaccggcggaaataacgttcatcatctccgtgctgtaacgctgcatggaagccgcgtctgcaaccggtttgcccgcctgttccaggttcagcagtttaaccgtaaccgcctgctgataaccctgcggcttaacagagatttgataacgaccacgatactgctcgtcttcgtccagacggttccattgtacccaatcggtggtcagtgtctgaccagcatcatcacgttgggtgatggtgtagtttttcgcctgcagcacgctaaccacctgcggccacagagtattgccacgaccattttccaccagcaatgaagcggtatcgcccgtgaactgggtacgcgcgccagaaaccagtgccagcggctgggctggtggacgaatgtccagcgccttaccgacagcaccactaccgttggtcaccgggattgcataatcaccggaggtcaccggcaaaatcattccagccggggcatgaagctccgcaagcggtgccgcttccaggtaggcttcatcaccactgacctgacgcttatagcgtgagtcagaactacaggcagcgagtaataaaacaagcgaaacacccgcaacctttgccaggcgcgacttttgaacagagtaagccatcaaatctccctaaactttacagcaaaccggcatgcttaagcgccgctctgaccgtctcacgaccactgtcggtgattggtgtcattggcaggcgcagcgtatcggtcgccacaagacccagttccttacatgcccatttcaccgggattggattgggttcgacaaatagtttgttgtgtaatggcatcagacgctgattaataacgcgtgcctcggcaaaatgcccttctgctgccagtttgcacatctgggccatatcacgcgctgcgacgttagccgtaacggaaataaccccatgaccgcccaattgcatgaagtccagcgcgctcgcatcatcgccgctcagcagaacaaaatcatctgaaaccagctctttgatctggtttacacgcgttaagttccctgttgcctctttgattccgataatattttttactttcgccagacggcccaccgtttccgggagcagatcgcagccagtacgggacggcacattatacagaatttgcggcaggtcagtatgctcagcgatggctttgaaatgctgatacaaaccttcttgcgacggacgattgtagtaaggggttaccgtcaggcagccgacgataccgctgtcattgaagcgctgcgtcaggctaatggcttccgcagtagcgttagcaccagtcccggcaatcaccggaatgcgcccgtcagccagctccagcgtcatcatcaccacatcagcatgttcgtcatgatttaaggtagcggactcgccagtggtgccaacagaaacgatcgccgaagtaccgctggcgacatgataatcaatcagttttttcaagctagcccgacagacattacctttttcatccatcggagtaacaatcgcgacaatacttcccgtgaacatgggccatcctctgtgcaaacaagtgtctcaatggtacgtttggtatggcattaaaagcaagcagacagaaccgttctgattgttgtatgcatgttttttttatgctttccttaagaacaactcaccccttaaaggaataaccagtttgacactgtcatcgcaacattatctggtgatcactgcgttgggtgccgatcgccctggaattgtgaacaccatcacccgtcatgtcagtagttgcggctgtaatattgaagacagtcgcctggcgatgctgggagaagagttcacgtttatcatgctgctttccggttcatggaatgccatcactctgattgaatcaacgttaccgttgaaaggtgccgaactggatcttttaatcgtgatgaagcgcacgacggcgcgtccgcgtccgccaatgccagcatctgtctgggttcaggtcgatgtggcagactccccgcatttaattgaacgcttcacagcacttttcgacgcgcatcatatgaacattgcggagctggtgtcgcgcacgcaacctgctgaaaatgaacgggctgcgcagttgcatattcagataaccgcccacagccccgcatctgcggacgcagcaaatattgagcaagcgttcaaagccctatgtacagaactcaatgcacaaggcagtattaacgtcgtcaattattcccaacatgatgaacaggatggagttaagtaatgaatccactgaaagccggtgatatcgcaccgaaatttagcttgccggatcaagacggagaacaagttaatttgaccgacttccagggacagcgtgttctggtttatttctacccgaaagccatgacccccggctgtaccgtacaggcctgcggcttacgcgataacatggatgagttgaaaaaagcgggcgttgatgtgctgggtatcagcaccgataaacccgaaaaactctcccgttttgcggaaaaagagctgcttaactttacgctcctgtctgatgaggaccaccaggtgtgcgaacaattcggcgtctggggtgaaaagtccttcatgggcaaaacctacgatggcattcatcgcatcagcttcctgattgacgctgatggcaaaatcgaacatgtctttgacgatttcaaaaccagcaatcaccacgacgttgtgctgaactggctgaaagaacacgcctgattactttgctccattccgtgctggctgcgcttgcggccagcatacctcacttctcgtgatcaagatcacattctcgctttcccctgcgacacgggtgtcgaatccattttttgctgaacgttaatgaccatcatttttgtaccgttcagaatccagtcaatacataacttattgaatatattgagttaatcagaatggcatcctttatgcaatatgaaatgcaatgtttcatatcattttcaaggagccgacatgaaccgctttgtggtggccgaaccactgtggtgtacaggatgtaatacctgtctcgctgcctgttcggacgtgcataaaacgcaaggtttacagcaacacccgcgcctggccctggcgaagacgtcaacaatcactgcccctgtcgtgtgtcatcactgtgaggaagccccttgcctgcaggtctgcccggtcaatgccatctctcagagggatgatgcgatccaactcaacgaaagcctctgtattggctgcaagctttgcgccgtggtctgcccatttggcgcaatcagcgcttcaggaagccgtccggtgaatgcccatgcgcaatatgtttttcaggctgaaggctcactcaaagacggcgaagaaaacgtgctgccccaacatgcgttgctgcgctgggaaccgggtgtccagaccgtcgcggtgaaatgcgacctgtgtgatttcttgccagaaggtccggcctgcgttcgcgcttgcccgaatcaggcgttacggctgatcaccgacgatagcctgcaacgtcagatgaaagaaaaacagcgccttgccgcaagctggtttgccaatggcggggaggatcccctttccctcactcaggagcaacactaatggatgccctgcaattattaacctggtcgctgatcctctatctgtttgccagtctggcttcgctgtttttactcggtctggacagactggctattaagctttccggcatcacatcgctggtgggcggcgtgattggcatcatcagcggaattacgcaattacatgctggtgtaactttagtcgcccattttgccaccccttttgactttgccgatttaaccctgcgaatggatagcctctcggcatttatggtgctggttatctccttgctggtggtggtttgttcgctctattcattgacttatatgcgcgaatacgagggcaaaggcgcggcggcgatgggcttctttatgaatcttttcatcgcatcgatggttgccctgctggtgatggacaacgctttttggttcatcgtgctgtttgaaatgatgtcgctgtcttcctggtttctggtcattgccaggcaggataaaacgtcgatcaacgctggcatgctctacttttttatcgcccacgccggatcggtgctgattatgatcgccttcttgctgatggggcgcgaaagcggcagcctcgattttgccagtttccgcacgctttcactttctccggggctggcgtcggcggtgttcctgctggcctttttcggttttggcgcgaaagccgggatgatgccgttgcacagctggttgccgcgcgctcaccctgccgcaccatcgcacgcttcggcgttgatgtctggcgtaatggtcaaaatcggtattttcggcatcctgaaagtagcgatggacctgctggcgcaaacgggtttgccgctgtggtggggcattctggtgatggcgatcggcgcaatctccgcgctcctgggcgtgctgtatgcgctggcggaacaggatatcaaacggctgctggcctggagtaccgtcgaaaacgtcggcattattttgctggcagtcggtgtggcgatggtcggtctgtcactgcacgacccgctgctcaccgtggttggactgctcggcgcactgtttcatctgctcaaccatgcgctgttcaaagggctgctatttctcggcgcgggcgcgattatttcgcgtttgcatacccacgacatggaaaaaatgggggcactggcgaaacggatgccgtggacagccgcagcatgcctgattggttgcctcgcgatatcagccattcctccgctgaatggttttatcagcgaatggtacacctggcagtcgctgttctcactaagtcgtgtggaagccgtagcgctacaacttgcgggtcctattgctatggtaatgctggcagtcactggtgggctggcagtaatgtgcttcgtaaaaatgtacggtattactttctgtggtgcgccgcgcagtacacacgctgaagaggcacaggaagtgccaaatacgatgatcgtcgccatgctactgctcgcggcactctgcgtattaattgcgcttagtgccagttggctggcaccgaagataatgcatattgcccatgcgtttaccaatacccctcccgtcactgtcgccagcggaatagcacttgtacccggcacgtttcatacacaggtcaccccctcattactgttgctgttactactggcgatgcctttgctgcctggcctttactggctgtggtgtcgttcgcgccgcgcagcgtttcgtcgcacaggagatgcctgggcatgcggctacggctgggaaaatgcgatggccccgtcaggcaatggcgtgatgcagccgctgcgtgtggtcttctctgcgttatttcgtctacgacaacagctcgaccctacgctgaggctaaataaaggttttgcgcacgtcaccgccagggctcagagcacagaacccttctgggatgagcgggtgatccgccccatcgtgagcgccacccaacggctggccaaagaaatacagcatctgcaaagcggcgactttcgtctctattgcctgtatgtggtcgccgcactggttgtgctgctaatcgctattgccgtctaaggaaatcaccatgagacaaactctttgcgacggatatctggttatttttgcgttagcacaggccgtgattctgctgatgctaaccccactttttacgggtatttcccggcagatacgcgcgcgtatgcactcccgccgcgggccggggatctggcaggattatcgcgatatccacaaaatgtttaaacgccaggaagttgcgccgacatcttcaggtctgatgttccgcctgatgccgtgggtattaatcagcagcatgctggtgctggcgatggccttaccactgtttattaccgtttccccttttgcgggcggcggcgatctgatcacccttatctatcttcttgccctgtttcgttttttctttgctctttccgggctggataccggaagtccgtttgcgggagtcggtgccagtcgcgagttgacgctcggcattctggtcgaaccaatgcttattctctcactgctggtattggcgctgatagcaggttccacgcatatcgagatgatcagcaatacgctggcgatgggctggaactcgccgctaaccaccgtactggcgttactggcctgtggttttgcctgcttcattgagatgggaaaaattccctttgatgttgctgaagcagaacaggaattacaggaaggcccgctgaccgaatattccggtgccgggctggcgctagcgaaatgggggctggggctgaaacaggtcgtgatggcatcactgtttgtagccctgtttctgtcctttgggcgcgcgtaagaactttctctcgcctgcctgctgacttcacttgtcgttacgctgctcaaggttttgctgatttttgtactggcctcaatcgcagaaaacacgctggcacgcgggcgttttttactcattcaccatgtgacctggcttggcttcagccttgctgcgcttgcatgggtcttctggttaaccggtctgtaaggagcactgacggaatatggaaaatcttgctctgacgacgttattgctgccttttatcggcgcactggtcgtttcgttttcgccacaacgtcgggccgccgaatggggggttttgttcgccgcgctgaccacgctgtgcatgttgtcactgatctccgcgttttatcaggccgataaagttgccgtcacgttgacattggtcaacgtgggggatgtggcattgtttggcctggtcattgatcgcgtgagtacgctgattctgtttgtggtggtgtttctcggtttgctggtcacgatctactccacgggttatctgacggataaaaatcgcgaacacccgcataacggcacgaatcgttattacgcatttttgctggtgtttatcggcgcgatggcgggactggtactctcctcgacgctgctcggtcagttgttgttttttgaaattagggcggctgctcctgggcgttgatcagttattaccagaacgataaagcgcagcgttcagcactaaaagcgttgcttatcacccatatcggttcgttggggttgtatcttgccgccgccacgctgtttttgcagaccggaacgtttgcgcttagcgcaatgagcgagttacacggcgacgcacgttatctggtttatggcgggatcctgtttgccgcgtgggggaaatcggcccagctaccgatgcaagcgtggctaccggatgcaatggaagcgccaacaccgatcagcgcctatctccacgccgcatcgatggtgaaagtgggcgtttacatttttgcccgcgcaattatcgacggcggcaatatcccgcatgtgattggcggcgttggcatggtcatggcactggtcaccattctttatggctttctgatgtatttgccacagcaggatatgaagcggttgctggcctggtcgaccatcactcaacttggctggatgttcttcggcttgtcgctctccatcttcggctcgcggctggcgctggagggtagcatcgcctacatcgtcaaccacgcgttcgctaaaagcctgtttttccttgtagcaggtgcgctgagttacagctgcggcacgcgcttgttgccgcgtctgcgtggcgtattgcacaccctgccgttgccaggcgtgggtttctgcgtggcagcgctggcgattaccggcgtgccgccgttcaacggcttcttcagtaaattcccgctgtttgctgccggttttgcgttgtcagtggagtactggatcctgctgcccgccatgattctgctgatgattgaatcggtcgccagtttcgcctggtttattcgctggtttggtcgcgttgtgcctggcaaaccgagcgaggccgtcgccgatgccgcaccgctgccagggtcaatgcgcctggtgttgattgtactgattgtgatgtcgctgatttccagcgtaatcgccgcgacctggttgcagtaaggagatgatgaatgaccggttctatgatcgtaaataatctggcgggactgatgatgctgacatcgctgtttgtgattagcgtcaaaagctatcgcctgtcatgcggattttacgcctgccagtcgctggtgctggtgtctattttcgccactctctcgtgcctgttcgccgcagagcaactgctgatctggtccgccagcgcctttatcaccaaagtgctgctggtaccgttaatcatgacttacgctgcacgaaatattccccagaacatcccggaaaaagcgttattcggtccggcaatgatggcactgctcgcggcgttaattgtcctgctttgcgcatttgtcgttcagcccgtgaagctaccgatggctaccgggctgaaaccggcgctggcggtagcgttaggtcattttctgcttggcctgctgtgcattgtcagccagcgcaatatcctgcggcaaatttttggttactgcctgatggaaaacggctcccatctggtgctggcgcttcttgcctggcgagcaccggaactggtggaaataggtatcgctaccgacgccatcttcgccgtcattgtgatggtgttactggcaagaaaaatatggcgtacccacggcacgctggacgtgaacaacttgaccgcgctgaagggataatgagatgagttattctgtgatgttcgctttactcctgctcacgccgctgcttttttcgctgctctgttttgcctgccggaaacgggggctctctgcgacttgtacggtgactgtattacatagcttagggatcacactgctgctgattctggcactctgggtggtccaaactgccgctgatgcaggagaaatattcgctgcgggactgtggcttcatattgatggtctgggcggtttgttcctcgccattcttggtgtgattggctttctcaccggtgtttactcgattggctacatgcgtcatgaagtggcacacggcgagctttcccccgttacgctgtgcgattactacggtttcttccatctgtttttgtttaccatgctgctggttgttaccagcaataacctgattgtgatgtgggcggcgatcgaagccaccaccttaagctcggcgtttctggtaggcatttacggtcagcgttcatcgctggaagcagcatggaagtacatcattatttgtactgttggtgtcgcttttggtctgttcggtaccgtgctggtatacgccaacgtcgccagcgttatgccgcaggcagaaatggcgatattctggagcgaggttcttaagcaatcgtccttgcttgacccaacattaatgctgttggcctttgtgtttgtgctaattggctttggcaccaaaaccgggctatttcccatgcacgcctggctgccggatgctcacagtgaagcaccgagtccggtcagcgccctgctctccgccgtattgctgaactgcgcgctgttggtgctaattcgctattacatcattatctgccaggccatcggcagcgatttccccaaccggttgttgctcatcttcggcatgttgtcggttgccgtggcggcatttttcattctggtacagcgggacattaagcgtctgctggcgtactccagcgtggagaacatggggctggtcgcggtggcgctaggcattggcgggccgctgggaatttttgccgcgctgctgcacaccttaaaccacagtctggcaaaaacgctgctgttctgcggttccggcaatgtactgctcaagtacggcacgcgcgatctcaacgtcgtctgtgggatgctcaaaatcatgccatttaccgccgtgctgtttggcggcggtgcgctggcgctggcagggatgccgcccttcaacatttttcttagcgaatttatgaccgttaccgcaggactggcacgtaatcacctgctgattatcgtcctgctgttattgctgttaacgctggtgctggcgggcctggtacggatggctgcgcgggtgttaatggcgaaaccgccgcaggccgttaaccggggtgatctcggctggttgaccacctcgccaatggtgattctgctggtcatgatgctggcgatgggaacgcatattccacaacctgtcatcaggatcctggcgggcgcttccactatagtcctctcagggacgcacgacctgcctgcacaacgtagcacctggcatgattttttgccttcaggcaccgcatctgtttcggagaaacacagtgaacgttaattcatcgtcaaatcgtggcgaagcgattctcgccgccctgaaaacgcagttccccggcgcggtgctggatgaagagcgacaaacgcctgaacaggtcaccattacggtgaaaatcaatctgctgcctgacgttgtacattatctttattatcaacatgatggctggcttccagtcctgtttggcaacgacgagcggacacttaacggtcattacgcggtttattatgccctttcaatggaaggggccgaaaaatgctggatcgtggtgaaggcactggtcgatgccgacagtcgggagtttccgtcagtcacaccgcgcgtccctgccgcggtctggggcgagcgagaaattcgcgatatgtacgggctgattccggttggcctgccggatcagcgtcgcctggtgttgcccgatgactggccggaagatatgcatccgctgcgcaaagatgcgatggattatcgactgcgccctgaaccgacgacagattccgaaacgtatgcgtttatcaatgagggcaacagcgatgcgcgggtgatccctgtcggcccgctgcatatcacctccgatgaaccgggtcacttccgcttgtttgtggatggcgagcaaattgtcgatgctgattaccgcctgttttatgtccatcgcggcatggagaaactggcagaaacgcggatgggctacaacgaagtgaccttcttatcggaccgcgtgtgtgggatttgcggttttgcccacagtgtggcctataccaactcggttgaaaatgcactggggattgaggtgtcgcaacgagcgcataccattcgctcgattctgctggaagtcgaacggctacacagtcatttgctcaaccttggcctctcctgccattttgttggttttgataccggctttatgcaatttttccgcgtgcgggaaaagtcgatgacgatggcggaattgctgaccgggtcgcgtaaaacctacggtctgaatctgattggtggtgttcgccgcgatattctcaaagagcaacgtctgcaaacgctgaaactggtgcgcgagatgcgcgccgacgtgtcggagctggtagagatgctgcttgctatgccgaatatggaacaacgcactcagggcattggcattctcgaccgacaaatcgcccgtgattatagccctgtagggccgctgatccgcggcagtggttttgcccgtgatttgcgctttgatcacccctacgccgactacggcaatattccaaaaacactgtttaccttcaccggcggcgatgttttctcccgcgtgatggtccgtgtcaaagagacgtttgattcgctggcaatgctggaatttgccctcgacaacatgccggataccccgctgctgaccgaaggctttagctataaacctcacgcattcgcgctgggctttgttgaagcgccacgcggtgaagacgtgcactggagcatgctcggtgataaccaaaaattgttccgctggcgctgtcgtgccgccacctacgccaactggccggtgttgcgttacatgctgcgcggcaataccgtttctgacgcaccgctgattatcggtagccttgatccctgctactcctgtaccgaccgtgtgacgctggtagatgtgcgcaagcgccagtcaaaaaccgtgccgtataaagagatcgaacgctacggcattgatcgtaaccgttcgccgctgaagtaaggacagaagatgctgaagttactgaaaactattatgcgcgccggaaccgcgacggtgaaatatcccttcgcgccactggaggtcagcccaggctttcgcgggaaaccggacctgatgcccagccaatgtattgcctgcggcgcctgtgcttgtccggcaaatgcgctgactatccagaccgacgaccagcaaaattcgcgcacctggcagctctatctgaggcgttgtatttactgcggacgttgtgaagaagtgtgcccgaccagagccatccagcttaccaataactttgaactgaccgtcaccaataaagccgatctctatacccgcgcgacgttccatctacaacgttgcagccgttgcgaacgcccgtttgccccgcaaaaaaccgtcgcactggctgctgaattgttggcacagcaacaaaatgcgccacaaaaccgcgaaatgttgcgggcgcaagcgagcgtctgcccggagtgcaaacaacgcgcgacgctgatcaacgacgatacagatgtaccgctggtggctaaggagcagctatgagtccagtgcttacgcaatatgtcagccagcccatcacgctggacgagcaaacgcaaaagatgaagcagcatttgctacaggatatccgtcgctcggcttacgtttatcgcgtcgattgcggcggctgcaacgcctgtgaaatcgaaatttttgctgccatcacaccagtattcgacgcagaacgttttggcattaaggttgtttcatcaccgcgtcacgccgatattttgttatttactggcgcagtcacccgggcgatgcgtatgcctgcacttcgggcgtatgagtctgcccccgatcataaaatctgtgtttcctacggcgcgtgcggtgtcggtggcggtattttccacgatctctacagcgtctggggcggcagcgacaccattgtccccattgatgtttggatccccggctgcccgccaacaccggccgccaccattcacggtttcgccgtggcgctcggtttgctgcaacagaagattcacgctgtggattatcgcgatcccaccggggtgactatgcaaccgttgtggccacagatcccgccatcacagcgtatcgccattgagcgagaagcgcggcggctggcgggctatcgtcaggggcgagaaatttgcgatcggctcctgcgccatttaagcgacgatcctacaggaaatcgggttaacacctggttgcgcgaagccgacgatccgcgtctcaatagtatcgttcagcaactctttcgcgttctccgggggttacatggctgaggagtgcggggaaattgttttctggacgctgcgaaaaaagtttgtcgccagtagcgacgagatgccggaacacagctctcaggtaatgtattactcgctggctatcggtcatcacgttggcgtgattgattgtctgaatgtcgccttccgctgcccactgacggaatacgaagattggcttgcacaggtcgaagaggagcaagcccgacgtaagatgctgggggtgatgacctttggtgagattgttattgacgccagccacaccgccctgttgacccgggcattcgcgctactggcagatgacgcgacgtctgtgtggcaggcgcgtagcattcaattcattcatctgttggatgaaattgtgcaggaaccggccatctatctgatggccagaaaaattgcgtgagaaggatttctcattaataaggactgttgatggctatgtcagacgaggcgatgtttgccccgccacaaggaataacaattgaagcggtaaacggaatgctcgcggagcggttagcacagaaacacggcaaggcgtctttattacgcgccttcatcccgctgccgccgccgttcagcccggtacaacttattgaactgcatgttctcaaaagcaacttctattaccgctaccatgatgatggcagcgatgtgacggcaacagtagagtatcagggcgagatggtcgattattcgcgtcacgccgtccttctcggcagtagtggaatggcggagctacgctttattcgtacccacggcagccgttttactccccaggattgcacactgtttaactggctggcacgcattatcaccccggttctgcaatcatggctcaatgatgaagaacaacaggtggcgctgcgtttgctggagaaagatcgcgatcatcatcgggtactggtggatatcactaatgcagtgctgtcacatcttgatctcgacgatctgatcgctgacgtcgctcgtgagatccatcatttttcggtctggcttcagtcagtatggtactgggcgatcatcgaaagaacgagaagttcagcctgtggtgcagcgatctttctgcctcacattgtgcgtgtctgccacgcaatatgcctggcgacagtgtattgctgacacaaacgctacaaacccgacaaccgaccttgacgcaccgtgcagacgatctgtttctctggcaacgcgacccgttattactcttacttgcatctaacggctgcgaatctgcgctcctgataccgcttacctttggcaaccatacaccgggtgcattgttactggcgcatacctcttccactctctttagtgaggaaaactgccagctactacaacacatagccgatcgcatcgctattgccgttggcaatgccgatgcctggcgtagcatgaccgatttgcaggaaagtttgcagcaagaaaaccaccagcttagcgagcagctcctttcgaatctgggcgtcggtgacattatctatcaaagccaggcaatggaagacctgctccagcaggtagatattgtggcgaagagcgacagtacggtgttgatttgcggtgaaaccggaactggcaaagaggtgatcgccagagcgatccatcaacttagcccgcgacgcgacaagccgctggtcaaaatcaactgcgctgccatccccgccagtcttctggaaagtgagttattcggtcatgacaaaggggcgtttactggtgcgattaatacccatcgtggtcgttttgaaattgccgatggcggtacgttgtttctcgatgaaattggcgatctgccgttagaacttcagcctaaattgctgcgcgtattgcaggagcgggagattgagcgtctcggcgggagtagaacgatcccggtgaatgtcagagtcattgccgccaccaaccgtgatttgtggcaaatggttgaagatcgccagtttcgcagcgatctcttttatcgcctgaatgtcttcccactggaattgccgccgctacgcgatcgtccggaagatatccctcttttagcaaagcatttcacgcaaaaaatggcgcgccatatgaatcgcgcaattgacgcaatcccgaccgaggcgctacgccagttgatgtcgtgggattggccgggcaacgtgcgcgagctggaaaacgtgattgagcgggcggtactgttgactcgtggtaacaatctgaatttacatctaaatgtccgacaaagccgtttactgccgacgctaaatgaagattcagcgcttcgcagttcaatggcgcagttgctgcacccgacgacgccagagaatgacgaagaagaacgtcagcgcattgttcaggtattgcgagaaaccaatggcattgttgccgggccccgtggcgcggcgacacgattagggatgaagcgcaccacgctgctgtcacgaatgcagcgtctggggatctcggttcgcgaggtgttgtaatctgcttttgcaggagtatgcatgagaaacaaactctctttcgacttgcagttgagcgccagaaaagcggcaatcgctgaacggattgcctcccataaaattgcccgcagtaaagtgtcggtctttttaatggcgatgtccgctggcgtgtttatggcgatcggatttactttttacctttccgttatcgccgatgccccgtcttcacaggcattaacccatctggtgggcggcctttgctttacactcggctttattttgctggcggtttgtggcaccagcctgttcacctcgtcggtaatgacggtgatggcaaaaagtcggggcgttattagttggcgaacttggctgattaacgcacttctggtggcctgcggtaatctggcaggtattgcctgtttcagtttgttaatctggttttccgggctggtgatgagtgaaaacgcgatgtggggagtcgcggttttacactgcgccgagggcaaaatgcatcatacatttactgaatctgtcagcctcggcattatgtgcaatctgatggtttgcctggcgctgtggatgagttattgcgggcgttcattatgcgacaaaatcgtcgctatgattttgcccatcaccctgtttgtcgccagtggctttgagcactgtatcgccaatttgtttgtgattccgttcgccattgccattcgccattttgccccacgccccttcggcaactggcgcacagtagcgcagacaattttccggcactgacggtcagccattttattaccgccaatctgctcccggtgatgctgggtaatattatcggcggtgcagtgctggtgagtatttgttatcgggctatttatttacgtcaggaatcctgaaaaatcagcccggcgaaacagttcgtcgggctgaagattattcttgcgcgatttgcccatcgggccaggcgtggatcacggctttgatcagcgtcgccaatggaatggcgaagaatacgccccagaatccccacaaaccaccgaagatcactactgataaaataatcaccagcggatgcaggttaaccgcttcggagaacaacaccggtactaacaggttgccgtccagcgcctgaataatcagatacaccgcgaagcagctccagaattcagtacctgcgccaaactggaatagcgccacgccaaccaccggaatggtcaccacaaatgcgccaatgtacggaataagaaccgagaagccgaccagcaccgccagcagcagcgaatagttcagcccgaagagcaagaaccccagccaggtggcgatccctactacgatcatctccagcactttgccgcggatatagttggtgatttgttgattcatctccttccacacctgtcctgccagtccacggttacgcggcagcacccggcgaacggcgttcagcatctgctctttgtctttcagcaggaagaagaccatcaatggcaccagcaccagatagacggctatggtcagcaaaccgaccagcgaggcgagggaaattttcaccaccgaatcgcccatagtcagcatccgactgcgcatattttcggccattgcatcaataatgcccgcatccattaacgccggatagcggcgcggcaacgtggcggcaaagtcagaaagcttattgagcatccccggcatatcgcggattaagtagatgccctgttgccaggcgataggcagtaccacgaacgccatcagtagcaatataccgacgaaaaccaccaatacaatcgacgtcgcccagcggcgggagcagccaatagattgcaggcgcacggttggccattccagcaaataggccagcacaatagccaccagcaacggagcaagcaggccactaaagaaaaagataatgccaaatccggcaactaaaataaccagcaaggcaatcgcttccgggtcgctaaaacggcggcgataccattgcatcaacatttcgagcataaagaccttccctgaacctcaagagcgggattgcgatccgcaattgtatcgaaatgtcacaaaaaagacttcgctttttatgacggattcaggaaactgaaaagtcatttgagtgggctaatcttcgccgttacactcaaaggcggcgcggtgggaacgatatttcacagtatcggtcaaatgactatcttcagaaatacaggatagaggttatgttcaggcagttgaaaaaaaacctggttgcaaccctcattgctgcaatgaccattggtcaggtagccccggcgtttgccgacagcgcagacaccttgccggatatgggaacctccgcaggaagcacgctttccattggtcaggaaatgcagatgggcgactattatgtccgccagctacgcggcagcgcgccgttaattaatgacccgctgttaacgcaatatattaattcgctggggatgcgtctggtttcgcatgccaattcggttaagacaccgtttcatttttttctgatcaacaacgacgaaattaacgcctttgctttctttggcggcaacgtggtgctgcactctgccctgttccgttattccgataacgaaagtcaactggcttcagttatggcgcacgaaatctcccacgtcacccaacgtcacctggcgcgagcgatggaagatcagcagcgcagcgcgccgctgacctgggtcggcgcgttaggttctattttactggcgatggccagtccgcaggcggggatggcggcgctgaccggtacactggcgggaacgcgtcaggggatgatcagtttcacccagcaaaatgaacaggaagcggaccgcattggtattcaggtgctgcaacgctcgggattcgatccgcaggcgatgccaaccttcctcgaaaaattactcgatcaggcgcgttactcctcgcgcccgccggaaattttattgactcacccgttgccggaaagtcgtctggcagatgcccgcaaccgtgctaatcagatgcgcccgatggtggtgcagtcgtcggaagatttctatctggcgaaagcgcgcacactggggatgtataattccggacgtaaccagctcaccagtgatttgctggatgaatgggcgaaaggaaacgttcgtcagcaacgagcagcgcaatatggtcgtgctttacaggcgatggaagccaataaatacgacgaggcgcgtaaaacgctgcaaccgttactggcggcagaacctggcaacgcatggtatctcgatctggctactgatatcgatcttgggcaaaacaaagccaatgaagcgatcaatcgcctgaaaaatgcccgcgatttacgcaccaatccggtgttgcagctcaacctggcgaacgcttatctgcaaggcggtcaaccacaagaagcggccaatattctgaatcgctacacctttaataataaagatgacagcaacggctgggatttgctggcacaggcggaagccgcgctaaataaccgtgatcaggagctggctgcgcgagcagaaggttatgcgctcgccggacgactcgatcaggccatttcgctgttgagtagcgccagttcgcaggtgaaattaggcagcctgcaacaagcgcgttacgatgcgcgcatcgaccagttgcgccagctgcaggaacgctttaagccttataccaagatgtaattcgcattaaaggaagaacaatgaccaaacaggtaaaaatctaccataacccacgctgttcaaagagccgggaaacgctgaacctgctgaaagaaaacggcgtggagccagaagtggtgctctaccttgagacacccgccgatgcggcaacgctgcgcgatttgctgaaaatgctggggatgaatagcgcccgtgaattgatgcgccagaaagaggatctttataaagaactgaacctggctgacagttcgcttagcgaagaggcgctgattcaggcaatggtggataatccgaagctaatggagcgcccgattgtggtcgcgaatggcaaagcgcggattggtcgtccaccggagcaggtactggaaatcgtgggttaagatgtgctccatcgctagttgaagcacattgccggatgcgacgcttgccacgtcttatccggcctacgaatactatggattaacttcgcgtagttcggataaggcgttcgcgccgcatccgacaataaacaccttatctacaacttcagaatttctttcacaaacggaatggtcagcttacgttgcgcggtaatcgacgcacgatccaactgatccaacgtcataaatagcgtgcgcatttctctgtcgagccgcttcagcaagaaacgccccacatcttccggcagttcaaaaccacgcaaacgcgcgcgtaactgtagcgcctgcaacttatcttcatcagaaagtggctgcaatttgtagatctgcccccagtcgagtcgcgacgcgagatccggtaatcccagattcaactgccgcggtggacgatcgccggtgatcaacaatcgtgttttgcccgattccagaattcgattgtagagatcgaaaatcgccatctcccacaactcatcgcctgcaatacactcaatgttgtcgatacagaccagcgacaaatgctccataccgtcgagcacttccggaacaaaccaggtgcgtttatccagcgggacatagcccaccgcatcgccacgctgcgacaattccgcgcaagccgcgtgcagcagatggctgcgccccgcgccttcgcgtgcccagagatagatgtaaccgctatgttcctgacgcagcacgttttgcagcgcagccagtaaagaggagttatcccccggccagaaacttgcaaaggtttcgtcgtcaggaagataaagtggcaaagagagctgtgccggtgtgttcagagatacctcaaccaggatttcacaaaatcgcgagaagtttaccacagaatcccatgatgtttgaaccgggcagcaacactgcccggtcggtacattatttgtctgttatatccgcgtcttctgcgtccagcaccacttcttcagggcgcagcacactaatcagtttgaagatcaaacttaagccgataccgacgatggtcgccagcgccataccttttaactccgccgcgccgatgtttaccttcgcgccactgacgccgatgatcaaaatcacggaagtcaggatcaggttctgtgctttgttgtaatccactttcgattcgatcaaaacacgaataccggaagcaccgatgacaccataaagcagcagcgaaacgccgcccatcaccggcaatgggatcatctggatagcggcagccagtttaccgacacaggaaagcaggatagcgaaaatcgccgccccaccgataacccaggtactgtaaacacgggtgatcgccatcacgccaatgttttctccgtaagtggtatttggcgtagagccaaagaagccggagatcacggtcgacaggccgttagcaaacatcgaacggtgcagacctggatcgcgcagcagatcttttttgacgatattagccgttactaccaggtgccctacgtgttcggcaataaccactaacgccgctggcagaatagtcagaatggcaaaccactcgaagcgcggcgtatagagggttggcagcgcaaaccagtgagcattaataatcggcgtggtatcgacaattcccattgcgaaagagagcgcgtagcccaccagcacgccaattaaaatcgggataattgccaggaaaccacgaaacagcacggaacctaaaaccgtgaccgccagggtggtaatagagatgatgatggttttggagtctggcgtttgcccttcagccgggagtaaacccgccataccggcagctacgcccgccagctccagaccgatgacggcaacgattgcgcccattgccgcaggtggaaacagcacgtccagccagccggtccccgctttcttcacgataaaagaaaccaggcagaacagcacgccgcacataataaagccgcccagcgcgacttcataccctaacggcaacagtaacaataccggtgaaataaaggcaaagctggaaccaagataagccggaattttccctttacagatgaagagatacagcagagttccaataccgttaaataacagtacagtcgccgggttaatatgaaataagacgggcaccaggacggttgcaccaaacatggcgaacaaatgttgcaaactaagcgggattgtctgtaaaagtggcggtctttcactcaccccgatagcacggcgcgtcatagtattatcctctgtattatgtgttataggcgctttactcaaaaaaagccgactcttaaagtcggctttaattatttttattctttatttcgtaccaaagattttgtcaccggcatcgccgaggcccggaataatgtatccgtgctcgttcagtccctgttcaatcgatgcggtatacagttcgacgtccgggtgcgctttttccagcgcagcgataccttctggcgcagctaccagcaccagaactttgatgctgctgcagcccgcttttttcagcaggtcgatggtcgcgataacggaaccaccagttgccagcattgggtcaacgatcagcgccatacgctcatcgatgttagaaaccagtttctggaagtacggtaccggctccagcgtttcttcattacggtacataccgacaacgctgatgcgcgcgctcggaacattttccagcacaccgtccatcatccccagaccggcacgcagaattggcacaacggtaattttcttacctttgatctggtcgatttctaccgggccgttccagccttcgatagttactttttccgtttcgaggtcggcggtcgcttcgtaagtcagcaggctacccacttcggaagcgagttcgcgaaagcgcttggtgctgatatcttgctcacgcatcagtcccagcttgtgtttgacgagtgggtgtttgacttccacgatcttcatactctttctcctttgaggggcagccacaaaaaaaatcgacggattatacctcctttcttcaaggcggcaatattcttttcgttgactttagtcaaaatgataacggtttgagataaagttattttatattcaaatggttatgaaagaagattattccatccgaaaactaacctttgccctggcacaagtcttctttcgccgcgcgtctggggaaaagacgtgcaaaaaggttgtgtaaagcagtctcgcaaacgtttgctttccctgttagaattgcgccgaattttatttttctaccgcaagtaacgcgtggggacccaagcagtgaccgataaaacctctcttagctacaaagatgccggtgttgatattgacgcgggtaatgctctggttggaagaatcaaaggcgtagtgaagaaaacgcgtcgtccggaagtgatgggcggtctgggcggcttcggtgcgctgtgtgcattgccgcaaaaatatcgtgaacccgtgctggtttccggcactgacggcgtaggtaccaagctgcgtctggcaatggacttaaaacgtcacgacaccattggtattgatctggtcgccatgtgcgttaatgacctggtggtgcaaggtgcagaaccgctgtttttcctcgactattacgcaaccggaaaactggatgttgataccgcttcagcggtgatcagcggcattgcggaaggatgtctgcaatcgggctgttcactggtgggtggcgaaacggcagaaatgccggggatgtatcacggtgaagattacgatgtcgcgggtttctgcgttggcgtggtagaaaaatcagaaatcatcgacggctctaaagtcagcgacggcgatgtgctgattgcactcggttccagcggtccgcactcgaacggctattcgctggtgcgcaaaattcttgaagtcagcggttgtgatccgcaaaccaccgaacttgatggtaagccattagccgatcatctgctggcaccgacccgcatttacgtgaagtcagtgctggagttgattgaaaaggtcgatgtgcatgccattgcgcacctgaccggcggcggcttctgggaaaacattccgcgcgtattgccagataatacccaggcagtgattgatgaatcttcctggcagtggccggaagtgttcaactggctgcaaacggcaggtaacgttgagcgccatgaaatgtatcgcaccttcaactgcggcgtcgggatgattattgccctgcctgctccggaagtggacaaagccctcgccctactcaatgccaacggtgaaaacgcgtggaaaatcggtatcatcaaagcctctgattccgaacaacgcgtggttatcgaataatgaatattgtggtgcttatttccggcaacggaagtaatttacaggcaattattgacgcctgtaaaaccaacaaaattaaaggcaccgtacgggcagttttcagcaataaggccgacgcgttcggccttgaacgcgcccgccaggcgggtattgcaacgcatacgctcatcgccagcgcgtttgacagtcgtgaggcctatgaccgggagttgattcatgaaatcgacatgtacgcacccgatgtggtcgtgctggctggttttatgcgcattctcagcccggcgtttgtctcccactatgccgggcgtttgctgaacattcacccttctctgctgccgaaatatcccggattacacacccatcgtcaggcgctggaaaatggtgatgaagagcacggtacatcggtgcatttcgtcaccgatgaactggacggtggcccggttattttacaggcgaaagtcccggtatttgctggtgatacggaagatgacatcaccgcccgcgtgcaaacccaggaacacgctatttatccactggtgattagctggtttgccgatggtcgtctgaaaatgcacgaaaacgccgcgtggctggatggtcaacgtctgccgccgcagggctacgctgccgacgagtaatgccccgtagttaaagcgccagctctgccgctggcgtttttcaattcacctgtaaatcgcaagctccagcagtttttttcccccttttctggcatagttggacatctgccaatattgctcgccataatatccaggcagtgtcccgtgaataaaacggagtaaaagtggtaatgggtcaggaaaagctatacatcgaaaaagagctcagttggttatcgttcaatgaacgcgtgcttcaggaagcggcggacaaatctaacccgctgattgaaaggatgcgtttcctggggatctattccaataaccttgatgagttctataaagtccgcttcgctgaactgaagcgacgcatcattattagcgaagaacaaggctccaactctcattcccgccatttactgggcaaaattcagtcccgggtgctgaaagccgatcaggaattcgacggcctctacaacgagctgctgctggagatggcgcgtaaccagatcttcctgattaatgaacgccagctctccgtcaatcaacaaaactggctgcgtcattattttaagcagtatctgcgtcagcacattacgccgattttaatcaatcctgacactgacttagtgcagttcctgaaagatgattacacctatctggcggtggaaattatccgtggcgataccatccgttacgcgctgctggagatcccatcagataaagtgccgcgctttgtgaatttaccgccagaagcgccgcgtcgacgcaagccgatgattcttctggataacattctgcgttactgccttgatgatattttcaaaggcttctttgattatgacgcgctgaatgcctattcaatgaagatgacccgcgatgccgaatacgatttagtgcatgagatggaagccagcctgatggagttgatgtcttccagtctcaagcagcgtttaactgctgagccggtgcgttttgtttatcagcgcgatatgcccaatgcgctggttgaagtgttacgcgaaaaactgactatttcccgctacgactccatcgtccccggcggtcgttatcataattttaaagactttattaatttccccaatgtcggcaaagccaatctggtgaacaaaccactgccgcgtttacgccatatttggtttgataaagcccagttccgcaatggttttgatgccattcgcgaacgcgatgtgttgctctattatccttatcacacctttgagcatgtgctggaactgctgcgtcaggcttcgttcgacccgagcgtactggcgattaaaattaacatttaccgcgtggcgaaagattcacgcatcatcgactcgatgatccacgccgcacataacggtaagaaagtcaccgtggtggttgagttacaggcgcgtttcgacgaagaagctaacattcactgggcgaagcgcctgaccgaagcaggcgtgcacgttatcttctctgcgccggggctgaaaattcacgccaaactgttcctgatttcacgaaaagaaaacggtgaagtggtgcgttacgcacacatcgggaccgggaactttaacgaaaaaaccgcgcgtctttatactgactattcattgctgaccgccgatgcgcgtatcaccaacgaagtacggcgggtatttaactttattgaaaacccataccgcccggtgacatttgattatttaatggtgtcaccgcaaaactctcgccgtctgttatatgaaatggtagaccgcgaaatcgccaacgcgcagcaagggctgcccagcggtatcaccctgaagctaaataaccttgtcgataaaggcctggttgatcgtctgtatgcggcctccagctccggcgtaccggttaatctgctggttcgcggaatgtgttcgctgatccccaatctggaaggcattagcgacaacattcgtgccatcagtattgttgaccgttaccttgaacatgaccgggtttatatttttgaaaatggcggcgataaaaaggtctacctttcttccgccgactggatgacgcgcaatattgattatcgtattgaagtggcgacgccgctgctcgatccgcgcctgaagcagcgggtgctggacatcatcgacatattgttcagcgatacggtcaaagctcgttatatcgataaagaactcagtaatcgctacgttccccgcggcaatcgccgcaaagtacgggcgcagttggcgatttatgactacatcaaatcactcgaacaacctgaataaccctatgccaatacacgataaatcccctcgtccgcaggagtttgctgcggtcgatcttggttcaaacagttttcacatggtcatagcccgtgtggtagatggtgccatgcagattattggccgcctgaaacagcgggtgcatctggcggacggcctggggccagataatatgttgagtgaagaggcaatgacgcgcggtttgaactgtctgtcgctttttgccgaacggctacaagggttttctcctgccagcgtctgtatagttggtacccatacgctgcgtcaggcgctgaacgccactgactttctgaaacgcgcggaaaaggtcattccctacccgattgaaattatttccggtaatgaagaagcccgtctgatttttatgggagtggaacatacccaaccggaaaaaggtcgcaaactggttattgatattggcggcggatctacggaactggtgattggtgaaaatttcgaacctattctcgttgaaagccgccggatgggttgtgtcagctttgcccagctttatttccctggcggggtcatcaataaagagaatttccagcgcgctcgcatggcagcagcacaaaaactggaaactttaacctggcaattccgtattcagggctggaacgtggcaatgggcgcttccggtaccataaaagccgcccatgaagtattaatggaaatgggcgagaaagacgggataattaccccggaacgtctggaaaaactggtaaaagaagttttacgtcaccgtaatttcgcatcgctgagtttaccgggtctttccgaagagcggaaaacagtcttcgttcctggactggcgattttatgcggtgtgtttgatgctttagccatccgtgaactgcgcctttctgacggggctttacgtgaaggcgtactgtatgaaatggaaggacgtttccgtcatcaggatgtgcgtagtcgtaccgccagcagcctcgccaaccagtatcacatcgacagcgaacaggcccgacgagtgctggataccactatgcaaatgtacgaacagtggcgggaacagcaaccgaagctggcgcatccgcaactggaggcgctactgcgatgggccgccatgctgcatgaggtcgggttgaatatcaaccacagcggtttgcatcgccactccgcttatattctgcaaaacagtgacttgccgggttttaatcaggaacagcagctgatgatggcgacactggtgcgctatcaccgtaaagcgattaagctcgacgatctgccgcgctttaccttgtttaagaagaaacagttcctgccactgatacagctattgcgccttggcgtattactaaacaatcaacgtcaggcaaccaccacaccgccaacattgacactgattactgatgacagtcactggacactgcgtttcccgcatgactggtttagtcagaatgcgctggtactgcttgatctggaaaaggagcaagaatactgggaaggcgtggctggctggcggttgaaaattgaagaagaaagtacacctgaaatcgccgcttaatgctttgcgggccgacgagaaatgtcggcccgcattattcaggcactttcgcgaatgggttcgatttcattcagcgtatcaattaacggttgcggcttaccaataagataaccctgcatataatcgatccccaaagagagcaccgcctcgcggatctcttcgttttcaacgtactctgccactacccgcattttcttcattcgcgccaggtggcaaatcgatgccactatctgataatccagactatttgacacaatattgcggataaaactgccgtcaattttaagcagatcggcattcacatttttaagccgcgcatagctggcgtagccggtgccgaaatcatcaatcgcaatctggcagcctaattcctgaagatgctgcaaggtgatttgcgcctgcttaacattggtcagagcattactttcggtgacttcaaaaataagttgccacgcttcaatctgatatttagccagcaactgactgacttcaacaggaaaacgagcctgacataccgaggttggagacagattaatagcaaaacggtgagcgggcatcttcgctctgttttcagccataaattgcagcgtatgctcaatgacccacatgtcgatactcgacgataaaccaaattcgtgcgcgaccggcaagaagctatcggggctgatcagttcatcattctcacctttcatgcgcagaagaatttcatggtaaacatcaccacgcataccggtaatcggctgggccatcaggaaaaaatggttgtgttccagcgcctgctgtagtcgattcatcatcgcgactttatctttcaattcgcgttgcaaatacattgccccgcgacgctgcatattttccggggcgttggtcacgatggaaagttcggcgaccgtatttagctctcccagcagcaggtagatatgattcactggcgagcgcacatagcagtaactgacgccaatctgcggttgcatcggcatgccatcccaaaagaaacgaaattgcttgagatggctatccagtgcggtaatgcgctcctggtgcgattctgtattcagccgcagcgcgagatcgttacccgaaagctgataaacatcttcacccggttccagcaagggtgacagccagtgagaaagtttttgcttgtattgaatccgcagcatgatgccatagttcttaaccagcatttccatgccagggatgcgtaaataacaaagcgcagaccagggggcatcacgcaacgcgcgattcagggcgcgaacatttggcagatgaaccaccgggtccacatacgcaagccgctgaatgcgtctgactaccgctcgctgacgagttgccagtacagccatataattgacaataaaagagaataccagataactggaggaggttatggtcagctgcgtggtatagccaggataaatgggaatgtaattttgatagctgtggatgctgatcatcaacacgaccgcccagagcagcgaatcagcttataaccatagcgcatcgctccccacatcatcaggggcagcaataatgacaaggtataattggtgctaaaaattgtgcttttttcatttaacggcatgcataacagcaacaataaagcacctaatgccagtagccagagcgcgaactcttttttggtgactttggcatcaacctgctgttttaattgcgaataatagctacgtaaataaaatggatttcgcactacccgaatgatgaagtagcacagcgggacaccgatcagattacccaccagtaaggcctgataattgattaaagtcccgaggttaaaaggcatgacaccgaccagattttctctgctcgccagcaatcctacaaatgcagcaaactggaaaagtatcagaaacagcgttgcaggaaacactatctgccagaatatacgctgggaaattaaacgggtatcaccatgtgaaacgttgttacgccggggagtaaagaccctgtaaccgccccaacagagaatgataatgataataaaattagccgttaatgagagcgtttcgtaaaaacccagctctgcatatttgcggacaaaaatccctaaggtgatccctggcaatgccgcccagctgaaaaacatcatcatgctgatcatcagtgccaaaggcagataaaagagaaaaacctcaccggaagaaatatgcgcaaaagtattaatgtgggcgaaaatgggcaagattaaagaaggcaggaacagcggaagcccccaccatttatcacgtatttttatataagttgcattcagtttcatagatgctcagcagaatcccccacatcctgaaggaggtgtattcagacaggcatcccacctgacttcgaatgatgattattcatcactatagagagcattgattctaagtgtcatatgaaagttccaattgatatatatcaaacaaaataaccctgattaatgaattattacgtttatcatgttaattcatcattattacatcatcattgtaaataattaaattaacttccataacattaaaatatgtatccactgacgcttttttacataacgaagaattgaccattttgtcctgttgtgccttaatgtaagtaccgtccacagcgtgggacatacttcaaggaaccttttgtgagtcaggcaaccagtatgcgaaaacgacaccgatttaacagtcgcatgacccgtatcgtactgctcatcagctttatcttcttctttggccgttttatctactcgtccgtcggtgcctggcagcaccatcagagcaaaaaagaagctcagcaatccacactctccgtcgaatcaccggtacaacgttagcggttaccttctccactttcacagaacctaacggcacttcgctgtcggatgcttttgctctttggaattatcaaagcggcagatattctttcatcttaaattttacgtctttgtcctgactgatgtttatcctgtttggctgcgaaataaatataaaattaatatatatgttgtaatgatatatttttataaattattccctgcgtgaattttaataaatttaatctatccctttatacgcaatacatttactttcctcttttgatgatcttaaatgtcttatttttcgtaatgtgtataacaaggaatagtgatgaaatttaaaaaatgtcttctgcctgtggcaatgttagcgtcattcactctggcaggatgccagtcaaatgctgacgatcatgctgccgatgtttatcaaaccgatcaactgaataccaaacaagaaactaaaaccgttaatattatttccattcttcccgcaaaagttgccgtagacaactcccaaaataaacggaacgcacaagccttcggcgcgcttattggcgcagtcgctggcggtgttatcggccacaacgtcgggtctggcagcaattccggaacgacggcaggtgcagttggcggcggagctgtaggcgcggcagcgggttctatggtgaatgataaaaccttagtggaaggtgtttctttaacctataaggaaggcaccaaagtgtatacctctacccaggtgggtaaagagtgccagtttacgacaggtttagccgttgttattaccacgacgtataacgaaacgcgtattcagccaaataccaaatgtcctgaaaagagctaataatcaggaggagtcatgaagaaagtttttctttgcgccatcttagcctccttaagctatccggctatcgcctcatcattgcaggatcaactctctgctgtcgcagaagcggaacagcaaggtaaaaatgaagagcaaaggcagcatgacgaatgggtcgcggagcgcaacagggaaatccagcaagagaagcaacgtcgcgcaaatgcccaggccgccgctaacaaaagagcggcaacggcagcggcaaataagaaagctcgtcaggataaactggacgccgaagcctctgcggacaaaaaacgcgatcaaagttatgaagatgagctacgcagcttagagattcagaaacaaaaactggcgctggcgaaagaagaagcccgcgttaagcgagaaaacgaatttatcgatcaggaactgaagcacaaagctgcgcaaaccgatgtggtgcaatctgaagctgacgccaacagaaatatgactgaaggcggtcgcgatctgatgaaaagcgtgggcaaagcagaagagaacaaatcggacagctggtttaattaatcgatgttagtaacttcaatcctataattcttgaagataaaaaaccctctgtagtaacagagggttttgttcattcatagtgcagggtcaaatcattcccactcaatggtagctggcggcttgccgctgatgtcatacaccacgcgggaaataccgttcacttcattgataatgcggttggaaacgcgaccgaggaaatcgtacggcagatgcgcccagtgtgcggtcataaagtcgatggtttcgacagcacgcagagagacaacccagtcatacttacgaccatcgcccattacgccaacggaacgtaccggcaggaacacagtgaacgcctggctgactttgtcgtacaggtccgctttacgcagttcttcaatgaagatggcgtcagcacggcgcagcaggtcacagtactctttcttcacttcacccagcacacgaacgccaaggcctggtcccgggaatgggtgacggtacaacatgtcgtacggcaggcccagctccagaccaatcttacgcacttcgtctttgaacagctctttcagcggttcaaccaggcccatcttcatctctttcggcaggccgcccacgttgtggtgagatttgatgacgtgtgctttaccggttgcagaagccgcagattcgataacgtcagggtagatggtgccctgcgccagccacttcacgtcttccagtttcagcgcttcttcatcgaatacttcaacgaaaacgcgcccgatgattttacgttttgcttccggatcgttttcgccagccagcgctgacaggaagcgatcttctgccggtacgtgaacaatgttaagaccaaagtgatcgccaaacatatccagaacctgctctgcttcgttgagacgcagcaggccgttgtcgacgaatacgcaagtcaggtttttaccgatagcgcggtgcagcagcattgcggttacggaggaatccacaccaccagagaggccgaggatgactttatcgtcgcctacctgctcgcggatgcgagctacagcatcgtcgataattttcgctggcgtccacagggcttcacactggcagatatcacgcacaaaacgctccagcatgcgcataccctggcgggtgtgagtcacttccgggtggaactgtacgccatagaagcgtttttcttcgttagccataatggcaaacgggcagctttcggtgctggctacggtgacgaagtcggacgggatagcggtaactttatcgccgtggctcatccagacatcgagcagcggtttaccgtctgcggtcagcgcatcttcgataccgcgaaccagtgcgctgtcgtttacgacttcaacctgcgcgtagccaaattcacgttcgttagaggcttcaacgtgaccgcccaactgcattgccatggtctgcatgccatagcaaacgccgaataccggtacgcctgcttcaaagacatactgcggcgcacgcgggctgttttcttcggtggtgctttccgggccgccggaaagaataatgccgcttggattgaagtcacgaatttgtgcttctgtcacatcccacgcccacagttcgcagtaaacacccagctcacgcacgcggcgcgcaaccagttgagtgtactgagaaccgaagtccagaatgaggatgcgatgcttatgaatgttttccgtcattgacgcttattccgaggcaagtgaaacagataatataaatcgcccgacatgaagtcgggcgaagagaatcaggagcccagacggtagttcggggactctttagtaatggtcacgtcgtgaacgtggctttcctgaatgcccgcaccgctgatacgtacaaactccgctttagtacgcagttcgtcgatagtaccacagccggtcagacccatacaggagcgcaggccgcccatctgctggtgaatgatctctttcaggcgacctttataagctacgcgaccttcgataccttccggcaccagtttgtcggcagcgttatcgctctggaaataacggtcagaggaacctttggacatcgcgcccagggaacccataccacggtaagatttgtaagaacggccctggtagagttcgatttcacccggagattcttcagtacccgccagcatggaacccaccattaccgcgcttgcgccagcggcgatagctttggcgatgtcgccggagaagcgaataccaccatctgcgataaccggaataccggtgccttccagggcttcaactgcgtcagcaacggcagtgatctgcggaacacctacgccagtaacgatacgagtcgtacagatagaaccagggccgataccgactttaaccgcgctgcaaccagcttctgccaaagcgcgtgcacctgcagctgttgccacgttgccgccgatgatttgcagatccggatatttagcacgggtttcacggatacgctgcaaaacgccttctgagtgaccgtgggaggagtcgatcagcagaacgtcaacgccagcggcaaccagcgcgtcaacacgctcttcgttacccgcacctgcgccaactgcagcaccaacacgcagacggccttgctcgtctttacaggcgttcggtttacgttccgctttctggaagtctttcacggtgatcatgccgatcaggtggaattcgtcatcaaccaccagcgctttttcaacgcgtttttcgtgcatttttgccagcaccacttcacgggcttcaccttcacgcacggtgaccagacgctctttcggcgtcatgtaaacgctaaccggctggttcaggtcggtaacaaaacgcacgtcacgaccggtgataatacccaccagttcgttttcttcggtaacgaccggatagcccgcaaaaccgttacgctcagtcagttctttcacttcgcgcagcgtcgtggttggcagaacagtctgcggatcagtcaccacaccagattcgtgttttttcacacggcgaacttcttctgcctggcgttcaatggacatgtttttgtggataaagccgataccgccttcctgagccagagcaatagccaggcgcgcttccgttacggtatccattgctgcggaaagcatagggatattcagacgaatagttttcgtcagctgggtgctgaggtcagcagtattcggcagaacggtagaatgagcaggaacgaggagaacgtcgtcaaacgtcagagcttctttagcgatacgtagcatgggcaatatctcgaccagagtggttaataaatattgccgcggcattatacagagcgtaaccgattgcatctacccctttttgcaaaaaatgcttgctatccccgaagggcgggttactatcgactgaataacctgctgatttagaatttgatctcgctcacatgttaccttctcaatcccctgcaatttttaccgttagtcgcctgaatcaaacggttcgtctgctgcttgagcatgagatgggacaggtttggatcagcggcgaaatctctaatttcacacaaccggcttccggtcactggtactttacactcaaagacgacaccgcccaggtacgctgcgcgatgttccgcaacagcaaccgccgggtgaccttccgtccacagcatggacaacaagttttagttcgcgccaatattacgctctacgagccgcgcggtgactaccagataatcgttgagagtatgcagccggccggtgaagggctgctgcaacagaagtacgaacagctcaaagcgaagttgcaggctgaaggtttgttcgatcagcaatacaaaaaaccacttccctcccctgcgcattgcgttggtgtgatcacctcaaaaaccggtgctgcgctacatgatattttgcatgtgttaaaacgtcgcgatccttctctaccggtgatcatctaccccaccgccgttcagggcgatgacgcaccggggcaaattgttcgcgccattgaactggcgaatcagcgcaatgagtgcgacgtgttgatcgttgggcgcggcggcggttcgctggaagatttatggagttttaacgacgaacgcgtagcgcgggcgatttttgccagccgcattccggtcgtcagcgccgtcgggcatgagacggatgtgaccattgccgattttgttgccgatctgcgtgcgccaacgccgtctgccgccgctgaagtagtgagccgtaatcagcaagagttactgcgccaggtgcaatcgacccgtcaacggctggagatggcgatggattattatctcgccaaccgcacgcgtcgctttacgcagatccatcaccgattacagcaacagcatccgcagctccggctggcacgccagcaaaccatgcttgagcgcctgcaaaagcggatgagctttgcgctggaaaatcaacttaagcgtaccgggcaacagcagcagcggttaacacagcggctgaatcagcaaaatccacagccgaagattcatcgcgcgcaaacgcgcattcagcaactggaatatcgtttagcagaaaccctgcgcgtacagcttagcgccacgcgtgaacgtttcggtaatgcagtaacgcacctcgaagccgtaagcccactgtcaacgctggcgcgtggatacagcgttactactgctactgacggcaatgtactgaaaaagtgaagcaagttaaagcgggtgaaatgctaaccacacgtctggaagacggctggatagaaagtgaagttaaaaacatccagccagtaaaaaaatcgcgtaaaaaggtgcattaagccagcacgaattcaacgcgttttttcgatatcaagccatgcccgtgctgacagaagtaatctactgcaccgcaggcttttaacacctgcaacggttgatggcagtctggacaaagagctttcatttcaataatttccccgcaggatgggcaacgcgcatggtcgttatcctgatcaagcacatgctgacattgtggacaatgcagttccatatgaattcctccggtagccatccctctacattcatagagggaatggcagataaaatacttacggataattatttatttttcttgatgtgcttcatcagacgcttacgtttacgcatctgggttggcgtcagggtgttacgcttgttcgcatacgggttttccccttctttgaactgaatacgaatcggcgatcccattacgtccagcgatttgcggaagtagttcatcaagtagcgcttgtaggaatcaggcaggtctttcacctgattaccgtgaatcaccacaatcggcgggttataaccaccagcgtgggcatatttcagcttcacacgacgaccgcgtaccagcggcggttggtgatcttcaacagccatcgtcatgatgcgcgtcagcatagaggtccccacacgacgggtggagctgtcatacgcttcacgtactgattcaaacaagttaccaacaccactgccgtgcaaggcagagataaagtgcacacgagcaaaatcgataaagcccagacggaagtccagcgtttctttcacctgctctttcacttcctggctcaggccatcccacttattcaccacaatgacaagtgagcgcccactattgagaataaagcccagcagcgagagatcctgatcggaaataccttcgcgcgcatcaatcactaacatcaccacgttggcatcttcaatggcctgcaacgttttgattacggagaatttctctacagcatcggtgattttgccgcgtttacgtacgccagcggtgtcaatgagcacatactcacgtccatcgcgttccattggaatgtagatactgtcacgcgtcgtgccaggcatgtcataaacaacaacgcgctcttcaccaagaatacggttagtgagtgtagacttacctacgttcggacgacccacaatcgccagtttgatcggcagactttgcgggtcgaagtcgtcttcctcttcttcttcgccgttctcttccgcttcaaattgcgcccagtattcagcgtcttcgtcgacttcctcttgcggtgcgagatcttccatccacggcagcagcacatgctccagcagacttaatacgccacgaccgtgagacgcggcgatcgggtagatttcacctaagccaagcgagtagaaatcaaccactgcctgatcgggatccagaccgtcagttttgtttgccaccaggaaggtcggtttttcacgggagcgcagatgtttggcaatcgcttcatctgccggcatcaggcccgcgcgcgcatccaccataaacagtacgacgtccgcttcttcaatcgccagcagcgactgttccgccatgcgggtttctacaccgtcttctgtgccatcaatcccgccggtatcaatacagataaactcacggccttcaatttccgcacgaccgtacttacggtcacgagtcagacccgggaaatccgcaaccagcgcatctcgggtgcgagttagacggttaaataacgtggattttcctacgttagggcgcccgacaagcgcgaccacaggtaccatgtttaaagcctcatttttataaatcatcagacaacgcacgctatattcgcgtcgttgttaaaaacaggaaaacggcccctgtccaggagccgttttcaaagtgaacgacagagacgattaacgtgtaatagagtacacggttccgtcttttgcctggatcagcagtttgccgtcagcggcaaccggttcagtctggaaaccggaactatcaactttttgctgggcaacgaaacgaccatcttcgacgttaatccagtgcagataaccttcactgtcacctaccaccaggttgccattatacagcaccggagaagtcagcaggcgatgcaacagatcgctttgtgtccacagcgtaacgccgccatcaatggtcaacgccatcacccggtcattttgatcgaccagatagatgcgattgccgtcgacgatgaaatcattcaccgaacccagttcgcgtttccacataatctgaccactgcgcagatcaagcgccgtcaggttaccattataggccagcgcgaaaacaacgccgttaacaacgacgggagtcgtgtcaacatcgctcagacggtcaatttcggtagaaccggtcgcctgggaaatacgctgctgccaaatcatctggccctgttccatcagcactgcgctgacgcgaccattatcgccacccacgacggccgcaccaaaagccgttgccggcgcagactcgccacgcaaagagagcgaaggcatatcgaggttaactgtccatttgacagcgccgtcagcctcgttcagcgcttgtaactgaccgttactggtgtggattaacaccagaccgtcgctgaccaccgggcgcgaaagtgcttcacccgcgactttagtttgccatgccacagtaccatcgctggtattcagcgcgtaaacctgcgccttttcgctgccaatgtagacatgcccaccagacacggtcagaccgccagaaagtaatgcaggctctttagagaaccagccatctttctcggccaggctgacagaccagatttctttgccatcatccgcattcagcgcttttaccaaaccagcgcggtccgctgcatagacaacgttgtccgccagtgccggatgaagattggaatagaagttgccaatgccgctaccaacggaagtgctccacgccgtggtcggcgtaaactggttttcaacggttggcaatggggacatctttaccacatcttcttcgctgttaaacagcgaacagccgcttaaaagggtaacggaaagcagtcctggcagcagtaatttacgcaattgcatcgggtccctctcagatggacaaattattaattttcatctgcatcatttcgctcagtgccggagtaacatcgcttttcacgcctgcttcccatgcactacgcgcaccttgcttatcacctttgctcagcaatgcttcaccacgcaggtcggcaacaatggcagcccacccttcacctttgatggtatcaagggttttcagcgcggcatcagcctgcttgagctgtacctgaacgcgagcaagacgcagatttatcacggctttgagattttcatcgctcgtgtctgccagcccctgttgtaactgggcggcagctttctctagttcatttttgtcaacaaattgctgcgcaagttccaaagaagccagcgcaccataagtatttttattttcagcagcaaatttttccgccgccgggatgctatccggtttgccttcgctcactgcggtaaccgcattttgataggcaagagaagcggagcgtgcagaatcaacctgatggctgttccagtagcgccagccaatcagtgcgccaacgcccaaaatcaccccaacagccagtgctttgccattttcagcaaaaaagcgtttaaccgcttctacctggtcgttttcgttctcgtaaatttccacgctgtccttctccttccttaacccagtaacgtgcgcaaatgcgcggctacgctatcctgcgcaactgccgtttgctcaccagagcgcaaatccttcactactgctgtgccgttagccacttcagactcacccagcaccacagcaacgcgggcaccccatttatcagcacgggtaaactgtttcttaaagttgccgccgccgtggttggtcatcaatttcacgcccggtaattcatcacgcagacgctcagctaatgccatagccgcagattgtgtatcagcacctgaagccaccaggtatatatcgacaacaggatcggctttaaattccggattaacggcctgtactaacaatacaagacgttcgaggcccatcgcaaaaccgacagccggtgttgcacgaccgcccagttgttccacaagaccgtcataacgaccgcctgcacacacggtgccctgggagccgagactgttagtcacccactcgaaaacggtacggttatagtaatccagaccacgcaccagacgctggtttacggtgtaagcgatccccgcgctctcaagcagtttgcacagaccggcaaaatgctcacgagattcctcgtccagataatcacctaatgccggagcgtcgttgagaagcgcctgcacttccggatttttgaatccagcacgcgcagcgggttagtgtacatgcggcgtttgcagtcttcgtccagcttttctttatgctgctcaaggaatgccaccagcgcatcgcggtaattggcgcgtgcttccagcgaaccgatagaattcagctcaagagttacgtgttcggaaatacccagcgcgcgccaccagcgggcggtgagcataatcagttcagcgtcgatatccggaccttgcagaccgaaaacttcgcagcccaactgatggaactgacgataacgccctttctgcggacgctcgtgacggaacatcggcccgatataccacagacgctgttcctgattgtacagaagaccatgctcaatgccggcgcgtacacagcccgccgtcccttcagggcgcagagtcaggctgtcgccattgcgatcctcaaaggtgtacatctctttttcaaccacgtcggtgacttcaccaatcgcacgtttgaatagcggggtctgctctacaatcggcaagcggatttcactgtaaccgtagctgccgagcacgtttttcagtgtgccttcaatgcgctgccagatggccgtttcgccaggcaggtaatcgttcatgccgcgaatggcttgaatgttttttgccacgtttattctctttctgaatataaaaatgaaccctcaacgcttccctcaatgtttcgggagctatgcgggttcaatcatacacgggaagcgaggcgcttcccatcacgttattatttttcaacctgctgaacgtcaattcgacgcgcttcgtccagctgactggctttcgcacgaatgcgtgcttccagctggtcgatcatatcgttgttgtccagacggtctttgcgcacgccatcttcatagaggccgcttttcttgttgccgccggtgacgccgagtgtagaaaccagcgcctcacctgggccattcaccacgcagccgataatcgaaacgtccatcggagtgatgatatcttccaggcgttgctccagcgcgttaaccgtaccgataacatcaaattcctgacgcgaacaggtcgggcaggcgatgaagttgatcccgcgcgaacggatacgcagcgatttcaaaatatcgaaaccgactttgatctcttcgaccggatcggccgccagtgatacgcgcagcgtgtcgccgatgccttcagacagcagcagacctaaaccaatggcggattttactgccccgctgcgtgcaccaccggcttcggtgatccccagatgcagcggctgatcgatctgttttgccagcaaacgataagactcaacagcgaggaagacgtcagacgctttcacgctgactttgaactgatcgaagttcaggcgatcgagatgatcaacatggcgcatggcggattccagcaacgcctgcggcgtcggttcgccatacttttcttgcagatctttttccagcgatccggcgttaacgccaatacggatcggaatgtttttatcgcgcgcacagtcaaccaccatgcgaatacgctcttcattaccgatattgccagggttaatacgcagacaatcgacgccgtattccgctactttcagtgcaatgcgatagtcgaagtggatgtcagccaccagcggcacgttaacctgctgtttgatgagtttgaacgcttctgccgcgtccatcgtcggtacggagacacggacgatatcagcgccaacgcgttccagcgccttgatttgattgaccgttgcttcgacgtctgtcgtacgcgtattggtcatggactgtacggcgatgggagcaccatcgccaatcggcacattcccaacgtaaatacgtgttgattttctacgttgaattggagcctggttatgcatgaaaaatctcccgcgttacccgtctgttactgcgccggtgattgttcggcattgagggtcagacgcgcaacctggttagttctgataaaacgactcagatcgacaggtttcccttgatactggatctgtactgcggctggcgcaccaattttcagtttgtatggtgcctggccggttaagttcaaattaccgtctttacgctgcataccgctaaacaatttttaccggtagcatcagtaacctccagccagcaatcggcagtaaagttcatcaccagcgcattcggatcagccgccggcgtagtcacgcctgcctgatcggttggcaacggcgcagcgccatctggcgttgttgttgccgttggtgccggggtcgcggcggtatcaacatttgcctgcgaaggcgaaacaaccgcattctgttgcggatcaacagctggtgctggcgcagttacggcaggtgtttgcgtgttggttgcggtagtatccacagacgctggcggcgtggacgttgtagccgggtctgtagttgtcgacgtatttaacggaacactctgcccctgctcgctattactgctcagttccgccgaagattgatcggccatagtggtgatctcttcctgctgagctttgtggtcttgccaccaccaggcaccgctcaggccgataaccacaaacaacaccagccaggtgaaggtcatcagccagccgtcacgttttttgcggcgtttaccgagggaaaaactctgcataggcgcaacttttgcagcccgtagtggagcctgcttttccagccctggcagcagttcttcttctggaatatgtaccagacgcgcataagagcggatatatccgcgcaggaatgttgaagcaagatcggcgggtgccttatcttcttcaatgtcgcgtaccgtggaaaccttcaggcaaagtcgctcggcaacggcctgctgactaagtcctagttgttcgcgagcattacgcaggcgagcgccggtagtaagtgcttcattttggtcgtgcgtggcttcagtattcattcgctgcaggtacgtttaaatgagaattgagatgccggtgaaccatcatgctcacccacaccgcgaaacatccgttaagttaaccgttatcatacagtataagaccgtctgtgtgctcgtgacaaagcccacattcactaaggctaacttactgttgcatcgttacatactgccttaaagtcagcaaaaacgcaccgttaatattgaccagacaattgcaacttaatacttcattcataaaagattacgccacggtacataaagtaaccgtggcgtaatggctatcagaccgctttaatgtcgatggcttcaccctgcatccgtttacgcagggtacgtttcgtacggtcgataacatcgcccgccaactgaccacaggcagcatcgatatcatcaccacgggttttacgcacaatagtggtgaaaccgtagctcatcagcacttttgagaaacggtcgatacggctgttcgagctgcgtccatacggcgcgcccgggaaggggttccacgggatcaggttgatcttacacggcgtatctttcagcagttccgccagttggtgcgcgtgttcagtgccgtcgttaacgtggtcaagcatcacatactcaatagtgacacggccctgattggcgttggatttctccagataacggcgcaccgcagcaaggaacgtttcgatattgtactttttgttgatcggcacaatttcgtcacgaatttcgtcgttcggcgcgtgcagggaaattgccagtgcaacgtcgatcatatcgcccagtttatccagcgccggaactacaccggaagtagaaagcgtgacgcgacgtttagacaggccaaaaccgaaatcatcaagcatgatttccatcgccggaacgacgttgttcaggttgagcagcggctcgcccatgcccatcatcactacgttagtgattgggcgctgaccggtgacttttgctgcgccgacgattttcgccgcacgccacacctggccgataatttccgacacccgcaggttgcggttaaagccctgctgggcggtggaacagaatttacactccagcgcacaccccacctgcgaagagacgcagagcgtggcacggtcgtcttccgggatatacaccgtttcgacgcgctgatcgccaacggcgatcgcccatttaatggtgccgtcggatgaacgctgttcttcaaccacttccggtgcgcggatctccgccacctctttcagtttgccgcgcaacactttgttgatgtcggtcatctcatcaaagttgtcgcagcaatagtgatacatccacttcatcacctgatcggcgcggaagggtttttcacctaaatctttaaaaaactcccgcatctgctgacggttgagatccagcaggttgatttttccatctttcgtggtgacgttttcaggtgtgactaattgttcagacatatgctattccggcctcgttattacacgttatggcccctggagggttgaaaaaagaaacgccccggtgagcggctgctcgtccgggggcgctgcattgtacaaattctggcgcacggatgccacgtttgcacgcggcatttacgaaattattaacgggtgcgcgggcacacttcgccttcgccaaagaaataagcgatttcgcgagcggcagattcgacggaatcagaaccgtgggtaccgttttcggtcaggctgtcagcgtaatcagcgcgcagagtaccagccagtgcgtttgccggattggtcgcgcccagcagatcgcggtgacgctgaacggcgttttcaccttccagcacggaaaccacgatcgggccagaggtcatgaattcaaccagaccatcaaagaacggttttccatcgtgttcagcataaaagccacgtgcctgttcaacggtcaggtgcagcattttggtgccgacaattttgaaccctgcagcttcaaagcgcgcaaagatattaccaatgacgttttttgctaccgcgttcggtttgatgatggaaaaagtacgttcaatagccatttttacctctgtaaattgttctgttgttgtctgtaccagcgtacgagatggcgcggattataatgagcaacagggccgttgactattgatgaaggtaacatttttttaaaataaaatgagttttagcaacaatcagggacaaaacagactattgcatgacaaatttcactgtcgcgatttgccccacatcatccatcaccagcaattgataatcacctttatccgtcaaatgcagggtcacgttgcgcccgcgttcagttaacggttcgccattcagaaaccaccagcgttcacctgcccctccacttgattgcaacggcaaagtcgcttccgctgcgcccggtaaacgtttaataatcgcgccatcgcgaacgcctgtcagctgcagagggagctgggcatcgtgaccgtatggcgggcaaattgtcgaggccggtggtaagcgcacagcgcgacgttctgatgcgggcagccagggttccagcggtagcggccagacatttatcatttcttgtcgcgcttgcgggcaatcagcggcaacacgtttgccattttcatccagccagatggggaaacgaatgccattaatgccttcctgctccggcagtaatagagttggcggctgactcccgtccagcagccaggttgccaggcggcggcgacagttaccgtcaccttccggcaaagactgtccgcccggccagcagataacgccacgagtgactgagttcgggcgcgggtcttccggcagattcgcactgcgcgacagtaagatattattgacctgattcaacaatggtacggcactggcaaagccaaactgaccaacaacgggcgtgccgtccggtctgccagtccagatcccaatgacatagcgagcgttaaccccaatcgcccaggcgtcacgatagccatagctggtgcccgttttccatgccagtggggcgacgcgcggcaaggcactatccggcaagggtttcgcttcatcagccataatccggcgaatgatccacgccgcccccgacgacattaaaggccgttcaagcagcggatcgtcaggctgtaagcgcaatttgcctgccttgccgtggcgagcaaacgcggtatacgctgccgccatatcttccagttttgcaccagcgccgccgagaatgagtgaaagattcggcgcagcaccgttgggcaaatataacggcaatccaacattgcgtaactttgccgcaaaccgtttcggtccataggcttccagcacctgcacagcaggtaagttcagcgagcgcaccagcgcctcgctcatgctgatcgggccatgaaaaccgctatcaaagttacctggtcgataatcaccggtgcgccgggggacgtcttgcagcagtgatgccgggtggatcaagccttcatccagcgccagaccataaacaaacggtttgagcaccgatcctggcgatcggatcgcattgaccatatcaacatgaccaaagcgtgaatcatcgttgagatcaaccgatcccacccagccgcgaacacgcatatcggtatgatcaaccacgatcatcgccagtgagctgcgcggtggcaaccgccctttccagttttgcgccagttcttccagacgtcgttgaagaccggcatccagcgtagtaacgattttgtcgcttttgcttttaccgagcatcatgcgcgaaaacagcggtgccagttgcggcatttgtcggggtgccagccagatgggttcttcccttgactcttttacctgctcacgggaccacacaccttgcacggccatccgttcgagcactttattacgcgcggcttcggcacgctccggccaacgatccgggcgaagacggctgggcgcttgcggcaaaaccgccagcattgccgcctcggaatagcttaaattcgcaggcgactttccgagataagcccaacttgccgcaccgatcccctgcaacgtaccgccaaacggagcgcggttaagatacaaggtcagaatttcacgcttagacagatgccattccagttgcaacgcgcgccagagttggcgaattttgccgccaaatgttttggggtgaggatcaagcagacgagcaacctgcatagtgagcgtgctgccaccggaaataacccgtcccgaagtgagatcttgccatgctgcgcgcgccaccgagaatggattcacccccggatgcttccagaaccagcgatcttcataattgatcagcgcttcaaggtaacgtggagaaacatcttcgattgttaccggataacgccagatgccgtcagcatcggcgaagcgccatagcggcgtaccatcctgcgccacgaccactcgtgcgggattgacttcatgcagcggtagaggccagcgtttatctgctccccacgctgcaagaaaaaggagaaatggcgcagctgccagcgttatccagcagccgcgtttggttaacaagcgaggcatttacggtcggacaatcagcagatcttcagccgcgccggtcgcccgccattggggaacatacattgattccaccatcggttgcggtacctgatacgttcccggcgtcaccgcccgcgccagatacaccagcgttaccggttggtattcatcaacggcaaccgccgccacaaagcgatcgtcacggaactcaatgtgcttaatgctcgcctgctgcatctggttcagtaagttttgcacttcgccaccactttgctccaggctggcgctaccgttcgccagattctgattttccagttccagacccgcaggcagcagatccacgactaacgcatccggcacgctgttactggcttttacctgcaaccagaccagcaccagatcgccgctacgtaacgagtccagcgatttgctcttaccatcagtaccaagaatatgacgctcgatttgcagcacattgttcgccggtaaaggtgcggattgcggataaccgctggcatccatacgcaaccataacggctgatcgccactgtttctcacctgcaaggtggcaagttgatcgctattcagattgctgtttagcgttttctcgcctgtcagcggctcagctgagaaagaggtttgcgcctgccatttacccggtaaatcctgaatcgtacgggcagccaggaacaacgcgttactttcctgcgtcgatagccagcgttcaccaaacgcctgctgcgaaagtgtgttcagcaaagtgtactgctcatcgggtagcagtttattttcttccagcaaggagagcattaacgcgttgtcgcgcagtggactaccgtaatcacccagccatatccgctcatcactatttctcggcgttttcagcgccagcacaatcgcttcttcaccacgcgttgcatcacccatggttttcagcgcaacgccaagttgcagcagcggtaaaccagaagcggcatctgcacgatgctcccagatttcacgcagcgcacccagtggtgctttttgctgacgggccagcaccagcgcagcgtaagactgaacggcgaatttactggctttgagattatccgcgtacgggatcgacatcatgcccggatcttgtaaatagcgcagcagacgctcattaccccggttaatggcgtctgtcggcacgctgtaaccctgttcgcctgcgcggactaggaaatccatcacgtaagccgtcagccagtactcttcgtcaccgtttttatcccacagcgcaaagccgccgttatcacgttgcatttgcagcaaacgggaaatgccgatatcgaccgatgcacggcgtttctcatcactgtcgcctttgatgcccaacgcctgcagttgggctgcgttggtataaagtgacgggaacaggccgctggcggtttgctcaagacagccgtacggatacgcttttaactctttgatataacgtgcaatgttcagcggtggtttgccgctcaacaacaattgcccttccagcgtaacaggcgagaagttttgcaatccatccgccggaatcgcccatgtctcaccaggctgtaacgccgtaccgtaattaaccgtttgtgccgggaacgccggacggacgccgattttccactgcttatgctgatcggcaacggtttcacccggtaacgctaacccgctaatggtggcctgaatttctccatcgccataacccggcaatgctcgcaccgagataaacagcgtagtacgcacacctggcgctaattcaacggctgcgggtgaatcgctgaccagttcaagcaaaccactggcggtcagggcaacgttcagtttttgcggtttatcggtaagattagtgatatccagcgtcagacgcgaggtatcgccactcgccataaagcgcggcatgttcagttcagcaatcaccggtgcggcaactatcactttgctttcgttgctaccgaaatcatctgccgtccaggcttgcgccatgacgcgcaattcaccgttaaaatcgccaatcggcagtgtaaccgagccttcgccctgttcgttgagcgttaccggcagcgcctgctgcgcgacaatattgacgtgattgaccggcggtttaccaccacgtttcagctcatcaccatcgccaccgaaacgcagagctgccagacgcccctgaccttcaataacctgaccgtaaatatcgtaaatgtctgcgccatagcgtttctgaccaaagaacgcctgccacggatctggcgtgacgtagtcagtaatattcagcacaccactatcaacggcagacaccagcacattcacctgtttaggcttctcgccatttttagtgctggctttaattttcacggttaatggttgattgggacgcatttttgctggtgtttccagcgccagatcgaggcgacggttttcatcgccaagcggcagatgcaacacaccaaccgcgcgttttggcgtcgcggagcgagatttatcgccaggacgtaccaccagcgtacttaaatacagatcatgacgattccaggttttatcgaccggaatcgtcagatccagcccttgagcccgaacatcaatctcttgccaccacagcggcccttcactggactcgaccatcgcataacctttacccgccgttggcgcggcgatatgcaacttaatggtgtcgccagggcgataactggctttatccagtttcagcgtgacacggtcgggtcgcactgcgccgctaccgtcgctgttgtcctgccagctatagccagcccagaaacgaacactactgaccgcttcattcggcgctttgacttccagacgataagcgccccactctaccggaaaactgaccttgccggtttcgtccgctttcagatccagagtttgttcattttcgatcagatctttttgatcaaactgtgactgccagccttcatcttctgaccagttccagtagtaatcgcggcgttcgcgaatcaggcgcacctgcaagcccgacacggcttttttcacgccttgcgcatcgctataaacgatgtcaaaagcggcgttactgccttcatcaacaatgggctgtttcaccgtgctgtcagtacgataatcgtaaaccgatttcgaggcgaactgcggacggatccccggcaatgcatcggcaggccagatagcctgctcagcgcggcgcgtcaccgggcgaccgcccgattccagcaaactaccctggaaaataacctgtaatggggaatgcgtttccttccactggctttctgtagaaacttcgccgcgccctttatcatccagcgtcaactgaacttcatccagcgtgcgggaaagattttcggcagctatatcgccgaattcaaaaccaggtaaggctgacacagcttcacgcagtgggcgcaggaaaagttgcccttgcaaagtattaccattagcaggtgcaccatacaggtagtaccccaccacggagaatttcacttcatctttcggcgttagcggggttttctcaccggtcagattcagcgccatgcgctctggcataaaatcttcgacgtggaaatcccacatccgatactggttatcgcccgtgttagcgcgaatatgccacataccggttgccgcattgctatcgagtggccaggtaaagtggtagaggccattctccggctgactaacgacgctcctgagtacctgcccatcgggtttaatcacgtctaacttgatgggttgattgggcaacgctttaccgtctgcatcacgcagcaaaccattgaggattaccgtttcacctgggcgataaagatcgcgtgggccaaacatgaaaaactgtttgctatagcctggcgcgccagcaatgttaaattctgctaagtccagcgccggaagttttaaatcgagtagcgttgtctgaccgtctttacgcgccaacagtaatgccgcgtttttatcattttccagctgcacatgcccctgagcgtcactggttgcctgagtcagagtctgccctttctcatttaataaagagacttcaattccttgctgggccgcgccgttttccagactttgggtaaagatatccagacgattgtgataacggtgagctgaaacgccgatatcacttaacgtaaacagcgtcgcgggattactgtaatcgtaacgtccagcctgattcatcacagccagatacacgcccgcctgctgaagcggtttgatatcgcccagcggcagcaataatttttcacgggtgttacgcgcaggattgagatcaaaccgtccggtgtagaccagatccgccatctgcagcagtttgtctgactgccagttcgccagcgaattgcggtattcccattggctaatgaatgctggcagagattctggcttaacgcggaagaagttaacatcgacattattaacgttgagcgccattaccggcagcccttcaacgactttaccaggcagcagcgaaccacggctggcaaaaccgacgctgggttggatgtcgcgggtagttatagttttttcgtaatctttactgaaggttgcgttgttgagtgctttgacctccttgccaatagtaacgatcaaatcacgtttcggttcgaggtggcgtaaacgtaactctttaagattatctgacagctcccaggcaccatccactttgccgctttttttatcgacgacatgaataacgcgtgagaaatcctgatccgggtcgagagggatggagaacgtcagcaccagcgtggctgcaccatcaagttggacttcagagagatccagcaatgtcagcactttaccggcactctgttgggccagtttttgtctctccggcacggagagttttgctgaactcgcgttttctgaagaggccgctttagtaacttcagaaggcgcatcttttttcaccgctgttggcgcgttatcgttgttgtcgcaccctgccagcgccagcattagcatgcaggcggctacgcgtaactttttcatttttcatccctgccacaatggcccgttagcaacgtcgaataattattatgcgtgagaatttacgttatgtaattcagtatcacgcccatacaatccgaattttagtgagaattgtggctcagacagccaaatcagcctctttcgcttgtcgcttttcactaaacatccgacaatttagcctaaccccggcaaaatggagatgcctatgtccacgacatggtttgtaggagccgactggctcgccgaacatattgatgacccggaaattcagattatcgatgcccgcatggcgtcgcctggacaggaagatcgtaacgttgctcaggagtatctgaatggacatattcccggcgcagtgttttttgatatcgaagcgctttctgatcacacttccccgcttccgcacatgctgccgcgcccggaaacgttcgccgtggcgatgcgtgaattaggcgttaaccaggataagcacctgattgtctatgacgaaggtaatcttttctcagccccacgagcatggtggatgctgcgcacctttggtgtagagaaagtgtcgattctggggggtggacttgcaggctggcagcgcgatgatctgctgttagaagaaggtgcagtagagctgccggaaggagagtttaacgccgcgtttaatcctgaagccgtggtgaaagtaaccgatgtattattggcaagccatgaaaatacggcgcaaattattgatgcccgcccggctgcacgttttaacgcagaagttgatgaacctcgcccaggtttacgtcgcggacatattcccggagcactgaatgttccgtggacggaactggtgcgcgaaggcgaactaaaaacgaccgatgaactggatgcgatattttttggtcgcggcgtcagctacgacaaaccaattatcgtcagctgcggctctggtgtaacggcagccgtggttttgttagcactcgcgacgctggatgtgccaaacgtgaaactgtacgacggcgcatggagtgaatggggcgcgcgggcagatttaccggttgagccagtgaaataagtattttacaggcaataaaaaaccgccgaatttggcggttttttattgctggtctggttcgcggcctttccagcatggttgtattaccgtagtaatgcaagcgcgtctcagcggagacaatactcgccagtaactctctttttgtcaagcaaaagagagttattattgttctgttagtgtattatccactgcggccctttccgccgtctcgcaagcgggcgctggcttaaggaaaggatgttccgcgaccgttagagcaagcgcgtctcagcgcttgctatcgcggcaatatcgccagtggtgctgtcgtgatgcggtcttcgcatggaccgcacaatgaagatacggtgcttctgtatcgtacttattgtttctggtgcgctgttttcccaagtaaataataaccggagtctctccggcgacaatttactggtggttaacaaccttcagagcagcaagtaagcccgaatgccgccctttagggcggcatattttagattatccggttctgtttaaagtcacgcaaaaaaccaccccagcgacgttcatagaatggcgcaatatgttcggtaataaagtggctaattcctttttccccttttttcacctgacaaatatcgattggttcatcgccaggtaatgtatcggtcgctacacttcccgtcgcctgaataatttcttcgatatcaccatcggcttcaatgccaataagtaaattaggctgtgcctcttcgttctctttaattgaacaaataaaagcacgcttcaccggcttaatggttttaaataaggtggtgagtgaatcaatcatttgtgctggcggctctgcgacttccgataatatcagcgattcaccgccttccaggatttcctggctgctcagcggatttccctctccaccaatcaacaaactgatttcacgcggcataaattctttaccggtcggcagtttggcattaaggaagagcgtttcgccaagggtcatctcaaacaatgtgcgaacgggcattacgacaaatgcctgttcgtcttcaaccgcctgttgaagcgcttctaacgaggtgaaaaaaggaatgacgctggtgccgtcttctttttcccagtgctgtaaatcaagcgcactatcttcaaccacagcctcgccctgcgccgccgtaccaggcacccagacggtggattccagtagagtacggaaaaaggccgggcggtgcgccggttcggttgctgctttttccagcaggtcttcaagttcgttttttgtttcggacatatgaaccacaattcattcaacgttcggggcgcaaatgcctgatgcgctacgcttatcaggcctacaagggattcgcaatttgttgaatttgcagaatttgtaggccggataaggcgtttacaccgcatccggcatattagtttacgccgttaacagattagctatcgtgcgcacaccaagtcccgtagcgcccgcagaccactgttcaaccggcgctttacggtaagtcgccgagcagtcgatatgcagccagccttgctgatagttctcaacaaagtgcgacaggaagcccgccgccgtgctcgcgcctgccggatacgccgcgcttccggtattgttcagttcggcaaagttagacggcagctggctgcggtggaattccgccagcggcagacgccagaatggttcgttctcttgtgaggcactcgccagcaaacgaccggcaagcgcatcgtcaaaactgaacagcgcgtgataatcattacccagcgcagttttcgccgccccggtgagggtcgccgcatcaatgatcatttccggtttctgcgcactggcatcaatcagaccatcggcaagcaccagacgcccttcggcatcagtgttcatcacttcaacttttttaccgttgcgataggtgatgatatcgcccagcttgaacgcattgccgctaatcaggttatccgcacagcagaggaacagcttcacgcgcttgttcagtccgcgcgtaatggcaaatgccagcgccccggtaaccgttgccgcgccgcccatgtccgacttcatcgagtccataaacgcagtctgtttgatgctgtagccgccggagtcaaaagtgatacctttacctaccaggcacgcgtacaccggtgcttctttatcgccagttgggttgtaatccagcgccagcaataccggagaacgttctgaaccgcgcccgacggtgtgcagccccatataaccttgctcacgcagatcttcgcctttggtgatccgataagtcacacgatcgcccgcgacgttgctgatcagatcaacagcacgctgtgccagttgcgatggtcccaattcttctgccggtgcgttgatggtgtcacgcacccagtcgatgatcatcaggcggttatccagttcctggcgctgggcatcgtccagatccggccactccactttacgcgtgcctttcggggctttgtaaccttgccagaatgcccagcagcgatccgcatcccagccttcaccgcttaactgaacatgcttgatgcccagaccgtcaatcttgcgcgccgcacgctggatcagccccagatcgtctgccccgttcaaatgcagggtaatgccgtcattattaatgctgtaagttgctttttctccccagcgcgcgtcggcaggttgggtagagagggtaatcttcatcgcttctgtcattttagttatccttctttgtaaaagggccgccagttggcagccccaggatttttccgctaaatgattcgcgttgcaggaaggcggcaagtgagtgaagccccaggagcatagataactatgtgactggggtgaacgagcgcagccaacgcatctgcggcgtgaagcatgacgcggaaattattcggcctcgtccagccagactaacaaaatcgcttcgaggattttctcgttggatgcctgcgggtcgtcgtcgaaatcttccagatcgcaaatccactgatgcatatcggtgaatcgaaccgttttcggatcaagatcgggatacgcatcgtacagtgcttcgccaatttcgcggctatcggtccatttaagtcccatactaacctctgttaatgctcacgcgcatggttgatagtgtaacgcgggatttcgaccactaaatcttcgtcggtgacgcgcgcctggcagcttaaacggctttccggctccagtccccaggctttgtccagcatgtcgtcttcctgctctgagctttccggcagcgagtcaaaaccttcacgaacgatgcagtggcaggtggtgcaagcacaggatttttcacaggcgtgttcaatctcgataccgttacgcagagctgcgtcgagaatggtttcaccgctattagcttccagaacagcgccatcagggcagagatcctgatgaggcaaaataacaatctttggcatattaaacctcgtccacggaatggcctttcagcgcacgacgaaccgactggtccatgcggcgagcggcgaaatcctgggtttgtttgtctacgtttttaatcgcttgttcgatggcgtcaacgtcatcgccctgcgccacttcactcaggtgagcggcagcatcgtcaatgacctgacgttctgcggcgcttaacagcgcggcatcagcagccagcgcgccgtgcagactttccagcacacgcgccgcttctactttttgttctgccagcattcgggcttttacgtcctgctcggcatagctcattgagtctttgatcatcgaagcgatttcgctatcggtcagaccgtaagacggtttgacctgaatagacgcctcaacgccggtggatttctccatcgccgtcacgctcaaaagaccgtcggcatcgacctggaacgtcacgcgaatatgcgcaccaccagccggtagcgccggaataccacgcagcgcaaaacgcgccagtgagcggcagtcctgcaccagttcgcgctcaccctgcattacatggatagacatcgccgtctgaccatctttaaaggtggtgaaatcctgagcgcgggccaccggaatagtggtattacgcggaatcactttctccaccaggccgcccatcgtttcgaggcccagcgacagtgggatcacatcaagcagcagcatttcgctgtctggcttgttacccaccagaatatccgcctgaatcgccgcgccaatagcgacgactttatccgggtcgatggaagtcagcggtggacgaccgaaaaattcgcctacccgttcacgcaccagcggcacgcgagtagaaccgcccaccatcaccacttccagcacttcatcagcttctacacccgcgtctttcagcgcgcgacgacaagccagtaaggttcgttttaccagtggcgcgatcagttcattgaattgttcacggctgatttcgccctgccagcccgcaacgttaacggtcacggagtccgcatcgctcagcgcgattttggctgcaatggcggcatccagcagttcacgctgaacgcggttatcgctacgatcaggaatgcccgcctgctcgcgaatgtaatccgccagcagatggtcgaaatcatcgccgccgagcgcggaatcaccgccggttgccagcacttcaaacacgccgcgacttaagcgcagaatggaaatatcaaacgtcccgccaccgaggtcataaacagcgatcacgccttcctgaccggaatccagcccgtaggcgatagccgcagcggtcggttcgttaagtaagcgcaggacgtgaaggcccgccagacgcgccgcgtctttggtgccctgacgctgggcatcgtcaaagtacgccggaacggtgataactacaccatccagctcgcctgccagggcttcagttgcccgcgccgccagtgctttgaggatgtccgcagaaacgcgcaccgggttcagcagccccgccgccgtttcaatcatcggcaggccgttttcgctggcctggaattgataaggcagatgcggatagcgttgctggatatcagccagcgagcgccccatcaggcgtttaacagaactaatggtgttggcggtgtcaagcgctgcgttagtacgcgcgtcataacccaccgaatgcccttgctgttgatagtgaacaacagatggcagcaggtgacggccttcatggtcggctaacgtttcggcctgaccgctgcgcactgtcgccaccagcgagttggttgtgcccaggtcaataccagccgccagacgacgctgatgcggcgcagcactcaaaccaggttcactaatttgtaataaggccatgtttagcttccagaaattaaaaatcgagcagtttttcttcgagttgttcggcactgctccgcagtttatcgagaaaacgcagcttacgcacggtatccgccgccgcgtcccacgcctcgttgtctaactgttcaaccatcaactgatggcgggtatcaaacatctttttcacacgtttgataaagctttccagccgcgcttcatctttcgcctgttcgatctcgtccagctcttcgcgcagctccaactgttccatcaggaacgcggtgtcgcgcacagtatgctgctcgctggcgagatcaaaaccgtgtaaagaaagcaaatattccgcgcgcattaacggatgacgcagcgtttgccaggcctggttaatggttgcagattgctgtacggcggcgagttgttccgcctggcttccgctggcgaatttatcaggatgatactgacgttgtagatcctgaaaacgcaggctcagcgcctgggtatcgagttgataacgggcaggcaagccaaagagggtgaagtaatccataacattctcagggctgcgatccgccgcgataacggcgaatcaggtaaaacaaaccccacgcgcaggcgaccacggtggggttatcggtatgcgcatcaaacgtggaagctttcgccgcaaccacactcatctttgacgttcgggttggtgaatttaaacccttcgttcaggccttcttttacgaagtccagctgcgtaccgtccagaaattgcaggcttttgccatcgaccacgactttcacgcctttgtcttcaaacacgatgtcttccggcgtcggttcgtcaacaaattccagtacataagccatacctgaacatccggaggttctcacgcccagacgcaggccaaaccctttgccgcggttagccagaaaggtatttactcgcgctgctgcactgtcgctcagtgtaatcgacataaccaaacctcaactcttattttgcttcacgtttgcttttatagtccgcaatggcggctttgatcgcgtcttctgccagaatagaacagtgaattttcaccggcggcagttcaagttcttcagcaatatcggtgtttttgatcgcctgcgcttcgtcgagagacttccctttcacccattcggtgaccagggagctggaagcgatagcagaaccgcagccgtaagttttaaaacgcgcgtcttcaatgataccttcatcgttgactttaatctgcaacttcatcacgtcgccacaggccggtgcacccaccatgccgctgccgacgttctcgtcgttgttgtcaaaggaacccacgttacgcggattctcgtaatggtcgataactttttcgctgtaagccattataaattctcctgattccgataccgattaatgatgagcccattcgatgctgttcagatccacgccctgcttgtacatttcccacagcggagaaaggtcacgcagacgaccgatggatttacgaactaactcgatggtgtagtcgatctcttcttcagtagtaaaacgacctaaagagaaacggatagagctatgtgccagctcgtcgttcagccccagcgcgcgcagcacgtaggacggttcgaggcttgctgacgtacaggcggaacctgaagaaactgcgaggtctttcagcgccataatcagcgactcaccttcaacgtagttgaagctgacgttgagaatgttcggcgcaccgtgttccaggtcaccgttcaggtaaacttcttcgatatctttgatgccgttccacagacggttacgcaggccgcgcagacgttccatctcggtcgccatctcttcttttgcgatgcgataggcctcgcccattcctacgatctggtgaacaggcagagtgccggaacgcataccgcgctcgtgaccgccgccgtgcatttgcgcttcgatgcgtacgcgcggtttacgacgtacatacagcgcaccgatacctttcgggccatagattttgtgaccggagaaagacatcaggtcaactttcaactggctcaggtcgataggcagtttgcccacgctctgggttgcatcaacgtgatagataatgccacgagcacggcacatttcgccgatagccgcgatatcctgcaccacgccgatttcgttatttacgtgcatgatggaaacaaggatggtgtcgtcacgcatcgctgcttcaagttctttcaggtcgataatgccgttacgctgcggtgccaggtaggtgacttcaaaaccttcgcgctccagctgacggcaggtatccagtaccgctttgtgttcggttttgctggtgatgatgtgcttgccttttttctgataaaagttggctgcacctttgatcgccaggttgtcagattcggttgcaccagaggtaaagacgatttcacgcggatcagcgccgaccagatcggcaatctgattacgggcgatatctaccgcttcttcagcctgccagccgaaacggtgagaacgagaggccgggttaccaaaggttccgtccatcgtcatgaactgcatcattttctcggcaacacgcgggtccaccggcgtggttgcggagtagtcgagataaatcggtaatttcattgctctataaactccgtacatcactcaatgcaaggaaccaggctaccggctggatgtacgaccgtgtttacggagcgcgatacgccccggcctgattctgaattctttttattaagcgcgtaacttaacgtcgatcgcgtcttgtgtgcgggtgcgtggcgcgtcgtgagtatgctgacgaccagacacatccagcacttcctggttattaaccagttcgcctaaagtaatgttgttgagaaaaccggtgagacggtcgctcaaatcacgccacagcgcgtgggtcaggcatttatcgccgccctggcagccgcctttaccctgacaacgggtggcatctacagattcgtcaacggcgctaatcacttcgccaacggcgatgctgctggcatctttgcctaacagataaccaccgcctggtccacgtacgctggaaaccagaccatttttacgcagacgggaaaacagttgttccagataagaaagggaaattccctgacgttcggaaatatcagccaacggtaccgggcccgcttcagagttgagcgcaacgtcaagcattgcggtcacggcatagcgccctttagatgtcagtctcatgtcttacttcacctcaaactcgcccctgcccggggttttttattgtaaaagtgggggtattgcatagcagggtcaagtctgacattcccgagtaaattggtcaactatttacttgactgatttagtcgggtatttaaccttcagtgccattttttatcgtggcgtttgtacctgttgtcggatgcggtgtgaacaccttatccgacctacggttctgtacattgtaggcctgataagacgcgttaagcgtcgcatcaggcaactactgttattcggccttgttacctttattctgctgctcaatagaagccagaatcccgcgcaggatattcaattcctggctttccgggcgcgcacgggtaaacagacggcgcaatttattcatcacctgccccggatggttttcacggataaaaccggttgccagcagcgtttgttccagatgaccataaaaacgctccagatcatcgaccagcggatacggcgtctcttcatgctcgacctgctcgccgttttcctgagttgccagccaggccatgcgcacttcataggcaataacctgaaccgccatcgccaggttcagcgagctgtattccgggttagccgcaatcgcgacatgataatggcatttctgcaactcttcattggtcaagccgacgcgctcacgaccaaacaccagcgccaccggggtatttgccgcttcagcgacgcttttcagaccgcattcgcgcgggtcgagcatcggccacggcagcgtgcgggagcgtgcgctggtgcccaccaccaggctacaaccggctaacgcttcgtcgagcgtatcgacgatgtgagcattaccaatcacatcgctggcccctgctgccagggcaatcgcctgggagtcgggtttcaccagtggattaaccagccacagattggttaatcccattgttttcatggcacgggcaacagaacccatattgccggtgtgtgacgtctccaccagcacaattcgaatattttgcagcattgtctttcttcatctaaagattattcacgcatcttatcataaaacgaagacagatgccgatctcgctgctatactctgcgccgttttcccgttctttaacatccagtgagagagaccgatgcatccgatgctgaacatcgccgtgcgcgcagcgcgcaaggcgggtaatttaattgccaaaaactatgaaaccccggacgctgtagaagcgagccagaaaggcagtaacgatttcgtgaccaacgtagataaagctgccgaagcggtgattatcgacacgattcgtaaatcttacccacagcacaccatcatcaccgaagaaagcggtgaacttgaaggtactgatcaggatgttcaatgggttatcgatccactggatggtactaccaactttatcaaacgtctgccgcacttcgcggtatctatcgccgttcgtatcaaaggccgcaccgaagttgctgtggtatacgatcctatgcgtaacgaactgttcaccgccactcgcggtcagggcgcacagctgaacggctaccgtctgcgcggtagcaccgctcgcgatctcgacggtaccattctggcgaccggcttcccgttcaaagcaaaacagtacgccactacctacatcaacatcgtcggcaaactgttcaacgaatgtgcagacttccgtcgtaccggttctgcggcgctggatctggcttacgtcgctgcgggtcgtgttgacggtttctttgaaatcggtctgcgtccgtgggatttcgcggcaggcgagctgctggttcgtgaagcgggcggcatcgtcagcgacttcaccggtggtcataactatatgctgaccggtaacatcgttgctggtaacccacgtgttgtgaaagccatgctggcgaacatgcgtgacgagttaagcgacgctctgaagcgttaatgactcaggcgggtgatgtcactcacccgccctcgcctttcaggcgctattctgaaatacttcctcaccgctttactttctttcgtcactctcccaccatctttccccgattaatggatgataaagaagtcgcaaggaaaggttatggcactgccagtgaacaaacgcgttcccaaaattctgtttattctctttgttgttgccttctgcgtttatttagtgccgcgcgttgccatcaacttcttctattatcctgacgataaaatttacggtcccgacccctggtcggcggaatccgtcgaatttacggctaaggacggtactcgtctgcaaggctggtttattccttcttcgacgggccctgctgacaacgccatcgcaaccatcattcatgctcacggcaatgccggaaatatgtccgcccactggccgctggtcagttggttacccgagcgtaatttcaacgtttttatgtttgattatcgcgggtttggtaaatcaaaaggcacgccgtcccaggccggattgctggacgatacgcaaagcgccatcaatgtggtgcgccatcgcagtgatgtaaacccacaacggctggtgctgttcgggcagagtattggcggggcgaatattcttgctgttattggtcagggtgatcgtgaaggcatacgtgcggtgatcctcgactccacatttgcctcttatgcaaccatcgccaaccagatgatccccggcagtggctacttacttgatgagagttacagcggcgaaaattatatcgccagcgtcagcccgatcccgcttttactcattcacggtaaagctgatcacgttatcccatggcagcacagcgaaaagttgtatagcctggcaaaagagccaaaacggttgatcctaatcccggatggcgaacacattgatgctttttccgatcgccacggcgatgtttatcgcgaacagatggtggactttatccttagcgcgttgaatccgcagaactaacccatgatcgctagcacgataatcattcacaaaaccaccttaagacatgctaatccactggtcagaacagtttaagatgagaaaaattctgtgacgcttgccaacatttctgatgattagcattcccttcgtcatttccctgagcaaactttagctattcttatcaattatgcttatgggagatctacagatgatgcctacgcttgctccaccatctgtcctttcggctccccagcgccgctgccagatcttgctgacgctctttcagccggggttgaccgccaccacggcaactttcagcgagcttaatggtgtggatgatgatattgccagtcttgatatcagcgaaacaggacaggagatcctgcgctatcatcaactcacactgacggctggttatgacggtagctaccgggttgaaggtacagtgcttaaccaacgtttgtgtttatttcactggctacgacgtggtttccgtctgtgtccatcatttattaccagccatttcacccccgccctgaagagtgaactgaagcggcgcggaattgcgcgtaacttttatgacgataccaatctacaagcgttagtgaatctctgctcccgacggctgcaaaaacgctttgaaacgcgcgatattcatttcctgtgtctgtatctgcaatattgtttgctgcaacaccacgctggaattacgcctcagtttaatccgctccaacgtcgctgggcggaatcctgccttgaatttcaggtagcgcaggaaattggacgccactggcagcgtcgggcgctccagcctgtaccacctgatgagccactgtttatggcactacttttttccatgttgcgggttcccgatccactgcgggatgcgcatcagcgagacagacaattgcgtcagtctatcaaacgtctggtaaaccattttcgtgagctgggaaatgttcgtttttatgatgaacaggggttatgtgatcagctttatacccacctcgcccaggcgttaaatcgcagtttgtttgccatcggtattgataataccctgccggaagagttcgccagactgtacccacgcctggtgcgcaccacccgcgcggcgctggccggatttgaaagtgaatacggcgtccatctttctgatgaggaaagtggtctggtcgcggtgattttcggtgcctggctaatgcaggaaaacgatctgcatgaaaaacagattattcttcttaccgggaatgatagcgagcgagaagcgcagattgagcagcagttacgcgaactaacgttactgccgctcaacattaagcatatgtcggtaaaggcatttttgcagacaggcgctccgcgtggcgcggcactgattattgcgccttataccatgccattaccgctcttttcaccaccgctgatctatacggacctgacgctgacaacacatcaacaggagcagatccgcaaaatgctcgaatcagcatgagggaacaactttcgggcgcaaaaacattgccggaagcgccaccagcgccattacccagaacacgccgtggcccagatattgatacaggaaaccggcgaaaacggtcatgatagcgatactgccgcccatcgcgacggcagagtaaaccgcctgtaaacggatgacttcgctaccctggcgagcagcaatataacgcatggcggccaggtggcagaccgtgaaggtgccgcaatgcagaatttgcaccactatcaaccacggcaacgccgtagttgctcccataatgccccagcgcactacgccgcaaatcgccgagatcaacagcatatcgcgtgcactacaacggcggaaaagtttattactcagcgcaaagataatgacttccgccaccacgcccagcgaccacaaataccccaccgccgaggccgagtagccagctgcctgccagtaaatggcgctaaaaccgtaataggccgcatgtgccccctgcaataaacaaacgcaggccagaaagcgccagttctggcgaaccagcgccaaccacgctgaccaaccggtgctctcctgctggcggcttgccccttgtggctgaatcgtcggacggatgagaaagccgagcagcatggatgccacgcccaacgtcaacagcgcgaggatcacccgataatcaaacatagtgaccagtttgcccgtcagcgccgagccaatgacaaacgccaccgagccccacagtcgcactttgccgtaatcaagcgggaactgcttttgccacgtattcgccagtgcatcggtcaacggtaccagcggtgagaaaaagaggttaaagccaatcatcaccagcatcagccacgctacgtgcgcccccgcccagaaggcgacagcaaagagaagtgtcagcagtgccagcacgcgcaaggcggaaatcaggcgggaaggatcgctgacgcggggcgcgatgagcaaactcccgagaaaacgggcaaccagacctgcccccaataacaggccgatggtttctggcgttaaaccaatccctttaagccagacgctccagaaaggtagaaaaatgccgtaactaaaaaagtatgtgaaatagccgagcgccaaccagcgcgtggattgcaaaaccatgagtccctcccgtcaggaggcgttagtctggggttaatcgaatgttggtgcaagttgaaaaataagaatattcgagcctgcttcccgatgtctgtaacgccagttcacaagcactaaaaaactgagatccgcgacgcatgttgcaaaaataatgcgtaattatgccgttacgcttgccaaacgttcctgcacaatggcgatgaaatcgcgtaatgccggcttcatctcccctttcttccacgccatcagtaaagcaatggaaggcacatttccggcaatgggacgaaaaacaacctgtccggtattaaaattattcatataaccgggtatcaaagtgacgcccagccccatgcccaccagattcatggtcaccagaatattcgttgccacctggacgatatttggctggctgttttcttgcgcaaaccacgctttaacgatcggcgcaagcgaaccggaatacgccggatcggtactgacgaaattcacgccatccagttgcgcggcggtgatctctttttcatgtgctaaagggtgatcaaccggtaacacaaccactaatggttcgtcaaaaagctccagataatcaatctccgggctataaacaggatggcgcattaagccgacgtcgagttcaccacggcgaattttttcctcctgttgcgtggtgattaaactcaccagctcaatcaaggtgtctggctgtctgagacgaaacatcggtaatacttttggcagtaaattcacttccgccgatggcacaaagccaatggttaattgtctgtcttcctgaacaattttccgcgcccgtaatttggcattttccgcttgttcgaggattgccagcgcgtcctggagaaaacattctcccgccgctgtcaacgcgactttgcgcttatccctcaccagtaacggaacaccgacacagttttcaagatcgcggatctggctgcttaacgaaggctgtgaggtatgcagtttttccgccgcacgggtaaagttcagtgcctgcgccactgcgacgaaatagcgtaaatgccgtagttccatcaccttccccttgttatcgaaaaaacgtctcagctggtagaaattaactatttcacatattagaaaccaaccagcaacatccttatggcacaaaaatagaaggtcaatacatcttatctttcaggattaaaaaatatgaccacaccctcagatttgaacatttaccaactgattgacacccaaaatggtcgggtcactccgcgtatttataccgacccggatatttaccaactggagcttgagcgtattttcggtcgttgctggctatttctcgcccacgaaagccagatcccaaaacccggtgatttctttaacacctacatgggagaagatgcggttgtcgtagtgcgtcagaaagacggcagcatcaaggcgtttctcaaccaatgccgccaccgggccatgcgtgtgagttatgcagattgcggcaacactcgcgcctttacctgcccgtatcacggctggtcttatggcattaacggcgagttgatcgatgtaccgctggaacctcgcgcctacccacaagggttgtgtaaatcccactggggactaaacgaagttccttgtgtggagagttataaagggctgatttttggcaactgggataccagcgcaccgggcctgcgtgattacctgggtgacattgcctggtatctggatggcatgctggatcgtcgcgaaggcggcaccgaaattgtcggcggcgtacaaaagtgggtgatcaactgtaactggaaattcccggcagagcagttcgccagtgaccagtatcatgctctgttcagccatgcttctgccgttcaggtattaggggcgaaagatgatggcagcgataagcgcctcggtgatggacaaaccgcccgcccggtgtgggaaaccgccaaagatgcgctgcaatttggtcaggacggtcacggtagcggtttcttctttactgaaaaaccggatgctaatgtctgggtcgatggcgcagtttcaagctattaccgcgaaacctatgccgaagcagaacaacgtttaggtgaagttcgcgccctgcgcctggcgggtcataacaatatattccccacgctttcatggctaaacggcactgccacactccgcgtctggcatccgcgcggccctgatcaagttgaagtgtgggcgttctgtattactgacaaagccgcctccgatgaagttaaagccgcttttgaaaacagcgccactcgtgcttttggtcctgctggttttctcgagcaggatgactcggagaactggtgtgaaatccagaaattgctgaaaggtcaccgcgcccgcaacagcaaactgtgtctggaaatggggcttggtcaggaaaagcgtcgcgacgacggcattccaggcattactaactatatcttctcagaaacggccgctcgtggaatgtaccaacgctgggccgatcttctgagtagcgaaagctggcaggaagtgctcgataaaaccgccgcttaccagcaggaggtgatgaaatgagtgcgcaagtttcactagagttacatcaccgcattagccagtttctctttcacgaagccagcttactggacgactggaaatttcgtgactggctggcgcagctcgacgaagagattcgttacaccatgcgcaccacagttaacgcgcaaacacgcgaccgccgcaaaggcgtccagccaccgacaacctggatttttaatgacaccaaagaccagctggagcggcgaatcgcccgtctggaaacgggcatggcatgggcagaagagccgccgtcacgcacccgccacttaatcagcaactgccagataagcgaaaccgacatcccaaacgtatttgctgttcgggtgaattatctgctttatcgggcacaaaaagagcgcgatgaaacgttctatgtcgggactcgttttgacaaagttcgccgtctggaagatgacaactggcgcttgctggaacgggatatcgtcctggatcaagcggtaatcacttcccataacctgagtgtactgttctgatgaatcgaatttatgcgtgtcccgttgcggatgtgccggagggtgaggctctccggatcgatacctcgcccgtcatcgccctgttcaacgttggcggcgagttttatgccattaacgatcgttgcagccatggtaatgcgtcaatgtcagaagggtatctggaagatgacgccacggtggagtgcccgctacacgccgccagtttttgcctgaaaacggggaaagcgttatgcctgcccgccaccgatccgctcaccacttatccagtacacgttgaaggtggtgacattttcatcgacttaccggaggcgcagccatgagcgatctgcataacgagtccatttttattaccggcggcggatcgggattagggctggcgctggtcgagcgatttatcgaagaaggcgcgcaggttgccacgctggaactgtcggcggcaaaagtcgccagtctgcgtcagcgatttggcgaacatattctggcggtggaaggtaacgtgacctgttatgccgattatcaacgcgcggtcgatcagatcctgactcgttccggcaagctggattgttttatcggcaatgcaggcatctgggatcacaatgcctcactggttaatactcccgcagagacgctcgaaaccggcttccacgagctgtttaacgtcaatgttctcggttacctgctgggcgcaaaagcctgcgctccggcgttaatcgccagtgaaggcagcatgattttcacactgtcaaatgccgcctggtatcctggcggcggtggcccgctgtacaccgccagtaaacatgccgcaaccggacttattcgccaactggcttatgaactggcaccgaaagtgcgggtgaatggcgtcggcccgtgtggtatggccagcgacctgcgcggcccacaggcgctcgggcaaagtgaaacctcgataatgcagtctctgacgccggagaaaattgccgtcattttaccgctgcaatttttcccgcaaccggcggattttacggggccgtatgtgatgttggcatcgcggcgcaataatcgcgcattaagcggtgtgatgatcaacgctgatgcgggtttagcgattcgcggcattcgccacgtagcggctgggctggatctttaaggaagcacgatgaaagaaaaaacgatcattattgtcggtggcgggcaagcggcggcaatggctgcggcctcgctacgccagcaagggttcaccggtgagctgcatctgttttccgatgagcgacatcttccttatgaacgacctccactctcgaaatccatgttgctggaagattccccgcagttacagcaggtgttacccgctaactggtggcaggaaaacaatgttcatctgcattccggtgtaaccatcaaaacgctgggtcgcgacacacgagagttagtgttaaccaacggcgaaagctggcactgggatcagctttttatagcaaccggcgcggcagctcgaccgctgccgttgcttgatgcactgggagaacgctgctttaccctacgccatgccggtgatgccgccagactgcgagaagttctgcagcccgaacggtcagtcgtgattgtcggtgccggaactattggtctggaactggctgccagcgccacgcagcgcagatgtaaggtgacagtgattgaactggcggcaaccgtcatgggccgtaatgcaccaccgcccgtgcaacgctatcttttacagcgccaccagcaggctggtgtgcgcattctgctcaataatgccattgaacatgtggtcgatggtgaaaaagtagaactgacgctgcaaagtggggaaacgcttcaggctgatgtggtgatttacggtattggtatcagcgccaacgagcaactggctcgcgaggccaaccttgatactgccaatggcattgtcattgatgaggcttgccgcacctgcgatcccgcgatctttgccggtggcgatgtggcaatcactcgtcttgataatggtgcactacaccgctgcgaaagctgggaaaacgccaataaccaggcgcaaattgccgctgccgcaatgttagggctaccgctaccgctactgccgccgccgtggttctggagcgatcagtacagtgataacttacagtttattggcgatatgcgtggcgatgactggctttgtcgtggcaacccggaaactcagaaggcgatttggtttaatctgcaaaacggcgtgcttatcggtgcggtcacgctgaatcaggggcgtgagattcgcccaattcgcaaatggatccagagcggcaaaacgtttgatgcgaaactgctgatagatgagaacatcgcgcttaaatcactgtaaccaggataattagcgaatatctcaatgcctggggcgtggcgaggtgcaagagtgtgtattacgtttaaatcacattatcttgcaaagggattggttatgaacacactacgttattttgattttggagctgcccgccccgttttgttattaattgcccgtatcgccgtggtcttaattttcattatttttggttttcccaaaatgatgggctttgacggtacggtccaatatatggcctcgttgggcgcgccaatgccgatgctggcagcgattattgcggtagttatggaagtgcccgccgcgatattaatcgtgcttggctttttcacccgtccgctggcggtgctgtttattttctacacgctgggtacggcggtgattggtcaccattactggtatatgaccggcgatgcggttgggccaaatatgattaatttctggaagaatgtcagtatcgctggcgcattcctgctgctggcaattaccgggccgggggcaatttctctcgatcggcgttaggaaagatgccggatgcggcgtgaacgccttatccggcatttaataaattacagccactctacccgcaacgacatctctgaagttgttgattcccctggtgctagcgcaatgagatcacccccttccgggcgatgatgatcatccggcgcatggctcatcggttccagacagaagaaatcaaacgcatatcctttatcaaacgcagggtcggaaacaaagatgaaataacacggtgcaggtggcgtcgtttccatgatgatggcataaccttcctgcggctgctcgatgcgggcctgaccattccatccggcaaaaccattgttcacccactggcgcggcaacggcgcgggctggttaaaatccagttcctgcggtagctgctcgcaaaactcacccgccagccactgctcccgctccagccagtaaccgctcgcctgtgcctgaatccgcgtttgcggcgacaacggaaaataaggatgccagccggtaccaaatggcagcgtctctgccccttgattggtgacagagagcgtcaccgtcagcgtatccgccgttaaatgaaacgcctgacttacccgatagtgatagacaccgctgcgatgttcatacaccagacacaaactatcatcgctgtgcgagacacattgccactcgcccagccagccatcgccgtgtagatagtgcgcatcccactcaacattcggttgcagttgatactcacgcccctgccagacaaaacgattgccgctcacccggtttgcaaatggcaccagcggaaaacatgaggcatcggttgccacaccgctttttttaccaggacgtaagagcggcgtcgtatcgcgccagaagccttcgattacgccgccctggtcagaaacgtccagctttagcgacccgtgggataaggtatagatggtcatccgctaactccttaatccgggaagttaatcacaactttcccgcatttgccgctcgccatcagcgcataggcatcacctgcctgttccagcgagaagcgatgggtaatggcgttacgcggccacagtttccagtccgtcagatcatgggcgcatttttccatatggaacagactggtcacccaggagccgataatccgccgttgatggtgcatcagatcggcgctgacctcgaactccacttttccggtttctccgatgtaaaccacccgtccccagtcagcggtggatcgcagtgccagcaagcgacctgcggcattaccagaacaatcgagcgcaacatccgcgccaccgtgggtgagttcggcgataatctgcggcagaccttcggtggttgctaaatagccgtgctccatcacccctaactgttttgccatcgccagacgttccggcagcatatcaacgccgatgatccgttttgcaccgcgacctttcgccagcatcatcgccatcatgccgactggccccagaccgaccaccagcacgttatcactgccggaaacttcgccgcgcaaaatcccttcataggccgtgccaacgccgcaactgataaacgcaccatcttcgtagctcagcgcatccggcaggaggatcagatctttttcttccgccagcagatattcggcatgaccgccgtcacgctgccagccgtaagccgcttttcctttgccagtacaagagataggaaagccgcggcggcagttcgggcaaaaaccacagccagaaatgtgatacaccagcacgcgatcaccctctttaaaatggcgacagccttgccccatcgccacaatctgcccgcacggttcatgaccgttgataaatccctggtataacggtttatcgggtgccgccgccgtggcacggtgttgatgatagatatagtggacatcgcttccgcaaatcccggaggatttcattttgatcagtacctggttaatccccggcgtcggcaccgcaacttcccgcagatcgacggttgaatttcctggtaaataagctgccagcatcgttttcataaatccctcattaacaatacgattaattttcatccctgccgcacccgcgccaggggcgttaaggtttagcgtttcgctttactgcttcgctgggtcagcaagatattcgccagcaccgccaccacgatgatgacgccgcgtaccacctgctggaaaaaggagttaataccgagcagcaccagaccgttaccgattagcgtaatcaccagcacaccaagcaatgtaccgaacagggaaccgcgaccgccggaaagtgccgtaccgccgaccacgaccgcggcgatgacgtcaaactccagaccgtttgcggcacctgcgttaccagaaccgaggcgcgccgccaacaaaatgccggtcaccgccgctaataatcccgaaagggtaaagataagaatgcgcacccgacgaacgttgatgccgcacaactgcgccgccgtagcattaccgccaacggcaaaaaccgagcgcccgaaggcggttttgcggctgatgaacacaaacagcgcaaacaacacaatcatgatcagcgcggataccggcacaccgagaaattgtccgcccagccagtccagcacctcgttttcgtcaatcggcactggcagtgcgttcgtcataaacagccccattccgcgcagggcgctccacagccccagtgtggcaacgaaacttggtacgttaaacacgccgcgcagcaccccggccagcgttcccatcagcgcgcctaacagcaacaccagcagacacgccaccgccagcggaacttcaaattgcagcaaaaatgccaggcacaccgagacaaaagccaccatcggcccaacgctgacatcaatttcaccggagataataatcagcgtcatcgcccaggcggcaatcccaatggtggcggcatcgcgcagcacgttcatctggttattcaatgagataaagccaggcgcgttcagggagaagaccagataaagaatggcgattaccaccagcaaaccgatctcattaatatggcgactgacaaattgtttgagcgagacgctcttgccctgcggcaatgataatgacgaagcagacatcttcaggttcctcggtaaaattcatcagtgcacagacagaatggcggacatcagctcatccacattgaccggcgagtgaaactcctgcgagaacgtaccgtgctgtaacaacaggatgcggtcgcacaccagcggcaactcctccacttcactggagataaacaccacgctttttccttcggcagccagctcacggacaatacggtaaatctgctgtttggcttcgatatcgacgccgcgcgttggctcgtcgagcaacaaaatctggctggcggcatagacccaacgaccgatcaccactttttgctgattgccgccagaaagcgtgccgatgggcgtttcgctactggcggccttgaccgtcatccgctgcatcacctcttcggtcaggcggcggatggtggaccattgcagtacgccgttggcgctgattttttgccgattggtcagcactgtattttcgtcaacgcccaaccagggaatgatccccgcttctttgcggttttctggcgtatagccaatgccgcgtttcagcatgtcgccgtaatcggggcgcgtgattttctcgccgttgataacaatttcgccctgttcatactcctccagcccaacaatcgccttcagcaattcactgcgccctgcccccagcaggccagcaatgccaagcacttcgccgcgacgtaacgtaaagctgatatcctccagcttgggcttatggcgtaatgcacggacttccagcacggcctgatcgacaatttcctgagggctaccggcgcaatatcaacgtgatcgcgccctagcattagcgacacaatatgatgcgtggagatgttttcgagcatcacatcgcccgccacctgaccatcgcgcataacggtggcacaggaggcaatgcggcgaatttcttccatccggtggctgacataaatcaccgccacgcccagtgccgacatctttttcaccgcgctgatcaccagttcaacttccgcactggcaagcgaactcgtaggttcatcaagaatgaccacgcgcggctcgcccttcatcacccgtgcaatttccaccagttgcttttgcgccgggcttagcgttgaaacaagttgttcaggactaacgtcaacgcccagcgcctgtaagcaacgttgggcatcctgcgccatttgcaggtaatcaatcatgccgttgcggcgaggccattgaccaaggcagaggttttctgccaccgtcagcccttccaccagacttaattcctgataaaccgcacgaacccccagttcagcggcacggcgagtcaacgtagcttcgtcaccttccagtcgcgtctcgccaatccagatatcaccgctatccgggcgttcgctgccggtaagcattcgaatgagagtcgatttgcccgcgccgtttttacctaacagcgcacgaacttcgcctttattgagcgtgaagttaacgttatccagcgcaacgacgccggggtaacgcttatttcctgccaccacttttgctaccgggactgcctctgttgccgtgaacatagggacctctgcgaatcagcgattagggcagaccatcaacgtgcgttgccagccactgtttaccatcttccgttttggtatagagatcgataggcacctgaatcactttttcaccgtcggcttgtttattgataaccttcaatgtttgcgcgaaaacagcattgcccattttcttaccggaaatatccactaccgctttcagcacctgattgttttccagctcctgagcaatttcggttgtcatatccgaaccgaaaacagcaatttttccggcctgattttgattacgtaccgcttttaccgcgccgagtgtcgcaccgcccgactcccccataatggcgttgagatccggcgtggagataatcagtttttcaccaacggaaatcgctttatctaaaacagtcccttcctgattagcgacaatttgcgcgccgggaacgcgggattttaatacttcttcaaatcctttacgtcgctgcacacaaacttcaaaggcttcgcaattgatgacggcaattttcggctggtcaattttattggcaataaaataatcggcggcagcgttacccagttttttaccaaattccagtggatcgccgaccagatacgccgagacatatttatcgacacccttttgattaatacaggtgttgtagcaaatcaccggaatacccgcttcactggcgcgacgaacggtacggctactgccattttcagacactgccgataaaataatggcatcgacattacgcgccacgagggtatcaacaaaggtactttctttcgaaatatcaccctgggcgttagtttcaattaactgtacctgtactgaagaatcttttgccgcatcctgaacgccttgacgcactccagcgtaatatccctgagtatcaaggtatattgcgccaatggtcatttctttttccgcagccctggcaaataaagcgctacctaatagcgtagccattaataatagattacgggttgttctcatttttttaggcatagagcctcctgtagggtttttattaacaacggcttattctaattattttgtgatgagcggcagcgcgtgccgctcaaatattacagttaatagggtttagtgaacgtagttaaaaataaaaggcatcacagtggtgaataatgccgctttcggccaggccggattaatcgccgtcaattcagcgcgagcagactcatattgcgcaacctccccgagtcccgcggacgccagcatcgccaccatcaggcatttttctttatgctgctgttgtaaatcgccatacagcgacaacagatcaggttgtgaaacagcaaagaaatccgcctcaatactggttttcgccatctcttgcgcccactgtttcatttcactaaacagttgctgtgcggtgtgttgttcgcccagcagtcgcagcgccattccttgccagaagagataatcaaccggctgatcgttgtaataactgtggatgttaatggtgcgatcgccggtcgccgccagacgtaaacaacgcatcgcttcagtttcatcgccctgcgcgttggcgcatatcgcctgccagaaccagatgtcgttatcagtttgccccggtaaacggccttcgcttaaattctccggataatgcagcgcggcatgaagcagttcgctggcctgctgcggctgtctggcatcaaggtgctgccaggcgcgtaataactggttgaggataaactgactggtgaccttcccttccccgccttcccacgggtggaatttgcgcgtggcgagaatgtccgccgctttgtctgcctgacccgtgagatgccacaaattgagcaactctgctgtcatgtcgtcgcgtttcagcgcaatttccagattattttccagacgcgccagtcgtttctccggtgtggctccgcttaacttatcaagcaaatcccgttcgaaaagcagacgtgcatcctgcggcgcaagctgataagcattatcaagataacgcgcggccagctcataatcgtgttgcttattccacgcatggatcgctaacccgcgccagccgtcggcaaactccggcgacatctctacgcaacgttgccataaggtaatggctttgttgtagctacgcttgttgtagtagaagcaggccagtaaatgacgggcaaaccagcactcttcaatactctccagcgccgccacttcttccagcgtattcgggaaacggacaaactgcgggaagacatcaatggcttttgcgaccagttcgccgcgttcggctttcggcaataaactcgcctgcaggtaaagcggcagcgtgcgctggcagtccagtgcgttcagcatctctgccgccagggtgggcattccccagttaatcagttgcccggcggtcatcagagcgttaacgtcgcgtccctgacacagaccgcgccactgcgcgagggctgattcgctacgaccatcgaaccagttcagccaccacagagtggcgttcagcggataatcacgcagcagtttcgcgcgctgcaaacgcgcgttgtcctgacgaccacttaacaccagcagcagattatgcaggcaaagcacttcctgattggttgggcaggcacgaagactttgttggcaaaaatccagaccagcgtcgaagttaccattacgcgccgccagtcgtgccaggccataatagccaccggctttgctgttgccgctccagaccgcacgccagaaatcctcttcggcttgttgatattgtccctgacgttcgtaagcactggcgcgaatcaaactggcctgtccgcactgcggatttttgttcagcgcatgtgcgcgtttcagagcctgagtggcatacgccaccgcttgcgggaaatcggcgcggttatattccagcatcgccagcgccaggttacagcgataatccagcggatccagcgccacgccgcgcaggtagtaatcgaacggtgaacggctggcgtgatgatattgctccagatgctgaccgataaaccaggcttcatctgtactggtaatgtcttgtgctgacagtggcgctttggcgacgtccggcaacggcaactcttgcggctgatgttcctgataactcagtacaatattgccgtcggcatcggagagctcaatggtcagcctttcaggattgataccgtgcaacacgccctggatggcggtcgcaggcatcagtgccacggcatcatcaagtaacgcgttgcatttgccgatttcgcggatcgccaggcggtatccgttcaacggagagatggcatacagcccccactcaatcccccgctcactacgctggagttttatcaccgcatcgcgggaggcattttgcaccatgcccaaagaatgataaggcaggaaatactgctcaaaacgcttctcttcgtaagcatcaagccaggtaaaatcaggctggttatcggcaaaaataccggtcatcagttcgatatacgggccgttattgtcggtcagactcttgtcccacgcctggccgaattcactgtgtccccagctccactgttttttacctggcgcgatatggtggttggcaacgtgtagcaaaccgccatcttcatcgtgacaccacgcgccaacaaaatcgtactgtgatttttcagccatatatgaggttggaacgggcacatttttatagcgagaaatgtccactccggcggagtagtccactttgtagtaagtgccggtggcgatggggaaagcggagacggcccgtttgccgtgatcaaacaccgccgttacatccggcgggaagacgctctgatgcccttccccccctttcactgccgggttggcccaccacaagaaatgacgcggcgtggcgttgccgttatagacgcggctggcgatttccaacgccgcccgttcaggacgcagtgtgaaacctgtcatcacctgtaaaccgtgcatcggctccgtttcgccgacccacaccgtctgtgcgccgtcttcatgggcttcgagggtgaaatcaacgggcataaaggtggtcgggcgatggtgttgcggccagttaaactcaatcccgccagagatccacggtcccagcagccccaccagcgcaggtttaatgacttcattgtgatagacaaaatcgcgttgtttcactttatcccatgcgcgatgcacacgaccgcccagttccggcaggatcatcactttgatgtagtcgttttccagccacaccgcctgccaggatttcagggttttctgctcgctcagcgtatcggtcacgccgtagggataaaccgcgccggacgatccctgataaacgcgattttccaggaacatgggatgtatatcctgcggcccggtttcataggtcgggatctcaacgcgctcttgccacacttttactggagtcatggtgccctcaatattaacaagacatactgaattaaaagatttgtggcagtgtattgaacaatctggcaatgttttcgcggaataatcacgcaattaactaaacaaggtttagtgaagatgagagcctgcattaacaatcaacagattcgccaccataacaaatgcgtgattctggaactgctgtaccggcaaaagcgcgccaataaatcaacgctggcccggctggcgcaaatttcgattccggcagtcagtaatattttgcaggaactggaaagcgaaaaacgggtggtgaatatcgacgatgaaagccagacgcgcgggcatagtagcggtacatggctgattgcgccggaaggtgactggacgctgtgcctgaacgtgacgcccaccagtattgagtgtcaggttgctaatgcttgtttaagtccgaaaggcgaatttgagtatttacagattgatgtaccgacgccgcaggcgctgctgtccgaaatcgaaaaatgctggcatcgccaccgtaaattgtggccggaccgcaccatcaatctggcgctggcaatccacggtcaggttgatccagtgacaggagtgtcgcaaaccatgccgcaagcgccgtggacaacgccggttgaggtgaagtatctgctggaagagaagctgggcattcgggtgatggtcgataatgactgcgtgatgctggcgctggcggaaaaatggcaaaataatacgcaggaacgggatttctgcgtgatcaacgttgattacggcattggctcgtcgttcgtgattaacgagcaaatttatcgcggcagtttgtatggtagcggacagattggtcacaccatcgttaatccggatggcgtcgtctgcgactgtggacgttacggctgcctggaaaccgtcgcctcgttaagcgcattaaaaaaacaggcgcgggtatggctaaaatcacaaccggttaatactcagcttgatcctgaaaaattgactaccgcgcagttaatcgctgcctggcagagtggagaaccgtggatcaccagctgggttgaccgcagtgccaatgccattggtttgagtctgtataacttcctcaacatcctcaatattaatcagatttggttgtacggtcgcagttgtgcctttggtgagaactggcttaatactattattcgccagacgggatttaacccgttcgaccgcgacgaaggaccgagcgtgaaagcgacgcaaattggcttcgggcaattaagccgcgcacaacaggtgctgggaattggctatttgtatgttgaggcgcagttacgacagatttgatggcgcgataacgtagaaaggcttcccgaaggaagccttttttcaacagattaaccgtttcgcttatgcgtaaaccgggtaacgtgcgcagatgtcgagaactttacctttgatgcgctcgataacggcttcatcattgatgctgtccagcacgtcacacatccagccagccagttctttcgcttctgcttctttgaagccgcgacgcgtaattgccggagtacccacgcgaataccggaggtcacaaacgggctcttcggatcgttcggtacgctgtttttgttgacggtgatgttagcacggcccagagcggcgtctgcttctttaccggtcaggtttttatcaaccagatcaaccaggaacaggtggttatcagtgccgccggaaaccactttgtagccgcgttccaggaacacttctaccatcgctttagcgtttttagcgacctgctgctggtaagttttgaactcaggctccatcgcttctttcagagcaaccgctttaccggcgattacgtgcatcaacggaccgccctgaccaccagggaaaacggcagagttcagttttttgtacagctcttcgctaccacctttcgccaggatcaggccgccgcgcggacccgccagggttttgtgagtggtggtagtaacaacgtgagcatgaggaaccgggttcgggtagacgccagcagcaaccaggcccgcaacgtgcgccatatcaacgaacaggtaagcaccgatgctgtcagcgatttcacgcattttcgcccagtcaaccacgccggaatatgcagagaaaccaccgataatcattttcggcttgtgttctttggcttgtttttccagatcggcgtagtcgatatgaccggtagcatcgataccgtaaggaacgatgttgtacagtttaccggagaagttaaccggagaaccgtgagtcaggtgaccgccatgcgccaggttcatacccagaacggtatcacctggttccagcagcgcggtgtagaccgcaaagttagcctgggagccggagtgcggctggacgttagcgtagtcagcgccgaacagttctttcgcacgatcgatcgccagttgttcaacgatatcaacatactcgcaaccgccgtagtagcgtttgcccggataaccttcagcatatttgttggtcagctgagaaccctgcgcctgcattacgcgcgggctggtgtagttttcggaggcgatcagttcgatgtgctcttcctgacgtactttttcctgctccatagcctgccacagttcggcatcataatcggcaatgttcatttcacgctttaacatccgcatctcctgactcagctaacaataaaatttttggcctttataggcggtcctgttggacaacggcgaacagtataaccgaatcattgtgcgataacaggtcttgacaaaggaatttacgcaaacgattaccttcaggctacgcaaggctttggagaataaagagcttgcaaccggaaacggatttcttttcaggtttgtgatgcaaatttttcacttcatcacattctttctgaaaaacaccaaagaaccatttacattgcagggctattttttataagatgcatttgagatacatcaattaagatgcaaaaaaaggaagaccatatgcttgacgctcaaaccatcgctacagtaaaagccaccatccctttactggtggaaacggggccaaagttaaccgcccatttctacgaccgtatgtttactcataacccagaactcaaagaaatttttaacatgagtaaccagcgtaatggcgatcaacgtgaagccctgtttaacgctattgccgcctacgccagtaatattgaaaacctgcctgcgctgctgccagcggtagaaaaaatcgcgcagaagcacaccagcttccagatcaaaccggaacagtacaacatcgtcggtgaacacctgttggcaacgctggacgaaatgttcagcccggggcaggaagtgctggacgcgtggggtaaagcctatggtgtactggctaatgtatttatcaatcgcgaggcggaaatctataacgaaaacgccagcaaagccggtggttgggaaggtactcgcgatttccgcattgtggctaaaacaccgcgcagcgcgcttatcaccagcttcgaactggagccggtcgacggtggcgcagtggcagaataccgtccggggcaatatctcggcgtctggctgaagccggaaggtttcccgcatcaggaaattcgtcagtactctttgactcgcaaaccggatggcaaaggctatcgtattgcggtgaaacgcgaagagggtgggcaggtatccaactggttgcacaatcacgccaatgttggcgatgtcgtgaaactggtcgctccggcaggtgatttctttatggctgtcgcagatgacacaccagtgacgttaatctctgccggtgttggtcaaacgccaatgctggcaatgctcgacacgctggcaaaagcaggccacacagcacaagtgaactggttccatgcggcagaaaatggcgatgttcacgcctttgccgatgaagttaaggaactggggcagtcactgccgcgctttaccgcgcacacctggtatcgtcagccgagcgaagccgatcgcgctaaaggtcagtttgatagcgaaggtctgatggatttgagcaaactggaaggtgcgttcagcgatccgacaatgcagttctatctctgcggcccggttggcttcatgcagtttaccgcgaaacagttagtggatctgggcgtgaagcaggaaaacattcattacgaatgctttggcccgcataaggtgctgtaatttgatgttgccggatggaaacatccggcaacccttgacgcggtttaaattgccgcgtcgtcctcttcaccggtacggatgcgaatgacccgtgccacgtcaaagacgaagattttaccgtcaccgattttgccggtttgcgccgtgcgaataatggtatcgacacaggtatcgacaatgtcgtccggtacgacaatctcaattttcactttcggcagaaaatccaccatatactccgcgccgcggtacagctcggtatggcctttctggcgaccaaagcctttcacttcggtcaccgtcatgccggtaataccgacttcggccagtgcttcgcggacatcgtccagcttgaagggttttataatcgcatcaatctttttcatgctattccttgaaaaggtcgcctgtcttttgatctgctaaacgtaacacataacgccaattcattccttgaaatcgtttgcatccagctcgtgtcgggaaagcagtttataaaattctgtccggttgcgccccgccattctcgccgcgtgggtgacgttgcctttggtaatttgcagcagcttacgcaaatagttgagttcaaactgattacgtgcctcaacaaaggttggcagcgccgtgttttcaccctccagcgcctgctctactaatgcatcgctaataaccggagatgaggtcagcgccacgcactgttcaatcacgttgaccaactggcgcacattacccggccaactagcggtcatcaggcgtttcatcgcatcagtggagaacgcgcggacaaacggtttatgtcgctctgccgcctggcgcaacaggtgatttgccagaagcggaatgtcttctgtgcgctctgccagagccggaattttcaggctgacaacgttgaggcggtaatagagatcttcgcggaattccccgcgcgccatcgcttttggcagatcacggtgagtggcagaaataatccgcacgtcgatatcaatatcgcggttgctgcccagcgggcgcactttacgctcctgcaacacgcgcagcagtttgacctgtaacggcgcaggcatatcgccaatttcatcgagaaatagcgttccgccttccgccgcctggaataaaccttcgcgattgctgacagcgccagtaaacgcgccacgcgcatgaccaaacagctccgactccagcaattgctcgggcaatgcgccacagttaatagcaataaatggtttgctattgcgcgggctggcgttgtggatagcctgggcgaaaatctctttcccggtgccgctctggccgttaatcaaaacgctaacgtctgattgcgccaccagccgcgcctgttccagcaaacgcagcatcagcgggctgcgggtgacaatcgcctcgcgccagcgttcatcggtggctggcgcggattgttccagcgcatcgtcaattgcctgatatagcgcatctttatcgacaggcttggtgaggaaactgaacacgccctgctgtgttgcagcaacggcatcgggaatagaaccatgcgcggtaagaataattactggcattcccggctgcactttctgaatttcagcaaacagctgcataccgtccatttcatccatccgcaggtcgctgatgactaaatctactttttcgcgattcagtacccgtaatccttcagcgccactttccgccgtgaccacgctgtagccttcgctggtcaggcgcaggccaagcagtttcagcaatcccggatcgtcatcgaccaataataaatgcgcaggtttatggctcatcaggagtgacctcatgggtggatggcgcgggcttttcaccctcgtgcggcgtatccggcgagaaatttccagccggtttgcgggtcgagagctggcgttcaatatcagtcaggttttccagcttgcgggtggtgagttccagttgctgctgtagaacgtgatgttgctggcgcaatgtatccagctcgctgtcgctggcctgctggagcttgccgtagcgttggcgctcttccgccagttgcagttgcagcgcctgaccgtcgcgccagagttgatacagagggcgaacctgtgccgggatctcggtacttagcgcatcaatgcgcgcgaccagctggcggcgctcatacggcgtaattttggcgtcggcgagcaaaatcccttgtttaaaggtattttgccagctgccgtcgtcatattggcgagcttgctgacgtgactgcgcaggcattaaacgatcagcacaatccatcgcccgcagccagtaaagcggattggtttcggttgatttaccttgcagcgcccagatgtcgctacattcagtagaaagatagtcagccagttgataaaccggaattttttcttctgctggcgtatcaatggctggcttattgtgactctgcacgcaacccagcaatgccagacatggcagccctgccagccacagccgtcggggcaataatcgttgaaaaatgtgtcgcatattcaccagacttaatgcctatcccagtgggcgtaattattgcaggcagtttggacatggacagcgcggagaaaccggagcgtacacgtcgtacgtgaggatttcgagcactgcccggggccgaactggcaaataaaatagcctgatgggataggctgttagcattatttcgtgtttttcgacgacggcaattcaatgcggaaacaaacgtcttgcccgctctcgtcgaccagatacagttccccttgcatacggcgaatacaatccctggcaatgcttaatcccagaccgctgcccttcaccgccccttttcgctggtggcttccttgaaaaaagggttcgaagatcatggcgcgttcctcttgcggaatgggtgtgcctgtattgatgacatcaatataaacccgtgcaccatgtaagctgctgcgaaggcaaatgttaccggattcagccccgtagtgcaccgcattggagtaaagattatccagtacgctcatcagcagcattggctccgccaggcaagctgttgctttgagatcgacgtcggtatgcatcattttagcccgtgcgggcaggctatgagcagaaactactgtctccaccagcggtgctaactcaacattctccagttccaccgcactgtccgcttgtttacggttgtaatcaagcagttgttcgatcagtttttgcaaattgcggctgctgctatcaagaatgctcaccacctctttttgctctggcgtaagcggcccgacaacctggtcagccagtaattcagtgccctcgcgcatactcgccagtggcgtttttaattcatgagataaatgtcttaaaaattgatggcgttgggattccagccatgacaggcgctcacttaaccaaagaatacgttgcccaaccgagcgtaactcgctcggtccactgaacgaaacgctattgcccagagaacgcccttcccccagacggttgatcatgcgctcgatatttttcaccggcccgataatcatccgcgtgaaaagtagcaccatcaccagactcaccagaaatagcaccagcgattgccaaccaaaatattgcccacgttcggcgatttcacgctgaagttgctgcccacgagagaacaccactgtgcgcgtggcctgcaccatttcggtattggcactggcaaaggcttcaagacgcgcggcggcggcagcatcgggaccactgttgttacactgaagttgggccagattgttcaaatcctgacgcaatgcctggtaaagtttatcgtctggcagtacgcctgcgtgggcatcgagcatttcgctgtaacgcttgcgctggctttgataaaccttcgcaagcgtagggtcgtccagcacgcaatactgacggtagctacgctccatctccagcgccgcgttggtcatcgcttcactacgccgggcatcaataagcgtagtgcggttaaccagcgccgcctgatcgctaagcgcattcaggctttgccaggcttgccatgccagcaccaacaggggtagtagaattagcaaaaatgccagcattaccagttgtcgtaatgagcggggaaaaacgggccagcgcttcaaggtgttactctcgtcagacgcgaatagcctgatgctaaccgaggggaagttcagatacaacaaagccgggaattacccggctttgttatggaataaggcggtgcctaactcgacgtttcgcccgatggttgatatagctacgctgatatcagaagttggacggcaggcaccttgttgtgcgtcattcgaattttatgtagcacgtcccgaaggggctgacataagtcggtgaatgagccactgcttactattatgcagtaactgtgccaataaagaaaatagtttggtaacgtactgattatacgttgctttgagggatttatggcttcttcgctatttgaatgtaaatcagccactgtgtcgccaaaaagagacaacttaagataaacttattagattacaataaaatcaatcatttaagtgtcgccagaaagcgacacggtaaaccacccattgtcgtgatttacagacacaaaaaagctcccggagttgggagcttatgatagtggttggtgcttaatgccggatgcggcgtaaatgccgcatccgggctgcaaaaccaatgaactgatgacttaccccaactgcttacgcgcattgcggaaaatgcgcatccatgggccatcctcgccccagttttccggatgccaggagttgctgacagtacggaaaacacgttccgggtgcggcatcataatggtgactcgaccactttcagtcgtaatcgacgtaataccgttcggtgaaccgttcgggttagccgggtaggtttcagtgactttgccgaagttatcgacatagcgcagtgccaccagccctttgctttccagtgccgccagatgcgccgcatcacgcacttccacgcgcccttcaccatgagagacagcaatcggcatttgcgagcccaccatcccctgcaacagcagcgacgggctttgggtcacttcaaccaggctgaaacgcgcttcaaagcgatcggaggtattgcgcacaaaacgtggccacaactcactacctgggatcagttcacgcagattagacatcatctggcaaccgttacatacccccagcgccagcgtttgcggacggtggaagaaggttgcaaactcatcgcgtacacggtcattgaacaggattgacttcgcccaaccttcaccggcacccagcacatcaccgtaggagaaaccaccgcacgcgaccagggcgtggaaatcttccaggcccgtgcgtccggtcagcaggtcactcatatgcacgtcgatagcatcaaagcctgcacggtggaaagctgccgccatttcaacatgcgagttcacgccctgctcacgcagcacagcaactttcggacgtgcgccagtggcaatatacggtgctgccacatcttcgttgatatcgaacgacagttttacattcaggccaggatcggcatcgttagatttcgcctgatgctcctgatcggcacactccgggttgtcacgcaggcgctgcatctgccaggtagtttctgcccaccaaacacgcaacgtagtgcggctttcgctgaatacagtctgcccgttggcggtaatcacaaaacggtcaccggaaaccgcctgcccaacataatggacacaatcagcaagcccatgctgtgccagtacggactcgaccgcttcacggtcagcggcacgaacctgaatcaccgcacccagttcttcgttaaacaacgccgccaggcgatcgtcacccagagtggcgatatccgcgtcaatgccacaatgaccagcaaaggccatttccgccagcgttaccagcagaccgccatcagagcggtcgtgatacgccagcagcttacgctgtgcaaccagcgcctgaatcgcgtcatagaagcctttcagttgcgcgacgtcgcgtacatctgccggtttgtcgccaagctgacgataaacctgcgccagcgccgttgcgcccagcgcgttattgcctttgcccaaatcaatcagcagcagtgcgttatcttcggtagaaagctgcggcgtgatggtgtgacgtacatcttccacgcgggcaaatgcagaaatcaccagcgacagcggcgacgtcatttcgcgctcttcgttaccttcctgccagcgggttttcatcgacatagagtctttacccaccgggatcgtcaggcccagcgccggacaaagctcttcgcccacggctttaacggcttcatacaggcccgcatcttcaccagggtggcctgccgccgccatccagttggcggaaagtttaatgcgtttgatatcgccaatctgtgttgcggcaatattggttaacgcttcaccgaccgccagacgggcagaggcggcgaaatccagcagcgcaaccggcgcacgctcgccaatcgccatcgcttcaccgtagtagctgtcgaggctggcggtagtgaccgcgcagttagcgaccggcacctgccacggacccaccatctgatcgcgcgctaccatgccagttacgctgcggtcaccgatggtcaccaggaaagttttctccgccacggtcggcagatgcagtacgcgtttcaccgcgtctgcaatggtgatcccttcacgggccagcgcgtcgcctttcgctttcagcgtttgtacatcgcgggtcatcttcggcgttttaccaagcaggacgtccagcggcagatcgatcggctgattatcaaaatgacgatcgtgcagagaaagatgcagttcttcggtcgcttcaccaatcaccgcgtagggtgcgcgctcacgcttacacagttcgtcaaacagcggtaattgatcggcagcaaccgccagcacgtagcgttcctgggattcgttacaccagatttccagcgggctcatgcccggttcgtcgcttagaatatcgcgcagttcaaatttaccgccgcgcccgccgtcgctcaccagttccggcatcgcgttagaaagaccgcctgcgccgacgtcgtggataaacagaattgggttggcatcaccaagctgccagcaacggtcgatcacttcctggcagcgacgctccatctccgggttgtcgcgctggacggaagcaaagtcgaggtcggcatcagactgaccagacgccatggaagacgccgcgccgccgccaagaccgatgttcattgccgggccgccgagaacgaccagcttcgcaccaacgttgatctcgcctttttgtacgtgatcggcacgaatgttgccgatcccgcccgccagcatgatcggtttgtgataaccgcgcagctcttcgccgttgtggctgttcactttttcttcataagtacggaagtagccattcagtgccggacgaccaaattcgttgttaaacgccgcgccgcccagcgcgccttcggtcatgatgtccagcgcggtgacaatgcgctcaggcttaccgaaatcttcttcccacggctgttcgaagccaggaattcgcaggttggaaacggagaaaccaaccaaacccgctttcggcttcgcgccgcgcccggtggcaccttcatcgcggatttcaccgccggaaccggtcgccgcgcccggccacggagaaatcgccgtcgggtggttgtgagtttcgactttcatcagaatatgcgccggttcctgatggaaatcgtagcggcccgtttcgtggtcagcaaagtagcggcccacttcagaaccttccattacggcggcgttatctttataagcagagagaacgtaatctggcgtggtttcgaaggtgtttttgatcatcttaaacagcgatttcggctgttgctcaccgtcgataacccaatcggcgttaaaaatcttgtggcggcagtgctcggagttcgcctgggcgaacatatacagctcgatgtcgttcgggttacgaccaagctttgtgaaagcatcctgcagatagtcaatttcatcttccgccagtgccaggccaagacgcaggttagcgtcgattagcgcctgacggccctgccccagcaaatcaacgctggtgaccggagtcggttgatggtgtgcaaacagctgctctgcatcatctaaagcaaaaaagaccgtttccatcatgcggtcgtgcagttcagcggtaacctgctgccattgttcattggtcagcgtaccggcttctatatagtaagcaacgccgcgctcaaggcggtttacctgttgtagcccgcagttatgggcaatatcggtcgctttcgaagaccagggagagatggtgccaggacgcggggtcaccagcaggagtttgccttgcggggcgtggctggcgagtgccgggccatatttcagcaggcgttcaagttgtgcgtgctcatcatcgtttaacggcgcattgaggtcagcaaaatggacatactcggcgtaaatattgtgaaccgggagcctggcagcctgaaaacgtgccagcagtttgttgattcggaatgccgacagtgcaggcgaaccacgcagaatttccatcataagtctctcgtcttctaagctttcggtgtacccaagggggggaaacgggcgtcattataaagaatctgatgcgctgacgaaaccgtttgcgtggaaataaaatcaccatcgtgaattagcaacgcgtgccgccaatggctgtaataagttgccatctggcgcaggtttacgcaaaatgccgctcatttatgagtaaacctttcactattattacgtttttcaagctgggacgcgcacgacacagagaattaactaattgaaaaaattaaagattaattatctgttcatcggcattctggcactgctgctcgcggtcgctctctggccatccattccctggtttggtaaagccgacaaccgtatcgccgccattcaagcgcggggagagttgcgtgtgagcaccattcatactcccctgacttataacgaaatcaacgggaaaccttttggcctggattacgaactggcgaaacagtttgccgattacctcggcgtaaaactgaaagtgaccgtgcggcagaatatcagccagctgtttgatgaccttgataatggtaacgccgacctgctggcggcaggactggtctataacagtgagcgggtaaaaaattatcagcctggccctacctattattccgtgtcacaacaactggtttataaagtgggtcagtatcgcccacgtacgctgggcaacctgacggcggagcaactcaccgttgcaccgggtcatgtggtggttaacgatctccagaccctgaaagaaacaaaattcccggaattaagctggaaggtagacgacaaaaaaggctctgcggaattaatggaagatgtcatcgaaggaaaactcgattacaccattgctgattctgtcgccatcagcctgtttcagcgcgttcacccggagctcgccgtagcgctcgatatcaccgatgaacaaccggtgacttggtttagcccgttagatggcgataataccctttccgccgccctgctcgacttcttcaacgaaatgaatgaagacggtacgctggcacgcattgaagagaaatacctggggcatggcgatgattttgattacgtcgatacgcgcacatttttacgcgccgtcgatgcggtactgccgcagttaaagcccctgtttgagaaatacgccgaagaaattgactggcgtttgctggccgctattgcttatcaggaatcgcactgggatgcacaggccacttcaccgacgggtgtgcgcggcatgatgatgttaaccaaaaataccgcgcaaagcctcggcattacggatcgtaccgatgccgaacagagcatcagcggtggcgtgcgttatttgcaggatatgatgagtaaagtgccggaaagtgtgccggagaacgagcggatctggtttgccctcgctgcgtacaatatgggctatgcgcatatgctggatgcccgcgccctgacggcaaaaaccaaagggaatcctgacagttgggctgacgtaaaacagcgtctgcctttacttagccagaaaccctattacagcaagctgacttacggctacgctcgtggacatgaagcctacgcttatgtcgaaaatattcgtaagtatcagattagcctggtgggttatctgcaagagaaagagaagcaggctacagaagcggcgatgcaactggcgcaggattatccggcggtatcgcctacggagttgggcaaagagaaatttccttttctctcgtttctttcccagtcgtcatcaaactatttgacccattctccctctctgctgttttccaggaaagggagtgaagagaaacaaaattaatccgtcgaggattgcgcttttttctgcgctttaatttcctggcggcgcatgcgaaagaagtcactgagcaacgccgcgcactcatccgccagtattccttccgtaatttccactcggtgattcatacccggatgatgcagcacatccattaaagatcccgcagcgccagttttcgcgtcacgcgcaccaaagaccacgcgaccaatgcgactgtggatcatcgctccggcacacattacacatggttcaagcgtgacatacaacgtggcgtcgatcagacgataattttgcatcaccagaccaccctgccgcagggccatgatttctgcatgtgcggtgggatcatggcgaccaatcgggcggttccagccttcgccgattacccgattgttatgcactaataccgcgccgaccggcacttcccgctcatcccaggcacgtttcgccagcgtcagcgcgtgacgcatccagtattcgtggctaaattcgacttcagacaaaaagaaaactccggttataaaagcgcggcgcattatacacggacgctatgctttactctattccagttgctggagttcaccgcgcggggttactcgccaacgatgctgacagaaataaagcagcggattgtcctgattactgtcgctatagccactgtacagccgcagcggagtgccgattttgcgctccagttgtgcgaccttttcatgtcccagacaacgcatcgtcaatacccaaccaccatagccacgttgaatttggctggcgataagattaacccgcggcagccagggcgtatcgaaataaaccgcttcaaccagcggctgcggagagccggtaatcaaccagatatcagcatcgaaacttaacaggtaggtggttaatcgctcctgaaccagcggaaaggcggtaacattgtcgcgaaaccagcgcacgaaatcggcctgcaacgtctgtaaacgtgcttcgctgtgaccaaaagtgcacccccacagaagcagactcatcggccagcgtgccgcacgaccttttatcaataacgcaatggctataatcggtaacaacggcaggacaagtaacgcattcagcggttggcgacgcagtaaatagcgcagaaaactgccgaacatatcctgctgatgcaatgttccatctaagtcaaaaaacaccacacgacgctcgtgagttgccaaaccatactcctctggactgaaacatcctgattaattttcgctactacatagcctaacagatagatcatcacttttccggcaacaatcgaccgcatcatggctaactggaatttttaattcatggcaattagcggcaatggaatataaaattcactcgcgtgtctctcatattgcctgttgtcgccactatttcatcgcgaggaaagatatgaacggcttacttcgtatccgtcagcgttaccaggggcttgcccagagtgataaaaaactggcggattatctgctgctacaacctgatacggcgcgccatttaagctctcagcaactggccaacgaagccggagtcagtcagtccagcgtcgtgaagttcgcgcaaaaactcggctataaaggttttccggcgcttaagttggcgttgagtgaagcgctggcaagccagccggaatcgccctccgtgcccattcataaccaaatccgcggtgatgatccgttacggctggtcggcgaaaaactgattaaagaaaatactgccgctatgtacgcaacgctaaacgttaatagtgaagagaaactgcatgaatgcgtaacaatgttgcgctctgcgcggcggataattctgaccggtattggcgcttcgggtctggtggcgcaaaactttgcctggaagctgatgaagattggcttcaatgctgccgcagtgcgcgatatgcatgcgctactcgcaacagtacaggcgtcgtcccctgacgatctgttattagccatttcctacaccggtgtacgacgcgagttaaacctggcggcagatgagatgctgcgagtgggcggaaaagtgctggcgattaccggctttactccgaatgccctgcaacagcgtgcttctcattgcctgtataccattgccgaagaacaagcgacaaacagcgcttcaatctctgcttgtcacgctcagggaatgttaacggatttgctgttcattgcgctgattcagcaggatctggaactggcaccagaacgtattcgtcatagtgaagcgctggtgaaaaaactggtctgagtaaagaatgcgcgtataatgcccgcccggtttgtgttgttttgagagtttccttatggcgttgttaatcactaaaaaatgcatcaattgtgatatgtgtgaacccgaatgcccgaatgaggcgatttcaatgggagatcatatctacgagattaacagcgataagtgtaccgaatgcgtagggcactacgagacaccaacctgccagaaggtgtgcccgatccccaatactattgtgaaagatccggcgcatgtcgagacagaagaacagttgtgggataaatttgtgctgatgcaccacgcggataaaatttaatattctactctggaagtagagtattaattatattactgggaagccttaacgccattatatttatttaattgatgacattagcataatcattcactaagttaatttatatagtatctgccaagacacttatttatagttattaaaggcgcgtccgattggttcaccggacgcaccttaagtacgtttccttgtgttataagaacagaaggatcagctgtaaaacagcaatgatgattttgatgacccgtttaatcaggtatcggcaatcagtcattcgtttttccttaaacaaggaatgcagccgttcagattagcccttacatctccccaaaactgaacgtgcgagttattgagggtgcatgctgcactccacaccagagctttgacgacaccactcgtttcaatgggggaattctgtggcatggtgtaaagcacagcaaaatcttcaataacgaagccaattttaatgtacttacgaattggcggtcacgttaatctttccatcaatattgctttcttcgtaaaggctcgagtttttatgctaaagattgcaagttgcttgtaaaagataagtacactgatccataatcgctgttgttgagggtgcatgctgcacaaaattaaagttaaaaagtaaaacccccgttccttaccagttcgggggttttactttttaaagagaacggtattattttaactttcaataattaccgtggcacaagcatagtggcgttcatctgccagcgttacatgcatatttacaacgccgagcttttccgccagttttaatgcctcaccccatagccgtagccgtggtttgccgagctcatcattgaatacttcaaattgattaaacgccagaccattgcggatcccggtgccaaacgcttttgctgcggcttctttcacagcaaaacgcttcgccagaaaacgcaccggctggtggtgcgttttccagattgcccattcgttatcgcttaatacgcggcgtgccaggcgctcaccggatcgggcgatcactgcttctatgcgagcgatctctacgatatccgtgcctaaacctaatattgccattagccacgcgcttccagcatcagacgcttcatttctgccaccgcatctttcagtccggtcatcactgcacgaccaataatggcatgaccgatattcagttcatgcatctcagggatggcggcaatagctttcacgttgtgataggtcagaccgtgaccagcgttaactttcagaccgagactagcggcaaaggtcgcggctttggcgatacgcgccagctcttgcgcctgttcggcgtcagttttggcatcagcatagcaaccggtgtggatctcgataaacggtgcgccaacctctgccgcagctttgatctgctcttcatcggcgtcgataaagagagaaacctggatcccggcatctgccagacgtttgcaggcatcgcgcattttgtcacgctgccctgcgacgtccaggccgccttcggttgttacttcctgacgcttttccggtaccagacagcaaaaatgtggcttcgtctcaacggcgatcgccagcatctcttcggtcaccgccatctccagattcatgcgggtatccagcgtctgacgcaggatgcgcacatcacggtcagtaatgtggcggcgatcttcacgtaaatgcacggtaatgccgtccgctcccgcctgctcagcaataaacgccgcctgcaccggatccgggtaagcagtaccgcgtgcgttacgcagcgttgcaatatggtcaatgttgacgcctaacagtaattcagccatgacaatcctcatcattcataatgtgttttcaccgttcgcttaggcataaactgccggaacagttccctgctctttaatggtttaccgccaagatacggcttaagcgccatgcgggtaaagcgtttcgcggcgcgtagtgtgtctgcgtcaggaaattcccgcgcgtttaacgcttttaactgccttccggtgaacgttttattgtcgataacgacgcttgcgataaaccctttttcttcgcgataacgatacgtcatggtgtcatctaccggctcgccgctacccgcacaatgggtaaaattgacgccatagcccagatgcccgagcagtgccaattcaaagcggcgcagcgcgggttctggcgtaccagtggcacctgcaagagactgaatgcagtgcaagtaatcgaaaaagagttcagagaagcgcgtctcgtattccagtacgcgggagagaagttcgttgatgtacagaccgctgtaaagcgtgataccgcttaatggcagcgccagcgagacagcttcagcactgcgcagcgttttgacttcgccacgcccgccgaaacgtagcaagagaggggtgaaaggctgtaatgcacctttcagagtagagcgtttagagcgtgcgcctttggcaaccagacgcacgcgacccgattcctccgtgaagacgtccagcatcaggctggtttcgctccacgggcgactatgcaggacaaatgcgcgctgccagccttccatcggagtgactcttaaagatcgtcaacgtaaccgagactgcgcagtgcgcgttcgtcgtcggcccaaccggatttcacttttacccacagttcaaggtggacaggcgcttcgaacatttcctgcatgtctttacgcgcttcaatcccgatggttttgatcttggcccctttgttgccaataaccatcttcttctgcccttcacgctcaacgagaatcaaaccattgatgtcataaccaccgcgttcgttagagacgaaacgttcgatctccacggtcacggagtacggcagttcagcgccgaggaaacgcatcagtttttcgcggatgatttcagacgccataaaacgctgtgagcgatcggtgatgtaatcttccgggaagtgatgggtcgcttcagggaggtgcttacgcacgattgctgcgatagtgtcgacattcagcccggtttcagcagagatcggcacgatatcgaggaagttcatctgacttgccaggaactgtaagtgcggcagcagatcggctttttcctgcacgttatccactttgttcaccgcgaggatcaccggcgctttgccatcgcgcagtttgttgagcaccatttcgtcgtccggcgtccagcgggtgccttcaacgacaaaaatcaccagctcaacgtcgccaatagagctgctcgccgctttgttcatcaggcggttaatagcgcgtttttcttccatatgcaggccaggggtatcaacgtagatcgcctgatacgcgccttcagtatggatccccacaatgcggtgacgagttgtttgcgctttgcgggaggtgatggagatcttctgccccagcagtttgttcaacaatgtggatttgccaacgttcggacgtccgacgatggcaataaatccgcagtaacttttatcgatgctcattccagctccagttttttcaacgcctgttcggcggcagcctgctcagccttacgacggcttgaacctgtgccaaccaccggttcactcaggccgctgacctggcagtggatagtaaattcctgatcgtgcgcttcgccacgtacctggactaccagataagtcggcagcggcagatggcgaccctgcaaatattcttgcaagcgcgttttcggatctttttgtttatcgcctgggctaatttcgtccaaacgagtttgataccagttgaggattaatttctcgacggtttgaatatcactgtcgaggaatacgccaccaattaatgcttcgacggtgtcggcgagaattgactcacgacgaaatccaccgcttttaagttcacctggccctaaacgtaagcactcgcctaactcaaattcgcgcgccagttccgccagcgtattgccacggaccagcgtggcgcgcatccggctcatatcgccttcatccacacgagggaaacggtgataaagcgcattggcgataacgtagctcagaatagagtcgcctaaaaattctaaacgctcgttatgtttactgctggcactacgatgagttaatgcctgctgcaacagttcctgatgattaaaagtgtagcccagcttccgttgaagccgattaattacgatggggttcatgcgataccaataaataaatgcgtcaacaattcagcacacgaaacagacctgatatacatggctctgctaactgcttcgctgcagtttcagtttaccggtatatggggaccaacgctgtttcgtgtgccgtggcaacctggaggtgccaaccttaaacttcgggggaatattctatacacaacgacgggggatgtcgttagccacgggagatttatctcataaataattcacgttgtcgccataacggcgacaacgtgaacgaagatgagctattaatggatgccgccaatgcgacttaagcgcacaccagtcggccattcgccttcttgcttatcgaagctcatccagatagccgttgcccgaccgaccagattcgcttcaggcacaaacccccaataacggctgtccgcgctgttgtcgcggttgtcgcccatcatgaagtattgtcccggaggaacaatccaggttgccagttgttgccctggctgctggtaatacatccccacctgatcctgcgcaatcggcactgtcagaattcggtgcgtcacatcacccagtgtctctttacgctcggaaagacgaattccattttctttggtttcgtttttcggcacttcaaagaatccgctggtcgcttccccaccattacggcgtgagaaggtctgaacgaaatcgctcggttccacgtttgagtaggtgaccggcagcgcgttttcacacgcctggccggaactgcatcccggttgaatcgtcagctctttcgagaccggatcataagtaactttatcgcccggtaaacccaccgcgcgcttgatgtaatcaagctttggatcttccggatatttaaagaccacgatatctccgcgtttcggatgaccggtttcgatcagcgttttctggtagataggatctttaatgccataagcaaacttttctaccagaataaaatcaccgattaacagagtcggcatcatcgaacctgacgggatctggaacggttcataaataaacgaacgcacaatcaatacgatagccagtaccggaaaaacagaagcaccggtttccagccagccaggcttcggcgcaacctttttcaacgttgctttatccagtgagtcaccggcagccgcctgcgccgctgcctgacgttcccgccgtttaggtgcgaaaaagaatttatccacgcaccataaaatgcccgtcaccagtgtggcaatcaccagaatcagggcaaacatattcgccatgccaactcctaagggttatttgttgtctttgccgacgtgcagaatggcgaggaacgcttcctgcggcagctcgacgttaccgatctgcttcatgcgtttcttaccttctttctgcttctgcagcagctttttcttacggctgatatcgccgccataacatttagccagtacgtttttacgcagctgtttcacggtggatcgcgcaataatgtgcgtaccaatcgctgcctgaatggcgatatcaaactgctggcgtgggatcagatctttcatcttctccaccaactcgcgaccgcggttttgcgaattatcacggtgggtgatcagcgccaacgcatcaacacgttcaccgttgattaatacgtctacacgtaccatgtcggacgcctggaagcgtttgaagttgtaatccagagacgcataaccacgcgaggtagatttcaggcgatcgaagaagtcgagcaccacttccgccatcgggatctcgtacgtcagcgccacctgattaccgtggtaaaccatattggtctgcacgccgcgtttttctacgcacagcgtaataacgttgccgagatatgcctgcggcagcagcatgtgacattcggcaatcggctcgcgcagttcgtagatgttatttaccgctggcagcttggatggactgtcgacgtaaataacttctcttgacgtggtttcaacttcatacactacggtcggcgcagtggtgatcagatccagatcgtattcacgttccagacgttcctggatgatctccatgtgcagcaggccgaggaagccgcagcggaaaccaaagcccagcgcgctggagctttccggctcatagaacagtgaagcatcgttcaggctgagtttacccagcgcgtcacggaaggcttcatagtcgtcggaacttaccgggaacagaccggcgtatacctgcggtttgactttcttaaagccaggcagcgccttttctgccggattacgcgccagcgttaaggtatcgccgactggagcgccgtggatatctttaatcgcacataccagccagcctacttcgccacatttcagttcagtgcggtcaacctgtttcggcgtgaagatgcccagacggtcggcgttataggtctgcccggtactcatgactttcactttgtcgcccttacgcagggtgccgtttttaatacggataagtgaaacaacgcccaggtagttgtcgaaccatgagtcgataattagtgcctgcaacgggccttccggatcgccttccggcggcggaatgtcgcgcaccagacgttcgagaacgtcctgcacgccaacgccggttttcgctgaacagcgcaccgcgtcggtggcgtcgatgccgacgatatcttcaatttcttccgccacgcgttcaggatcggctgccggcaggtcaatcttgttcagtaccggcaccacttcgagatccatttccatggcggtgtagcagtttgccagggtttgcgcttctacgccctgcccggcgtcgaccaccagcaatgcaccttcacaggcagccagcgaacgggaaacttcataggagaagtcaacgtggcccggggtgtcgataaagttcagctgataggtttcgccgtcagacgctttgtagtccagcgtcacgctttgcgctttgatggttatgccacgctcacgctcaagatccatggaatcgagaacctgcgcctccatttcacggtcagacaggccaccgcagatctggataatacggtcagacagcgtcgatttaccgtggtcaatgtgagctatgatcgaaaagttacgtatattcttcataaagtatgattattgtgccttaatgcccggttaaccaggcttttagaagtcgctgttctgagcttaacgtctgtattaatagaaacgccgcattctacactacaacattgaggcgaggaaatgttcataccgtatggattgtggtatctggaaacgtcctcgcatttgttatgcaaaatgcaacaaagccagtgaaatcactggctcgcgtcttccgaagatgtttcaaatcgcacaaggccaggcggcaatgccacgcttaagatgatcggttgccattctgcccgggcagcaaacttacgcgagtagccgcgcgcaatcaggaacccgccaataccgccgaggaccgcaccacataatgctgcgacgtcagaagcaaagagtagctgaaatagcgaagcgatgaggaataatcccaccagcggcgacatataaaccagtaatgcggagctaagcaggctgccttcggcgatccccaattccactttttgccccggcactaacggctcatcacagggtacgacaatggtatgcgtggtttgcgggccaagtttatttaacacgcggctaccgcaaccggcgcgtgaagcgcagctgctgcatgaagctttaacatcacaactgaccagcgcctgcccgttttgccaggagacgacggtagcccactctttgatcattgcgctgccccgaacttaatattctcggcaatgcgtttcgccgtttgcggcggcagttcaccgacaatggtgatttcggcgttatcacgtacgcttgtactgacggttctgcgtccggtgcgcaacatctgatcggtgctcgatggcgtagcgcggttaacgtttaccgagaagctgaataatccgtcggaatagagacgtgattcgataggcatgttgtccatcgtcggtagcggacgtcgactactggaaacttcgctaaaaccctgtggcaaccaggttggcgtccagctgaatttagctttttcacctacaggaacagaaagcaacggcggcaaatttgccttcgccagcgtctgcatactgctgctgatatcctgattgacgttaaaagcaatcacgcgaaattgttccagcgtttcaccatcgcgatcaaggagatcaacccgcatcggtaatttcgattcggtgtccatccacacgatgtagctgtagcgtgtaccatctcgggcaaccacgcgaatgacttcgcaaagacgatcagcaatacgcgtgcgcccgacggagataaagtcgtagtaaggagaaaggcgtttgaaatcggtatagataagcgatggcagagaatcaacaatgtaatcgccattaagcgtgaacggttcaagtcccggttcaaaatagctgatttcattgccgcgctgtaccacttcccggcgcgggccatccatttgcaacaattgtgcaagagggcggttatcgaggcgtgcatgtcgataacgcagagactcaacaccctgtttattgatgctgatgaatgacagctcgtaattcagtgactgactggccaggttcatctgctgtaataacgccccggacgcgggagtggccgaggcgttagcagagaataacaggctacctgtcactaatgacatggcaaaccaaagttgcttcattactgcgattgcgttcctaaagtttgaattcctggcacctgtacagcggcttgctgggtttgcgcctgctcaaactgaagctgttcagagtggagtcggcgttgcagttcgtaatcctgcaacattgcattaatgcgacgacgctgctcctgtacctgctgctgttgaccattgtttgcggtcgcttcagaaggtactcccaggcttaccgggctggctttacccatcatcggcagtgtattaaataccggcgtttcgggctgctgggacgtttcagattgtccattatagtgctggacgccaacgataactgcaagcgatacgcatgctgctacgcccatttgggtaagctgtgccgcccacggacgtactttctgccagaatggcattttctgccattgatgcggcgcaggctgggcttccgggatcaatgtcgccggttgacgtactggctcttcttcaatggcggccatcacgcgtgaagagatatcgaaatggagcacctcgggagtatcaccccgcattgagtcacggattaagtgatagctttcccaggttttctgcatttctgggttatgagccagttcgttaagcagctcactatccagcgtttcgccatccattaaagcggaaagttgttctttctgcatgcctaatacccttatccagtatcccgctatcgtcaacgcctgataagcggttgaactttgttatcaatagcttccctcgctcggaagatacgtgaacgcaccgtacctaccggacaatccatgatagcggctatctcttcatagctcaggccatccagctcccgcaaggttattgccatgcgcaaatcttccgggagggactcaatagttcggaaaactatctgtctcagttcttctgacaacattaagttctcagggttcgaaatttctttcaacgcgccgccactttcgaagttttcagcttcaatggcatccacatcactggaaggtggacgacgcccctgagcaaccaggtaatttttcgctgtatttacagcaatccgatacagccatgtataaaaagcgctatctccccggaacgaatccagcgcacgataggctttaataaaagcttcttgtaccacatcgggaacatcacccgacggcacatagcgggaaaccagactcgccactttatgctgatagcgcactaccagtaggttaaaggctttctgatctcccttctggacccgttcaaccaggacctggtccgttaactgctcgctcatccgaggtaaagtctccccaaaccaaatttccacgcgctatcgaaacgccactccattagctgcaatttgagcaagcaaagggttagagtgtctcgtttttgtaaagttccgtaacgcatctgtttttgtttgtcatgctgtagacggatcattatctatcattataagtctacagaatctgaacatcgcattatctgtgtagaaatgcccatttaactgcctgaagagtaacccaacggcctttttatttcaccacctaatcctccaccagccagtaacttctctttttctcgccgccctgcgtcagcgtgtttagccactgtaacaaatattaaaatagcaggtgtttattcgcacaacatgatgctatgctgaccaaacagtgtttagtaaattaaacaaagaaaatgaatactctcccagaacattcatgtgacgtgttgattatcggtagcggcgcagccggactttcactggcgctacgcctggctgaccagcatcaggtcatcgttctaagtaaaggcccggtaacggaaggttcaacattttatgcccagggcggtattgccgccgtgtttgatgaaactgacagcattgactcgcatgtggaagacacattgattgccggggctggtatttgcgatcgccatgcagttgaatttgtcgccagcaatgcacgatcctgtgtgcaatggttaattgaccaaggggttttgtttgatacccacgttcaaccgaatggcgaagaaagctaccatctgacccgtgaaggtggacatagtcaccgtcgtattcttcatgccgccgacgccaccggtagagaagtacaatccacgctggtgagcaaggcgcagaaccatccgaatattcgtgtgctggagcgcagcaacgcggttgatctgattgtctctgacaaaattggcctgccgggcacgcgacgggttgtaggcgcgtgggtatggaaccgaaataaagaaacggtggaaacctgccacgcaaaagcagtggtactggcaaccggcggtgcgtcgaaggtgtatcagtacaccaccaatccggatatttcttctggcgatggcattgctatggcgtggcgcgcgggctgtcgggttgccaatctcgaatttaatcagttccaccctaccgcactgtatcacccacaggcacgcaatttcctgttaacggaagcactgcgcggcgaaggcgcttatctcaagcgcccggatggcacgcgttttatgcccgattttgatgagcgcggcgaactggccccgcgcgatattgtcgcccgcgccattgaccatgaaatgaaacgcctcggcgcagattgtatgttcctcgacatcagccataagcccgccgattttattcgccagcatttcccgatgatttatgaaaaattgctcgggctggggattgatctcacacaagaaccgataccgattgtgcctgctgcacactatacctgcggtggtgtaatggttgatgatcatgggcgtacggacgtcgagggcttgtatgccattggcgaggtgagttataccggcttacacggcgctaaccgcatggcctcgaattcattgctggagtgtctggtctatggctggtcggcggcagaagatatcaccagacgtatgccttatgcccacggcgtcagtacgttaccgccgtgggatgaaagccgcgttgagaaccctgacgaacgggtagtaattcagcataactggcacgagctacggctgtttatgtgggattacgttggcattgtgcgcacaacgaagcgcctggaacgcgccctgcggcggataaccatgctccaacaagaaatagacgaatattacgcccatttccgcgtctcaaataatttgctggagctgcgtaatctggtgcaggttgcggaattgattgttcgctgtgcgatgatgcgcaaggagagtcgtggcctgcatttcacgctggattatccggaactgctcacccattccggtccgtcgatcctttcccccggcaatcattacataaacagataaaaagcctgggtcagcgccgtatacgcttcggaatagttctggtctggcccacgaatgactaagcgatcgctaaagcattctcccgcctgcggggagaatgccagcagcacccgatgcggcagtcgcgcttcgttttccgccacatccgtccgcaaacgtaaatgccagcccatgcttaatgccagctccgtaaaaccattaccaatctgctctggcagcactacgcagaaaaatccctcttcggtaatgcactccgccgcacaggtcagcagcgatgggtgatcaagcgtagtggtatagcgagcctgttcccgttgaggggtcgcgcactctactccctgctgatagtaaggtgggttactgatgattaaatcgaagcgtactgtctgctgtgtgatccactgctgaatatccgccgtatggacgttaatccgctctgcccacggggactggttgatattttcctgcgcctgcgcggcagcttcactttccagctcaacggcatcaattatcacgctgtcatcggttcgctgcgccagcattaatgccagcaacccgctacccgcgccgatatcaaggcaacgtttcaccccagccaccggtgcccatgcgcccagcaaaatgccatccgttcccactttcatcgcacagcgatcgtgagcaacaaaaaactgtttaaaagtaaatccattacgacgaagcacggatgtagactgtgacatgaaaataaaaccttgcaggaaaaacggcgatagcaccgggtgagaacaatacccgagaagcgatatccatacaaacagatgaagattgcagccgtaacgtctataatcagcgccccacacagaggtagaacatgactgtaacgactttttccgaacttgaactcgacgaaagcctgctggaagccctccaggataaaggtttcactcgcccgaccgccattcaggctgccgccattccgcctgcgctcgatggccgtgatgtactcggttctgcgccgacaggcaccggtaaaacggcggcgtatctgctgccagcgttgcagcacctgctcgatttcccgcgtaagaaatccggtccgccgcgtattttgatcctcaccccaactcgcgagctggcgatgcaggtggccgatcatgcccgcgaactggcgaaacatacgcatctggatatcgccaccatcaccggcggcgtagcctatatgaaccacgcggaagtgttcagcgaaaatcaggacatcgtggtcgccacgaccggacgtctgctgcaatacataaaagaagagaacttcgattgccgcgcggttgaaacgctgatcctcgacgaagcagaccgtatgctggatatgggctttgctcaggatatcgaacatattgctggcgaaactcgctggcgtaaacagaccctgctcttttcggcaacgctggaaggcgatgcgattcaggactttgccgagcgtctgctggaggatccggtggaagtttctgcgaatccgtccacccgtgagcgcaaaaaaattcatcagtggtattaccgcgccgatgatcttgagcataaaaccgcgttgctggtgcatctgttaaaacagcctgaagcgacccgctcaattgtgtttgtgcgtaagcgtgaacgtgtgcatgagctggcaaactggctgcgcgaagcgggcatcaacaactgctatctcgaaggtgagatggtacaaggcaagcgtaacgaagcgatcaagcgtttgaccgaaggtcgcgtaaacgtactggttgcaaccgatgttgccgcgcgcggtatcgacattcctgacgtcagccacgtctttaacttcgatatgccgcgcagtggcgatacttatttgcaccgtatcggacgtaccgcgcgcgccggtcgtaaaggcaccgcgatttcgctggtggaagcccatgaccatttgctgctgggcaaggttggccgttacattgaagagccgattaaagctcgcgttattgatgagttacgcccgaaaacgcgtgcgccaagcgagaagcagaccggcaagccatcgaagaaagtactggcaaaacgcgccgagaagaaaaaagctaaagagaaagagaaaccgcgtgtgaaaaaacgccatcgcgacaccaaaaatattggtaagcgccgtaaaccaagcggaacgggcgtgccaccgcaaacgacagaagagtaatctcaatgccgggtttaagcctggtattaaaagtgctggcaaacgcaaaactgcctgatgcgctacgcttatcaggcctacgtggctcatgcaatatattgaatttgcacgatcttgtaggccggataaggcgttcacgccgcatccggcatgaataaagcgcactttgtcgacaagttaaatgccgggtttaatcccgacattatttttatccagccacaaaactctcttcaacacactgaataaaagtgtgcatcgccgggctaaccgcttttccagcatggtgtgcgcacatggccgtaatggtctgcgactgttcgccaaaaggcaattcaattaattctccgctctcaagctctttttccaccgcaaagcggggcaagtaactgacaccgatattcgccgcgacacaacgtttgatactttcaatgcttaacagctcaatggtgttttccaccgtgatccgccgctggcgcagcgtgctctcaaatatctgccggaagacacattgtggttcgttgataataaagctacaggcgttatgtcttcccggctcagtaaaatcgatatctgcaatttgcggtgaagccaccagcaccagcggttgttcacccaactctcgtcggttcagaacatcatcattccctacgcgataaaaaaccccgacatcggcctcatcattcagtagcgcatcacggatcacgtaacagttcagcgactgcaacgataaacgcacttttggagcgcgttgccgaaaacgctgcaacacctgcggcattcggtaagagagcaacgtttcgcctgaaacaacgcgtagttccccgtccggatccgactcttttttcgcagcctcacgaagcgtatccatcactcgggtaagttcatagatgtgcggcagcaacttttttccttcgcgggtaaggcacattcgtcgaccaattttctcaaacaattgtaccgagaactcctgctcaagctgctgaatatgaaaagtcaccgtcgattgtgtacagcacaatttttgcgaagctcgcaaaaaggaaccctcttccaccacggttttaagtgtaataaaacggcgcagatccataaccccaaacctatcgaaaatatcgaatttagaatgtaaaaacattcatttttttaaatgttccgtgtcgggtactgtctaccaaaacagaggagataacaagtgacaccgacccttttaagtgctttttggacttacaccctgattaccgccatgacgccaggaccgaacaatattctcgcccttagctctgctacgtcgcatggatttcgtcaaagtacccgcgtgctggcagggatgagtctgggatttttgattgtgatgttactgtgtgcgggcatttcattttcactggcagtgattgacccggcagcggtacaccttttgagttgggcgggggcggcatatattgtctggctggcgtggaaaatcgccaccagcccaacaaaggaagacggacttcaggcaaaaccaatcagcttttgggccagctttgctttgcagtttgtgaacgtcaaaatcattttgtacggtgttacggcactgtcgacgtttgttctgccgcaaacacaggcgctaagctgggtagttggcgtcagcgttttgctggcgatgattgggacgtttggtaatgtgtgctgggcgctggcggggcatctgtttcagcgattgtttcgccagtatggtcgccagttaaatatcgtgctcgcgctgctgctgatctattgcgcggtacgcattttctattaattaaaaaagcggaagaggtcgccctcttccgcttagtaacttgctacttaagccttacaggctttcagtaaaggtacgagcgataacgtcgcgctgctgttccggagtcagagagttaaagcgaactgcataacctgatacacggatggtcagctgcggatatttttccggatgcttaactgcatcttccagagtttcacgacgcagaacgttaacgttcaggtgttgaccaccttcaacgcgaacttctggtttcacttctactggaacttcacggtattcaatgtcacccagtttgcttactgcaaccacttcatcttctgcataacctgcttttgcaacgatgcaacgcgcttcgcctttttcgctgtccagcagccagaaagagttcagcagatcgtcgttagcggctttagtaatctggatacctgtaatcatgtgatgcctccccggcaaaattatttgatttattcagcctgtcgcggccaattggtaaaaccattgttgcttgagtgtatatatactcctcaacaacccttgattccttgatttaaatcaataaaaaccacacatcgattgtggtcgtaaatggattttattgttttacatcaacttatgcgggtgtgaaattttaccaatttacatttttttgcactcgtttaagtctaaaaaatgagcatgattttgttctgtagaaagaagcagttaagctaggcggattgaagattcgcaggagagcgagatggctaacgaattaacctggcatgacgtgctggctgaagagaagcaacaaccttattttcttaatacccttcagaccgtcgccagcgagcggcagtccggcgtcactatctatccaccacaaaaagatgtctttaacgcgttccgctttaccgagttgggtgacgttaaagtggtgattctcggccaggatccttatcacggaccgggacaggcgcatggtctggcattttccgttcgtcccggcattgccattcctccgtcattattgaatatgtataaagagctggaaaatactattccgggcttcacccgccctaatcatggctatctcgaaagctgggcgcgtcagggcgttctgctgctcaatactgtgttgacggttcgcgcaggtcaggcgcattcccacgccagcctcggttgggagacgtttactgataaagtcatcagcctgattaaccagcaccgcgaaggcgtggtgtttttgttgtggggatcacatgcgcaaaagaaaggggcgattatagataagcaacgccatcatgtactgaaagcaccgcatccgtcgccgctttcggcgcatcgtggattctttggctgcaaccattttgtgctggcaaatcagtggctggaacaacgtggcgagacgccgattgactggatgccagtattaccggcagagagtgagtaaatttgcggggaaatgccggatggcagagttgccacccggctgatttatcaggctttattctgacgccaccattcaccaagcaaaacgccggttgcgacagagatattcagcccggcaacgttgcccgtaccgtcaatcttcacgcgcagatcgttcggatcgcgtgcggcatccggtaacccttcatattcctgacccagcaccagtaccattttcgctggcagactggttttgaacagcggtttaccctgctcgctggaagtggtcactacggtgtaacctgcctgacggaaatcatccagcacgttaacaatgttgtcgccagtaatcggctgaacgtgctctgcgccgccttctgcggtacggatagccgcccccgactccagcagtgccgcatcctgcaccacaacgcctttcacgccgaagtgcgcgcagctgcgcatcatgccacccaggttatgcgggttagattcgttttccagcgccagtacacaatcctgcgcgcctgcctggcttacccactgctgcacggttgtaccgttacgctttttgatcaagaagcaaacgccgccgtgatgttccgtgcctgacgcttttgtcaattccgcttcatccaccacatggtacgctttgcggtttgccgccatccagcgcaaggcttctttaaaacgtggcgttacgctctggataaaccaggcgcgaacaatcgcttccggacggctctggaacagtgcctgacatgcattttcgccgtagacgcgggtttcttccgcacgctgacgacgcaaaacttctggatcaatataacttttaccactgatgccaccgtgatcggccttttccggcgtctcatcacccggcgcgcgggaaaccgtgcgccacggcgaatcttcccacttgcggtcacggggctgactctgtttgtcatcgcgggcggggcgacggccaccgtcagcacgagattttcctggacgcccgccccctttcccggtacgcgggttgtgggtacgtttatcagaatcatcatcactgcggacatacatcactttgaccttgccgcttttacctttcatttcatcgttcatgcttttctccaccagcgctgcgcgaagcgcgcagattacccgaagtccgcgcggttcgccatgatttcgtaccaaagcctgcgactatcatacctattgaataaaacagattgttgtctggaacaatgtccccgataatatgtaacatattagaaacataccggcgtcgttgccgataagtctccttactcatcccgaggttagttatgaataccgtttgtacccattgtcaggccatcaatcgcattcccgacgatcggatcgaagatgcggcaaaatgcggacgctgcggtcacgacttgtttgacggagaggtgattaatgcgaccggtgaaacactcgacaaattgctgaaggatgatctacctgtggtgatcgacttctgggcaccgtggtgcggcccctgccgtaatttcgcaccaatttttgaagatgtcgcgcaagagcgtagcggtaaagtgcgctttgtgaaagtgaataccgaagctgaacgtgaattgagcagtcgctttggaattcgtagtataccgacgatcatgattttcaaaaacggtcaggttgtcgacatgcttaatggcgcagtaccgaaagcgccgttcgatagctggctgaacgaatctctttaatcttaccggggcgcatcttgtgccccgttttctcctctgcgacaatggcgttttttcgacgctctcttatgaccgaaaacgctgttctccagttacgcgccgagcgtattgcgcgcgcaacacgtccttttcttgcccgcggtaatcgcgttcgtcgctgccaacgctgtcttttgccagagaaattatgtctctgttcgacaattaccccagcacaagcaaaaagtcgcttctgtttgctgatgttcgacaccgagccaatgaagcccagtaataccgggcgtctgattgctgatattttgcctgataccgttgcgtttcaatggtcgcgtaccgaaccctcgcaggatttgctggatctggtacaaaacccggattatcagccaatggtggtctttcccgcctcgtatgctgatgagcaacgggaagtgatcttcacaccacctgccggtaagccaccgctgtttatcatgctcgatggtacctggccggaagctcgcaagatgtttcgtaaaagtccgtatctggataatcttcccgtcatttccgtcgatctttcccggctttctgcctatcgcctgcgtgaagcccaggctgcaggccaatattgtactgccgaggtagccatcgcactgttagatatggccggcgataccggggcggcagcagggttaggcgagcattttacccgctttaaaacacgctatctggcaggaaaaacgcaacatctgggtagcatcacagcagaacagttagaaagcgtttaaaatcattcggtcacttctgcgggagaccggtatgagtcagcgaggactggaagcactactgcgaccaaaatcgatagcggtaattggcgcgtcgatgaaacccaatcgcgcaggttacctgatgatgcgtaacctgctggcgggaggctttaacggaccggtactcccggtgacgccagcctggaaagcggtgttgggtgtgttggcctggccggatattgccagcttgccctttacacccgaccttgcggttttatgtaccaatgccagccgtaatcttgctcttctggaagagctcggcgagaaaggctgtaaaacctgcattattctttccgccccggcatcgcaacacgaagatctccgcgcctgcgccctgcgccataacatgcgcctgcttggaccaaacagtctgggtttactggctccctggcaaggtctgaatgccagcttttcgcctgtgccgattaaacgcggcaagctggcgtttatttcacaatcggcagccgtctccaacaccatcctcgactgggcgcaacagcgtgagatgggcttttcctactttattgcgctcggcgacagcctggatatcgacgttgatgaattgctcgactatctggcgcgcgacagtaaaaccagcgccatcctgctctatctcgaacagttaagcgacgcgcgacgctttgtttcggcagcccgtagtgcctcgcgtaataaaccgattctggtgattaaaagcggacgtagcccggcggcacagcgactgctcaacacgacggcaggaatggacccggcatgggatgcggctattcagcgtgccggtttgttgcgggtacaggatacccacgaactgttttcggcggtggaaacccttagccatatgcgcccgctgcgtggcgaccggttgatgattatcagcaacggtgctgcgcctgccgcgctggcgctggatgccttatggtcacgcaatggcaagctggcaacgctaagcgaagaaacctgccagaaattgcgcgatgcattgccagaacatgtggcagtctctaaccctctcgatctgcgcgatgacgccagcagcgagcattatgtcaaaacgctggacattctgctccacagccaggattttgatgcgctgatggttattcattcgcccagcgccgctgctcccgcaacagaaagcgcgcaagtattaattgaagcggtaaagcatcatccccgcagcaaatatgtctctttgctgacgaactggtgcggcgagcactcctcgcaagaggcacgacgtttattcagcgaagccgggctgccgacctaccgtaccccggaaggaaccatcactgcttttatgcatatggtggagtaccggcgtaatcagaagcaactacgcgaaacgccggcgttgcccagcaatctgacttccaataccgcagaagcgcatcttctgttgcaacaggcgattgccgaaggggctacgtcgctcgatacccatgaagttcagcccatcctgcaagcgtatggcatgaacacgctccctacctggattgccagcgatagcaccgaagcggtgcatattgccgaacagattggttatccggtggcgctgaaattgcgttcgccggatattccacataaatcggaagttcagggcgtcatgctttacctgcgtacagccaatgaagtccagcaagcggcgaacgctattttcgatcgcgtaaaaatggcctggccacaggcgcgggtccacggcctgttggtgcaaagtatggctaaccgtgctggcgctcaggagttgcgggttgtggttgagcacgatccggttttcgggccgttgatcatgctgggtgaaggcggtgtggagtggcgtcctgaagatcaagccgtcgtcgcactgccgccgctgaacatgaacctggcccgctatctggttattcaggggatcaaaagtaaaaagattcgtgcgcgcagtgcgctacgcccattggatgttgcaggcttgagccagcttctggtgcaggtttccaacttgattgtcgattgcccggaaattcagcgtctggatattcatcctttgctggcttctggcagtgaatttaccgcgctggatgtcacgctggatatctcgccgtttgaaggcgataacgagagtcggctggcagtgcgcccttatccgcatcagctggaagaatgggtagaattgaaaaacggtgaacgctgcttgttccgcccgattttgccagaagatgagccacaacttcagcaattcatttcgcgagtcaccaaagaagatctttattaccgctactttagcgagatcaacgaatttacccatgaagatttagccaacatgacacagatcgactacgatcgggaaatggcgtttgtagcggtacgacgtattgatcaaacggaagagatcctcggcgtcacgcgtgcgatttccgatcctgataacatcgatgccgaatttgctgtgctggttcgctcggatctcaaagggttaggcttaggtcgacgcttaatggaaaagttgattacctatacgcgagatcacggactacaacgtctgaatggtattacgatgccaaacaatcgtggcatggtggcgctagcccgcaagctcgggtttaacgttgatatccagctcgaagaggggatcgttgggcttacgctaaatcttgcccaacgcgaggaatcatgagtaaggtactggaaatgttgaccacttaatcgggactggtgttattattgcccgcttatgtcgtctgcattgcacagaggacccttcaatgaacagagaagaaatgcactgtgatgttgtcaaaatttaagcgtaataaacatcaacaacaccttgcccaactacccaagatttctcaatcagttgatgatgtcgatttcttttacgctcccgccgacttccgggagacgctgctggaaaaaatagccagcgcgaagcagcgcatttgcattgtcgccctgtatctcgaacaggatgacggtggcaaaggcattctgaacgcgttgtatgaagctaaaaggcagcgtccggaactggatgtgcgggtgctggtcgactggcatcgtgcacaacgtggacgcattggcgctgcggcatctaacactaacgctgactggtactgccgcatggcgcaggaaaatccgggcgtagatgttccggtttatggcgttccaatcaatacccgtgaagcccttggtgttctgcactttaaaggctttatcatcgacgatagcgtactttatagcggtgccagcctgaacgatgtttacctgcatcagcacgataaatatcgctacgaccgttatcatctgatccgtaaccgtaagatgtcagacattatgtttgaatgggttacacagaatattatgaatggccgcggcgttaatcgtctggatgatgttaatcggccaaaaagcccggaaatcaagaacgatattcgtctgttccgccaggagctgcgtgatgccgcttatcatttccagggcgatgccgacaacgatcagctttccgtaacgccgctagtggggctggggaaatcgagtctgttgaacaagaccattttccatcttatgccttgtgccgagcagaaactaaccatctgtacgccatacttcaacctgccagcaatccttgtgcgcaatattatccagttgctgcgcgaagggaaaaaggtcgaaattattgttggtgataaaaccgcgaacgacttctacattccggaagatgaacctttcaagataattggcgcattgccttatctctatgagatcaatctgcgtcgtttcctgagccgtttgcagtattacgtcaatactgaccagctagtggttcggttatggaaagatgacgacaacacctatcacctaaaagggatgtgggttgatgataagtggatgttgatcaccggtaataacctgaacccgcgcgcctggcgtctggatctggaaaacgccattttgatccacgatccacaactggagcttgcgccgcagcgggagaaagaactggagctgatccgcgagcataccaccatcgttaagcactatcgcgatctgcaaagtattgccgattatccggtgaaggttcgtaaactcatccgccgtttgcgccgtatccgcatcgaccgattaattagccgcatcctgtaatcacaaccccgtcctgtacggggtttgttttttggaggccacgttttgcgtattctttttgtctgttcgctattgttactttctggatgcagccatatggctaacgatagctggagcgggcaggataaagctcaacactttatcgcctcggcgatgctttccgccgccggaaatgaatattcacagcatcaggggatgagccgggatcgcagtgccatgtttggattgatgttctctgtcagtttggggcgtcaaaagagctttgggatagccgccccgaagggagcggctggagctggaaggatttggcctgggatgtcgccggtgcaagcaccggctataccgtctggcaactgacccgtcactaaagacgcatccccttccctttgcgatgtagcatcaaagaaaccagaaacgccaccacggccatcaaggtcacataccagaagaaggctgtttccattcctattgatttcagcgacaacgctacgtactccgccgaaccaccaaatatagcattagcgaccgcatatgacagaccaacgcctaatgcgcgaacctgtgccgggaacatctcagccttcagtattccactgattgatgtataaaaactcactatcagcagggcacacatcaccagaccaaaagcggcataaggcgaggaaacgttttgcaatgctgagagaataggaacggtaaaaatggctgccagcgaaccgaaacataacattgaggtacggcgaccaatcttatccgacagcgcgccaatgagtggttgaataagcatgaatacaaacaatgcggcagtcataatgccactcgccacgttggcatgcattcccgcagtatttaccagatacttctgcatataagtggtgaaggtatagaaacaaagggagcccgcagcggtaaaaccgagaaccatgatgaatgcacggcgattgcgccataatcctttcagagatccagcttcttttaaagcgcgcgtttcttgttgcgaagtttcatctaactgacgacgtaaccacaacgccacaacagctaacacagctcctaacgcgaaaggaatacgccatccccactctctgagtgcagcgtcttccatggtgtgttgtaaaaccacgacaaccagtagggctagcagttgtccgccgatcaacgtcacatactgaaatgatgcgtaaaaacctttgcgcccttcaacggcaacttcactcatataggtggcgctggtgccatattctccgccaacagataatccctgaaataaacgcgcgagaagcaataatgccggagcccacgtacctatagtttcataacctgggaggcaggcgataaccagcgatccgaaacacatcatacacaccgataacagcatcgattttttgcgaccatgtttatcggctatgcggccaaatagccaaccgcctattgggcgcatcaggaatcccgcagcaaaaacacctgctgtttgtagtagttgagtcgtcgtgttcccggaagggaagaaaatgtgggcaaagtagagtgaacagaacgagtagacatagaaatcgaaccactcgaccagattacctgaagaggcccccacaatcgcccaaatgcggcgacgagtatcactacttgtcagtttgctgtctgccgttacagtactttcagccatgccattatgtctcctgccgtaatccgatgcttttgtcggtcgcttttatctatttcttttggtaaagaaaatgttatacatttgttgcgtatcattatgcaaccttaaccatgaatttagttagcaggaaaatggttattgaggagcttaaggataaatttctggtaaggaggacacgtatggaagtaggcaagttggggaaaccgcatccgttgctgaatctggcatatgtgcgagtataagacgcgcagcgtcgcatcaggcatttttttctgcgccaacgcaaaaaggccatcgtgactgatggcctttcgcttaatttgatgcctggcagttccctactctcgcatggggagaccccacactaccatcggcgctacggcgtttcacttctgagttcggcatggggtcaggtgggaccaccgcgctacggccgccaggcaaattctgttttatcagaccgcttctgcgttctgatttaatctgtatcaggctgaaaatctttctctcatccgccaaaacagcttcggcgttgtaaggttaagcctcacggttcattagtaccggttagctcaacgcatcgctgcgcttacacacccggcctatcaacgtcgtcgtcttcaacgttccttcaggacccttaaagggtcagggagaactcatctcggggcaagtttcgtgcttagatgctttcagcacttatctcttccgcatttagctaccgggcagtgccattggcatgacaacccgaacaccagtgatgcgtccactccggtcctctcgtactaggagcagccccctcagttctccagcgcccacggcagatagggaccgaactgtctcacgacgttctaaacccagctcgcgtaccactttaaatggcgaacagccatacccttgggacctacttcagccccaggatgtgatgagccgacatcgaggtgccaaacaccgccgtcgatatgaactcttgggcggtatcagcctgttatccccggagtaccttttatccgttgagcgatggcccttccattcagaaccaccggatcactatgacctgctttcgcacctgctcgcgccgtcacgctcgcagtcaagctggcttatgccattgcactaacctcctgatgtccgaccaggattagccaaccttcgtgctcctccgttactctttaggaggagaccgccccagtcaaactacccaccagacactgtccgcaacccggattacgggtcaacgttagaacatcaaacattaaagggtggtatttcaaggtcggctccatgcagactggcgtccacacttcaaagcctcccacctatcctacacatcaaggctcaatgttcagtgtcaagctatagtaaaggttcacggggtctttccgtcttgccgcgggtacactgcatcttcacagcgagttcaatttcactgagtctcgggtggagacagcctggccatcattacgccattcgtgcaggtcggaacttacccgacaaggaatttcgctaccttaggaccgttatagttacggccgccgtttaccggggcttcgatcaagagcttcgcttgcgctaaccccatcaattaaccttccggcaccgggcaggcgtcacaccgtatacgtccactttcgtgtttgcacagtgctgtgtttttaataaacagttgcagccagctggtatcttcgactgatttcagctccatccgcgagggacttcacctacatatcagcgtgccttctcccgaagttacggcaccattttgcctagttccttcacccgagttctctcaagcgccttggtattctctacctgaccacctgtgtcggtttggggtacgatttgatgttacctgatgcttagaggcttttcctggaagcagggcatttgttgcttcagcaccgtagtgcctcgtcatcacgcctcagccttgattttccggatttgcctggaaaaccagcctacacgcttaaaccgggacaaccgtcgcccggccaacatagccttctccgtccccccttcgcagtaacaccaagtacaggaatattaacctgtttcccatcgactacgcctttcggcctcgccttaggggtcgactcaccctgccccgattaacgttggacaggaacccttggtcttccggcgagcgggcttttcacccgctttatcgttacttatgtcagcattcgcacttctgatacctccagcatgcctcacagcacaccttcgcaggcttacagaacgctcccctacccaacaacgcatcagcgtcgctgccgcagcttcggtgcatggtttagccccgttacatcttccgcgcaggccgactcgaccagtgagctattacgctttctttaaatgatggctgcttctaagccaacatcctggctgtctgggccttcccacatcgtttcccacttaaccatgactttgggaccttagctggcggtctgggttgtttccctcttcacgacggacgttagcacccgccgtgtgtctcccgtgataacattctccggtattcgcagtttgcatcgggttggtaagtcgggatgacccccttgccgaaacagtgctctacccccggagatgaattcacgaggcgctacctaaatagctttcggggagaaccagctatctcccggtttgattggcctttcacccccagccacaagtcatccgctaatttttcaacattagtcggttcggtcctccagttagtgttacccaaccttcaacctgcccatggctagatcaccgggtttcgggtctataccctgcaacttaacgcccagttaagactcggtttcccttcggctcccctattcggttaaccttgctacagaatataagtcgctgacccattatacaaaaggtacgcagtcacacgcctaagcgtgctcccactgcttgtacgtacacggtttcaggttctttttcactcccctcgccggggttcttttcgcctttccctcacggtactggttcactatcggtcagtcaggagtatttagccttggaggatggtccccccatattcagacaggataccacgtgtcccgccctactcatcgagctcacaatatgtgcatttttgtgtacggggctgtcaccctgtatcgcgcgcctttccagacgcttccactaacacacacactgattcaggctctgggctgctccccgttcgctcgccgctacttggggaatctcggttgatttcttttcctcggggtacttagatgtttcagttcccccggttcgcctcattaacctatggattcggttaatgatagtgtgtcgaaacacactgggtttccccattcggaaatcgccggttataacggttcatatcaccttaccgacgcttatcgcagattagcacgtccttcatcgcctctgactgccagggcatccaccgtgtacgcttagtcgcttaacctcacaacccgaagatgtttctttcgattcatcatcgtgttgcgaaaatttgagagactcacgaacaactctcgttgttcagtgtttcaattttcagcttgatccagatttttaaagagcaaatatctcaaacatcacccgaagatgagttttgagatattaaggcaggtgactttcactcacaaaccagcaagtggcgtcccctaggggattcgaacccctgttaccgccgtgaaagggcggtgtcctgggcctctagacgaaggggacacgaaaattgcttatcacgcgttgcgtgatattttcgtgtagggtgagctttcattaatagaaagcgaacggccttattctcttcagcctcactcccaacgcgtaaacgccttgctatttacttttcatcagacaatctgtgtgagcacttcaaagaacgcttctttaaggtaaggaggtgatccaaccgcaggttcccctacggttaccttgttacgacttcaccccagtcatgaatcacaaagtggtaagcgccctcccgaaggttaagctacctacttcttttgcaacccactcccatggtgtgacgggcggtgtgtacaaggcccgggaacgtattcaccgtggcattctgatccacgattactagcgattccgacttcatggagtcgagttgcagactccaatccggactacgacgcactttatgaggtccgcttgctctcgcgaggtcgcttctctttgtatgcgccattgtagcacgtgtgtagccctggtcgtaagggccatgatgacttgacgtcatccccaccttcctccagtttatcactggcagtctcctttgagttcccggccggaccgctggcaacaaaggataagggttgcgctcgttgcgggacttaacccaacatttcacaacacgagctgacgacagccatgcagcacctgtctcacagctcccgaaggcaccaatccatctctggaaagttctgtggatgtcaagaccaggtaaggttcttcgcgttgcatcgaattaaaccacatgctccaccgcttgtgcgggcccccgtcaattcatttgagttttaaccttgcggccgtactccccaggcggtcgacttaacgcgttagctccggaagccacgcctcaagggcacaacctccaagtcgacatcgtttacggcgtggactaccagggtatctaatcctgtttgctccccacgctttcgcacctgagcgtcagtcttcgtccagggggccgccttcgccaccggtattcctccagatctctacgcatttcaccgctacacctggaattctacccccctctacgagactcaagcttgccagtatcagatgcagttcccaggttgagcccggggatttcacatctgacttaacaaaccgcctgcgtgcgctttacgcccagtaattccgattaacgcttgcaccctccgtattaccgcggctgctggcacggagttagccggtgcttcttctgcgggtaacgtcaatgagcaaaggtattaactttactcccttcctccccgctgaaagtactttacaacccgaaggccttcttcatacacgcggcatggctgcatcaggcttgcgcccattgtgcaatattccccactgctgcctcccgtaggagtctggaccgtgtctcagttccagtgtggctggtcatcctctcagaccagctagggatcgtcgccttggtgagccgttaccccaccaacaagctaatcccatctgggcacatccgatggcaagaggcccgaaggtccccctctttggtcttgcgacgttatgcggtattagctaccgtttccagtagttatccccctccatcaggcagtttcccagacattactcacccgtccgccactcgtcagcgaaacagcaagctgcttcctgttaccgttcgacttgcatgtgttaggcctgccgccagcgttcaatctgagccatgatcaaactcttcaatttaaaagtttgatgctcaaagaattaaacttcgtaatgaattacgtgttcactcttgagacttggtattcatttttcgtcttgcgacgttaagaatccgtatcttcgagtgcccacacagattgtctgataaattgttaaagagcagtgccgcttcgctttttctcagcggcgcggggtgtgcataatacgctttcccgctacagagtcaagcatttatttttgctttctctgccggaattctgaggagaaccccgctgacccggcggcgtgtttgccgttgttccgtgtcagtggtggcgcattatagggagttattccggcctgacaagcgaaaaatataaaaactttatcgttcgctcatttttcaggcaaaacatcttaaatatagtcttttccgtctaacttatagacaaaaacgagccccgaagggctcgttttatcatttactggacggcgacaatccggtcttcattaacttccaggcgaatcactttacccggaaccaattcaccagacagtatttgctgtgccagcgggttttcgatctgctgctggatagcacgtttcaaaggacgtgcaccatagactggatcgtaaccgttctcgctcagcagtttcagcgcctcgtcagaaatgtggatttcataaccacgttcttccagacgtttgtacagacgtttcaactgaatctgcgcaatcgaggcaatgtgctgttcacccagcggatggaagaccaccacttcatcaatacggttaatgaattccggacggaagttatggcttaccacaccgagcaccagctctttcatgtgcgcataatccagttcaccgaagcgttcctgaatcaaatcggaaccgaggttagaggtcataatgacaaccgtattacggaagtcgaccgttctcccctgcccgtcagtcagacgaccatcatccagtacctgcaacagaatgttgaagacatccggatgcgctttttccacttcatccagcaggatgacggaatacggacgacgacgcacagcttcggtcaggtagccaccttcttcataaccgacatatcccggaggcgcaccaaccagacgagacaccgagtgtttctccataaactcggacatatcgatacggaccatcgcctcgtcgctatcaaacataaagttcgccagcgccttacaaagctcagttttccccacacccgttgggccgaggaacaggaatgaaccaatcgggcgatttggatccgccaaccccgcacggctacggcgaatagcgttagataccgcatcaaccgcttcgttctgaccaatgacgcgatggtgcagttcttgttccatacgcagcagtttttcgcgctcgctttccatcatgcgagaaaccggaatccccgtccaacgcgccagcacttcagcaatttcggcatcggtcactttattacgcaacagacgcatagttttgccttcgagctgcgttgcggcttccagttgcttttccagttccgggattttgccgtattgcagttcagacatccgcgccaggtcccccacacggcgagcctgttcaatagcgattttcgcctgttccagttccgctttaatggtctgcgtaccagaaagcgatgccttctctgctttccactcttcttctaactcggagtactgacgttctttgtcgctcagttcttcgttgagcatatccaggcgttttttactggcttcatcagactctttcattaacgcctgttgttccagtttgagctggatgatacgacgatcgagtcggtcgagttcttctggttttgagtcaatctgcatacgaatgctggatgctgcttcatcgatcaggtcgatggctttatccggcagctgacggtcagcaatgtagcgatgagacaacgtcgccgctgcaacaattgccgggtcagtaatttgcacatggtggtgcaattcgtaacgttctttcaggccacgcagaatcgcaatggtatcttcaacggaaggctcggcaacaaacactttctggaaacgacgttccagcgcagcatctttttcaatgtactggcgatattcgtcaagcgtcgtggcacctacgcagtgcaattcaccacgcgccagcgccggtttcagcatgtttccggcgtccattgcgccatcggctttacccgcgccgaccatggtatgtaattcgtcgataaacaggatgacgttgccttcctgtttggcaagatcgttaagcacgccttttaaacgttcttcaaactcaccgcgatatttcgccccagccaccagcgcgcccatatccagcgccagtacgcggcggcctttcaatccttccggcacttcgccgttgataatacgctgcgccagaccttcaacgatggcagttttaccgacgccgggttcaccaatcagtaccgggttatttttagtacgacgttgcagcacctgaatggtacggcgaatttcttcatcacgaccaatcaccggatcgagtttgccctgttcggctcgttcggtaaggtcgatggtatattttttcaaagcctgacgttggtcttcagcaccttgatcgttcacgctttcacctccacgcatttgttcaatcgcttgagtaatgttggcggtggtcgcccctgctgctttcaggatgtcggccagcgtgccgcgagactcaagtgccgccagaacgaacagttctgacgagataaagttatcaccacgtttttgcgccagcttgtcgcaaagattaagaacgcgcaccagatcctgtgatggctggacatcaccaccagtaccttcaacctgcggtaaacgatttaatgcctgattgatatctgtgcgcaactggccagcattgatgccagcggatgttaataaaggactaaccgaacccccttcctgattcagcagggcgctcattaaatgaagtggttcgataaattggttgtcgtgcccgagtgcaagtgattgggcatcggcaagagcaagctggaatttattagtaagacgatccagacgcataactcctcccataacggatcaaagttgctactggagattaaatgaggtcatccctcaattattcaaggttattgaccagattaatgtgaaaagaaattcacgcgtaccggatcgtcttgattctttaggttatatcagccaaatgaaacttgccatacgaccggtggtcttgtcgcgacgataagagaagaaagtctcattttccgtatatgtacaacggtcgccgccgaaaatttgctcaacacccacgttcgccagacgctgccgggcaagctgataaatatccgccagatacttatcaccatgctgaatgaaagctgcacttgctttagcgtctactgccataaacgcctcgcgaacctccacccccacttcgaacgcgcgtggaccaattgccggccctaaccaggcgagaatattttccggattatcagcaaaacaggaaaccgtctcttccagcacgcctgcgcacagtccacgccagccagcatgagcggcggcgacttccgttcccactcgattgcaaaacagcacagggaggcagtcggcagtcatcactgcgcaaaccgtgccaggcgtattgctataagaggcatcagctcgttttgaggcataaggttcgccagtaagcttaagcacatctttgccgtgtacctgctcaagccagaccggtttagaaggcaaattgcccgcagcaaaaagtcgcttgcgattctcctcaacgtgatccgggttatcgccacaatgggcaccgaggttgagtgagtcatacgggggcaagctcacgccgccgatacgagtagagctacaggccgcaacaccttttggcagcggccactgcgggacaatcagcttactcataaccagtccacttcatccttatgctcttcgaagtcggcgcgcatcacctcaatcagctccaccatatcttgtggaataggcgcatgccattccatttcgatgccggagatcgggtgataaagacgcaacatggttgcatgtagcgcctggcggtcaaatttacgcagcgtggagataaatgcttccgaagcaccttttggcggacgcggacggccaccataaaccggatcgcccaccagcggatgagtgatatgggccatatgcacgcggatctggtgcgtacgtccagtctccagacgcaaccgcagacgcgtgtgcacacggaagtgttccatgatgcgatagtgagtgaccgccggtttgcccatgggatgcaccgccatgtgagtacgtttggtcgggtggcggctgattggttcatctactgtaccgccagcagtcatatgaccaattgccaccgcttcatactcacgagtaatttcacgcctttgcaaagattcgactaaacgcgtctgagccggaacagtttttgccacaaccatcaggccagtggtgtctttatccagacgatggacgatgcccgcacgcggtacatcggcaatgggcggatagtaatgaagcaacgcattcagtaccgtgccatccgggttacccgcgccaggatgtaccaccaggtcgcgcggtttattaatgacgatgatatcttcatcttcatagacgatatccagcgggatatcctgcggttcaaaacgcgcttcttcttcaatctcagcgttgatggcaacctgctcgccacccaatactttttctttcggcttatcacaaactttgccgtttaccagcacgcgctggtcgaggatccattcttttattcgcgaacgtgaataatccgggaacatttcggccaaagcctgatctaagcgttgaccgagttggttttcggacaccgttgcagtgagctgtactcgttgtgccatatatactgcttcttcgtttatcgttggggttttacggctttgccgtttaatatagtgtgctattgtagctggtcttaaccgggagcaggaacagagaatctcccgtattacattttgaggaaagtcaaaacgtcatgacgcgcatgaaatatctggtggcagccgccacactaagcctgtttttggcgggttgctcggggtcaaaggaagaagtacctgataatccgccaaatgaaatttacgcgactgcacaacaaaagctgcaggacggtaactggagacaggcaataacgcaactggaagcgttagataatcgctatccgtttggtccgtattcgcagcaggtgcagctggatctcatctacgcctactataaaaacgccgatttgccgttagcgcaggctgccatcgatcgttttattcgccttaacccgacccatccgaatatcgattatgtcatgtacatgcgtggcctgaccaatatggcgctggatgacagtgcgctgcaagggttctttggcgttgaccgtagcgatcgcgatcctcaacatgcacgagctgcgtttagtgacttttccaaactggtgcgcggctatccaaacagtcagtacaccaccgatgccaccaaacgtctggtattcctgaaagatcgtctggcgaaatatgaatactccgtggccgagtactatacagaacgtggcgcatgggttgccgtcgttaaccgcgtagaaggaatgttgcgcgactacccggatacccaggctacgcgtgatgcgctgccgctgatggaaatgcataccgtcagatgcagatgaatgcgcaagctgaaaaagtagcgaaaatcatcgccgcaaacagcagcaatacataacagaaacctgaaatacaaaacggcagcccttgagctgccgtttttttattctgttagttgtgaaactgaagcgatttagtcactatcgatctcatcaaatatggctcgctttgagatattcctcaagtaaaaaaacacctcttcctgcgatttctcacaaaaaagattcgttgacaaaaagtgacaaaattatgagattcccatcacacattttgacatcaggagcggtatgctgaattcaccaagacgggaagacaagaggtaaaatttatgacaatgaacattaccagcaaacaaatggaaattactccggccatccgccaacatgtcgcagaccgtctcgccaaactggaaaaatggcaaacacatctgattaatccacatatcattctgtccaaagagccacaagggtttgttgctgacgccacaatcaatacacctaacggcgttctggttgccagtggtaaacatgaagatatgtacactgcaattaacgaattgatcaacaagctggaacggcagctcaataaactgcagcacaaaggcgaagcacgtcgtgccgcaacatcggtgaaagacgccaacttcgtcgaagaagttgaagaagagtagtcctttatattgagtgtatcgccaacgcgccttcgggcgcgttttttgttgacagcgtgaaaacagtacgggtactgtactaaagtcacttaaggaaacaaacatgaaacacacaccgtttttcttcgcattcttttttaccttcccctgaatgggaggcgtttcgtcgtgtgaaacagaatgcgaagacgaacaataaggcctcccaaatcggggggccttttttattgataacaaaaaggcaacactatgacatcggaaaacccgttactggcgctgcgagagaaaatcagcgcgctggatgaaaaattattagcattactggcagagcggcgcgaattggccgtcgaggtaggaaaagccaaactgctctcgcatcgcccggtacgagatattgatcgtgaacgcgatttactggaaagattaattacgctcggtaaagcgcaccatctggacgcccattacattactcgcctgttccagctcatcattgaagattccgtattaactcagcaggctttgctccagcaacatctcaataaaattaatccgcactcagcacgcatcgcttttctcggccccaaaggttcttattcccatcttgcggcgcgccagtatgctgcccgtcactttgagcaattcattgaaagtggctgcgccaaatttgccgatatttttaatcaggtggaaaccggccaggccgactatgccgtcgtaccgattgaaaataccagctccggtgccataaacgacgtttacgatctgctgcaacataccagcttgtcgattgttggcgagatgacgttaactatcgaccattgtttgttggtctccggcacgactgatttatccaccattaatacggtctacagccatccgcagccattccagcaatgcagcaaattccttaatcgttatcctcactggaagattgaatataccgaaagtacgtctgcggcaatggaaaaggttgcacaggcaaaatcaccgcatgttgctgcgttgggaagcgaagctggcggcactttgtacggtttgcaggtactggagcgtattgaagcgaatcagcaacaaaacttcacccgatttgtggtgttggcacgtaaagccattaacgtgtctgaccaggttccggcgaaaacgacgttgttaatggcgaccgggcaacaagccggtgcgctggttgaagcgttgctggtgctgcgcaaccacaatctgattatgacccgtctggaatcacgcccgattcacggtaatccatgggaagagatgttttatctggatattcaggccaatcttgaatcagcggaaatgcaaaaagcattgaaagagttaggggaaattacccgttcaatgaaggtattgggctgttacccaagtgagaacgtagtgcctgttgatccaacctgatgaaaaggtgccggatgatgtgaatcatccggcactggattattactggcggttgtcattcgcctgacgcaataacacgcggctttcactctgaaaacgctgtgcgtaatcgccgaaccagtgctccaccttgcggaaactgtcaataaacgcctgcttatcgccctgctccagcaactcaatcgcctcgccgaaacgcttatagtaacgtttgattaacgccagattacgctctgacgacataataatgtcggcataaagctgcggatcctgagcaaacagtcgcccgaccatcgccagctcaaggcggtaaatcggcgaagagagcgccagaagttgctcaagctgaacattttcttctgccagatgcagcccataagcaaaagtagcaaagtggcgcagagcctgaataaacgccatattctgatcgtgctcgacagcgctaatacgatgcagccgagcgccccagacctgaatttgctccagaaaccattggtatgcttccggcttacgtccatcacaccagaccacaacttgctttgccaggctaccgctgtccgggccgaacatcgggtgtaaccccagtaccgggccatcgtgcgccgccagcatggcctgtaatggtccatttttcactgatgccagatcaacaagaatacaatctttcggtaaaggcggtaatttgccgataacttgctcagtaacgtggattggcacactaacaatcaccattccggcatcggcaacaatatcagccgctcgatcccagtcatgttgctccagaatccgcacctgataacccgatagtgtcagcatcttctcgaacaggcgtcccatctgaccgccaccgccgacgataaccaccggacgcagtgacggacaaagtgttttaaatcctttgtcgttttcactggagtaagattcacgcatcatccgacgcaaaacatcctcaatcagatctggcggtacacccagagcttccgcctctgcacgacgcgaggccaacatagatgcctcgcgctccggaacataaataggcagtccaaagcggcttttcacctcgcccacttcagcaaccagttccagacgcttcgctaataaattcagcagcgctttatcgacttcatcaatttgatcgcgtaatgcggtcaattcagcaaccataataaacctcttaagccacgcgagccgtcagctgcccgttcagatcctgatgaatttcacgcagcaaggcatcggtcatttcccagctaatgcaggcatcggttacggatacaccgtatttcatttcactgcgcggttgctcggaagactgattgccctcgtggatattactttcgatcatcagaccaataattgagcgattgccatctttgatttgagcaaccacggattctgccaccgcaggctgacggcgataatctttattggaattaccgtggctgcaatctaccatcagagacgggcgcagtcccgcctgttccatctctttttcacattgcgcaacatccgcagggctatagttcggcgctttaccaccgcgcaggatgacatgcccgtccggattcccctgagtttgtagcaacgcaacctgccctgcctggttaatgccaacaaaacggtgcggctgggcggcggcgcgcatagcgttaattgctgttgccagactgccgtcggtgccgtttttaaaaccaaccggcatggaaagcccggaggccatttcacggtgagtttgcgattccgttgtacgagcaccaattgctgaccagctaaacagatcgcccaggtattgcgggctattcggatctaacgcttccgtcgccagtggcagtcccatattcaccagctcaagcagcaatttacgcgcgatctgcagcccggcttctacatcaaaagagccatccatatggggatcgttaattaaccctttccagccgacagtggtacggggtttttcaaaatagacgcgcattaccagatagaggctatcgctgacctctgcggcaagggctttaaatcgacgagcatattccagagcagtttccggatcatgaatggaacaaggaccacatactaccagcagacgaggatcgcgcccggcgataatatctgaaatggttctacgcgagtcagcaatctgggcttcttgttgcaggctcaatggaaaagcggccttcagttgttccggagtcattaaaacctgttcgtcggtaatatgtacgttattcagcgcgtctttttgcatgatggcgatcctgtttatgctcgtttgcgatagttgatcctcagcgaggatgacgtaacgataacacataaagtaaagttttcaatccatatttcgtacatttttatttacacaggcaatttagtcgcgatttcaacccttacttctgtatagataaatttacactccctttgaaaacaatccgctatgctttgaaaaaggagaaagaaatgatgaaaaagtttatcgcccccttgttggctttactggttagcggatgtcagattgatccttatactcacgcgccaaccttgaccagcaccgactggtatgatgttggtatggaagatgcgatatcgggcagcgccataaaagatgacgatgcatttagcgattcacaggcggatcgcggtctataccttaaaggatatgccgaaggacaaaagaaaacttgccagaccgattttacttatgcccggggactttccggtaaaagctttcctgccagctgcaacaatgttgaaaatgccagccaactgcatgaagtatggcaaaaaggggctgatgaaaatgccagcacaatacgattaaattaattaaaaccccacaaataaattaaacataagattttactcattgtgttttatttctcacattgatgacgatcgcatgaaaaaatgatattttaatgagcattctgaaaaaatatcgatgcatttcgagcgaagatggtggggatccctgaatgcgtttttctcaccgactgttcttacttctgattctcctgctgacgggagcaccaatactcgctcaggagccttctgacgttgcgaaaaacgtgcgtatgatggtttccggtattgtcagttacacccgctggcctgcgctatcagggccaccaaagttatgtatcttttcatcttcacgttttagtaccgccctacaagagaatgccgcgacatctttgccttatctgcctgtcatcattcacactcaacaagaggcgatgatttcaggctgcaatggtttttattttggcaacgagtcaccgacattccagatggaattaaccgaacaatatccgtcaaaggcgttattattaattgccgaacaaaataccgagtgcattattggtagcgccttttgtctgatcatccacaataatgacgtcagatttgccgtaaacctggatgccttatcgcgtagcggtgtaaaggtcaacccggatgtcttaatgctcgcacggaagaaaaatgatggataacgataattctcttaataagcgccccacgtttaaaagagcattacgcaacatcagtatgaccagcatatttatcactatgatgctgatctggttgctgctttccgtgacctcggtgctgaccctgaaacagtacgcgcaaaaaacctggcactgacagcagcaacaatgacttacagtctggaagcagctgtcgtttttgccgatggccctgcagcaactgaaacactggcagcgctgggccagcaagggcaattttcaactgcagaagtacgtgataagcagcaaaatattctggcatcctggcattacacccgtaaggatccaggcgatactttcagcaatttcataagccactggctctttcctgcccccatcattcagccgattcgtcacaatggcgaaaccattggcgaagtacgcttaaccgctcgcgacagttcaatcagccattttatctggttttcgctcgccgtactgaccggttgtattctgctggcatcaggaatcgcaattaccctcacccgccatttgcacaatggcctggtggaagcactgaaaaatatcaccgatgtcgtacatgatgtgcgttccaaccgcaatttttcccgacgagtttcggaagaacgtatcgctgagtttcaccgcttcgctctcgacttcaacagtctgctggatgaaatggaagagtggcagcttcgtttacaggctaaaaatgcgcagcttctacgtaccgcgctacatgacccattaaccgggctggctaaccgcgcagcgtttcgtagcggcatcaacacgttgatgaacaattccgatgcccgaaaaacgtcggcgttactatttcttgatggcgataatttcaaatacatcaatgatacctggggtcatgcgacgggcgatagggtcttgattgaaatcgcaaaacggttagctgaatttggcgggctgcgacataaagcataccgcctgggcggcgatgaattcgctatggtgctctatgatgtacagtcagaatctgaagtgcagcagatatgctcagcactgacacaaatctttaatctcccgtttgatcttcataatggccatcagaccaccatgacattaagcattggttacgcgatgaccattgagcacgcctctgcggaaaaattacaagagcttgccgatcacaatatgtatcaggccaaacaccagcgtgccgaaaagctgctgagataacaaggatatatcgatatgataaagcacctggtagcacccctgattttcacctcactaatactgactggctgccagtcccctcagggaaagtttactcctgagcaagtcgccgctatgcaatcttatggatttactgaatccgccggcgactggtcgctgggcttatcagatgccattctgttcgcaaaaaatgactacaaattgctcccggaaagccagcaacagatccaaaccatggcagccaaattggcctcgacagggctaacacatgcccgtatggatggacacaccgataactatggtgaagacagttacaacgaaggcttatcattgaaacgggcgaatgtcgtggccgatgcatgggctatgggtggacaaattccacgcagcaatctcaccacacagggtttaggaaaaaaatatcccatagccagtaacaagaccgcccagggccgcgccgagaaccgccgcgtcgcagtggtgattactaccccttaaaacacgagcaaacagataaaaaaagggccagccaattggccagcccttcttaacaggatgtcgcttaagcgaaatcttagttaagacgctctttgatacgagcagccttaccagtacgctcacgcaggtagtacagtttagctttacgaacagcaccacgacgtttgacagaaatgctgtcaactaccggagagtgagtctggaagacacgctcaacgccttcgccgttggaaattttacgaacagtgaatgcagagtgcagaccgcggttacgaatagcgataaccacgccctcgaatgcctgcagacgttttttggaaccttcaacaacccatactttcacttccacggtatcacccggacggaaggaaggtacgtcctgcttcatctgctcttgttcaagttgcttaataatgttgctcataatttaatctcttatcctgggtaaactgatatctcgggggcttacgccatcccatcatgtttatgttgctgttgtgcgtgttccgttttgaactccgccagcaaccttgcttgctcttcagtcagagccaggttttccagaagttcaggtcttctaagccaggtacggcccagcgactgtttcaaacgccagcgacgtatctcggcatggttgcccgacagtaacactggcggaacttccatcccttctaacacctcaggccgcgtatagtgcgggcaatccagcaatccttcagcaaaggaatcttccgttgccgaggcttcatgtcccagtactcccggaataaaccgggaaacggagtcaatcagcgtcattgctggtaactcaccaccactgagaacgtaatcgccgattgaccattcttcgtcaatttcggtttggatcacgcgctcatctataccttcgtagcgaccgcacaccagaatcaatttttgattcgttgccagttcgctgacgcccgcttgatcaagcttgcgtccctgtggtgacagataaatcacctttgcgccttcacccgccgcggcttttgctgcatgaatggcgtcccgcaagggttgcaccatcattaacatccccggtccgccgccgtaaggacgatcgtccacggtacggtgccggtcatgcgtgaagtcgcgaggactccaactctggatgctcagcaggccatttttaactgcccggccagttaccccgtaatcggtaattgcgcggaacatttcaggaaacaggctaattatgccaatccacatagcgccgtcttttaccgtttatccggtggtttaaaaaccaggatcccaatctacttcgattgaacgagtagtgagatcgactttcttgataacctgcccatcgaggaacggtacgagacgttccttgataccaaacgcatctttcaggtttgccttaatgacgagaacgtcattagatccggtttccatcatatcgacgactttaccgagatcgtagccttcagtggttactacctggcagcccatcaggtctttccagtagtagtcaccctcttcaagctgaggcagctgcgatgaatccacgacaatttcacaattcgtcagcaggttcgccgcatcacgatcgtcaacgcctttcagcttgatgatcatgtcctgattgtggtgcttccagctttccagctggacttgctgccactgacccgccttctggataaaccagggctgatagtcaaaaatgctttcggcgtcttcggtggaagaaaacactctgagccacccacgaataccgtaagacgaacccattttccccaaaacgatgggatcaacaggtgcttgcgcggtgagttgtttgctcatcatgaccaccgtgacagattaagctgctttgtttacttctttgatcagcgcagcaacgcgatcagaaatagttgcgccctggccaacccagtgagcgatgcgatccagatccaggcgagtgccttcttctttttcgctagcgattgggttgaagaaaccaacgcgctcgatgaagcgaccgttgcgtgcattacggctgtcagcgacaacaacctggtagaacggacgctttttagcgccgtgacgtgctaaacgaatagttaccataacatcctcttgtgtgaataaaacaaccggaccccatcgaggaacggagtccggtgtcatattaaaagcccgaaaattttactgatttctggagaaaatgcaatcagcagttaataactctgtcgcataaggtcatttagcgaccaggaaatcccggcggcatcatccccttcatgcttctcatcatcttcgccattccgcctttcttcattttcttcatcatgcgctgcatgtcgtcgaactgcttcagaaggcggttcacgtcctgcacctgcataccgcaaccggcagcgatacgacgcttacgcgaacctttgatgatttctggcttagcgcgctctttcatcgtcatcgagttgatgatggcttccatacgcaccagcactttatcgtccatctgcgacttaacattatccgggatctgccccatgcccggcagcttgcccatcaggctagccatgccgcccatatttttcatctggcgcagttgctcaagaaaatcgttgagatcgaagccgtcgccttttttcagcttgctggctaatttctctgcctgcgcgcggtcaactttgctttcgatatcttcgatcagcgacagtacgtcgcccatgccgagaatacgcgacgcgatgcggtccggatggaacggctccagcgcctcagttttctcgccaacaccgagaaacttgatcggtttgccagtgatgtgacgaatagagagcgccgcaccgccgcgggcatcgccgtccactttggtcaacactacgccggtaagcggtaacgcttcattgaatgcttttgccgtattggccgcatcctgaccggtcatggcgtcaaccacaaacagggtttcaaccgggttaatcgacgcatggacttgtttgatctcgtccatcatcgcttcgtcaacgtgcagacgaccagcggtatccaccagcagcacgtcgtagaatttcagtttggcttctttcagcgccgcgttaacgatatctaccggcttctgaccaacatcagaagggaagaaatcaacgcccacctgctctgccagcgtctcaagctgtttgattgccgccgggcgataaacgtcggcagaaaccaccagcactttcttcttgtgcttctcgcgcaggaacttaccgagtttaccaacgctggttgttttaccggcaccttgcaggcccgccatcagtacgaccgcaggcggttgcgcagccaggttcagggtctggttctcttcgcccatcgccgcaaccagttcgttacggactattttgacgaactcctgccccggcgtcaggctcttattaacttcatgaccaaccgctttctcttttacgcgattgataaactcacgcactaccggcagagcgacgtccgcctccagcagcgccatgcgcacttcgcgcagcgtatcttttacgttgtcttcagtgaggcgtccacggccactgatattgcgcagcgtgcgcgacaaacgatcggttaaattatcaaacattgtctctcgcctggggtggaaacggttggccgcaatcgcgacacatcatcagtattttgccgcagtataacatgaaggcgtctttgttgttatgcaacggttggagcagcgttcacctgacgctatactgcttctctttcttattgctcaaactgtcgacattactatgcccgtttttgctctgctcgcgcttgtcgcctactccgtcagtcttgcgctgattgttcccggtctgctgcaaaaaaacggcggctggcggcgcatggctattatttctgcggtcattgcgctggtctgccacgcaatcgctctggaagcccgcatcctgcccgacggtgatagcggacaaaacctcagcctgctgaacgttggttcattggtcagtttgatgatctgtacggtaatgaccattgtggcttctcgcaatcgtggctggttgctgctacccattgtctatgcctttgcgcttatcaacctggcgctggcgaccttcatgcccaatgaatacatcacccatctggaagcaacgcctgggatgctggtgcacattggcttatcgctcttttcctatgccacgctaattatcgccgccctgtacgcgctgcaactggcgtggattgattaccaactgaagaacaagaagctggcatttaaccaggaaatgccgccattgatgagtatcgagcgtaaaatgttccacatcacgcagattggcgtggtgctgctaacgctcacgctttgcactggcctgttctacatgcacaacctatttagcatggaaaatatcgacaaggctgtgctctctatcgtggcgtggtttgtctatattgtgctgctgtggggacattaccatgaaggatggcgtggacgccgcgtcgtctggtttaacgttgcgggcgcggtaattctgacactggcctacttcggcagccgaattgtccagcagttaatcagctaaacccagaaaaggagtttcccctggaacacatttctactactacgttgatcattattctgatcatcatggtggtcatttcagcctatttttccgggtccgaaaccggaatgatgaccctcaaccgctatcgtctgcgacatatggcgaaacagggtaatcgctcggccaaacgcgtcgaaaaattgctgcgtaagccagaccgcctgataagcctggtgttaatcggcaataacctggtcaatattcttgcctccgcgctcggcactattgttgggatgcgtttgtacggcgatgcgggcgtggcaattgcgactggtgtgctgacctttgtggtgctggtttttgccgaagtgttgccgaaaactatcgctgcgctatacccggaaaaagtcgcttatccgagtagtattctgttagcaccgctgcaaattttgatgatgccgctggtctggttgctgaacgctatcacccgcatgttaatgcgcatgatgggcatcaaaaccgatatcgtggtcagcggctctttgagcaaagaagagttgcgcactatcgtgcatgaatcgcgctcacaaatttcccgtcgcaatcaggatatgctgctgtcggtgctcgatctggaaaaaatgaccgttgatgacatcatggtgccgcgcagtgaaattatcggtattgatatcaacgatgactggaaatcgattctgcgccaactctcccactcacctcacgggcgcatcgtgctctaccgtgattcgctggacgacgccatcagtatgctgcgagtacgtgaagcctggcggttgatgtcggagaaaaaagagttcaccaaagaaaccatgctgcgcgccgcggacgagatctattttgtgccggaaggtacgccgctcagcacgcagttggtgaagtttcagcgcaacaaaaagaaagtcggcctggtcgtcaacgagtatggagacattcaggggctggtgacggttgaagatattctggaagagattgtcggcgatttcactacgtcgatgtcgccaacacttgccgaagaagtcacgccgcaaaacgacggttcggtgattattgatggcactgccaacgtgcgggaaatcaacaaagcctttaactggcatctaccggaagatgatgcccgcacggttaatggcgtcattcttgaggcactggaagagatccctgtcgcaggcacccgcgtgcgtattggcgagtacgatatagatattctcgacgtacaggacaatatgattaagcaggtaaaagtttttcctgtgaaaccgctgcgcgagagtgtggcggagtaacgaaaacggccctgcattcgcatgcagggccgtgaattattacgaaaacagaaattacgcttttgctttcgctacagttaccatcgccgcacgaatcgtacgaccattcagcgtataacccttctgcataatgcccagtacgttacctggcgcaacgtcatcagattccaccattgcgatagcctgatgcacattcgggtccagcggcacgttagtttcggcgatcacttcaacaccaaacttacgcacaacatccagcatcgacttcagcgtcagctcaatgccttcaaccatcgcagacatatccgggttagctttatcagccacttccagcgcacgatccaggctatcaatcaccggcagcaattcgttgatgaatttctccagcgcgaatttgtgggctttttcaatatccagttcagtacgtcgacgcaggttttccatttcggcttttacacgcaaaatgccgtcacgttcacgggtctgggcttcagccagctgagcttcgagattcgcaattttttcatcgcgcggatccacctgctcagcagaagcttctggctcaactgcctcaatctcttcgtgctgatccatgataatttcttccggggcttgcccctcaggcgttttctgttctttactactcatgaatttctccgcgtttttttcgcattcatctcgctaacttcgcttattatggggatcagtttcagggtttcaagggaagcactcacattgtcatcaatcttcgcaacaaggacctcggaaaaatgaataatcatttcaagtgtattggcattgtgggacacccacggcaccccactgcactgacaacacatgaaatgctctaccgctggctgtgcacaaaaggttacgaggtcatcgttgagcaacaaatcgctcacgaactgcaactgaagaatgtgaaaactggcacgctcgcggagattgggcaactagctgatctcgcggtagtcgttggtggcgacggtaatatgctgggcgcggcacgcacactcgcccgttacgatattaaagttattggaatcaaccgtggcaacctgggtttcctgactgaccttgaccccgataacgcccagcaacagttagccgatgtgctggaaggccactacatcagcgagaaacgttttttgctggaagcgcaagtctgtcagcaagattgccagaaacgcatcagcaccgcgataaatgaagtggtgcttcatccaggcaaagtggcgcatatgattgagttcgaagtgtatatcgacgagatctttgcgttttctcagcgatctgatggactaattatttcgacgccaacaggctccaccgcctattccctctctgcaggcggtcctattctgaccccctctctggatgcgattaccctggtgcccatgttcccgcatacgttgtcagcacgaccactggtcataaacagcagcagcacgatccgtctgcgtttttcgcatcgccgtaacgacctggaaatcagttgcgacagccagatagcactgccgattcaggaaggtgaagatgtcctgattcgtcgctgtgattaccatctgaatctgattcatccgaaagattacagttatttcaacacattaagcaccaagctcggctggtcaaaaaaattattctaattttacgccagcctctttactgtatataaaaccagtttatactgtacacaataacagtaatggtttttcatacaggaaaacgactatgttggcacaactgaccatcagcaactttgctatcgttcgtgagcttgagattgattttcatagcggcatgaccgtaataactggcgagaccggcgcgggtaaatctattgcaatagatgccctcggtctttgtctcggtggtcgcgctgaagccgacatggtgcgtaccggcgctgctcgcgctgacctgtgcgcccgtttttctctgaaagatacgccagcggctctgcgctggctggaagaaaatcagcttgaagacgggcatgaatgtttgcttcgtcgagtgatcagcagcgatggtcgctcccgtggtttcatcaacggtacagctgttcctctgtcacaactgcgcgaactgggtcagttgctgattcagatccatggtcagcacgctcatcaattactcaccaaacctgagcaccaaaaattcctgcttgatggctatgccaatgaaacctctctactgcaggaaatgaccgcacgttatcagttgtggcatcaaagctgccgtgacctcgcgcatcatcaacagttaagtcaggaacgcgccgcccgtgcggaactgctgcaataccaattaaaagaacttaacgaatttaatccgcagcccggagagtttgaacaaatcgacgaagagtacaaacgtctggcgaacagcggtcaattgctgaccaccagccagaatgcattggcattaatggccgacggtgaagacgcaaacctgcaaagtcagctttacacggctaaacaactggtgagcgaattgattggcatggacagcaaactgtccggcgtacttgatatgctggaagaagctaccatccagattgctgaagccagcgatgaactgcgccactactgcgatcgtctggatctcgatcccaaccgactatttgaacttgaacagcgcatctcaaaacagatttcgctggcacgtaaacatcacgtcagccctgaggcattgccacagtattaccagtcgctactggaagaacagcagcaactggacgatcaggccgactcacaagaaacgcttgcgctggcggtaacgaaacatcatcagcaggcactggaaatcgcgcgcgcattacaccaacaacgccagcaatatgcagaagaacttgcacagctgatcaccgacagtatgcatgcgctctcaatgccgcatgggcagtttacgatcgatgttaaatttgacgagcatcacctgggcgctgacggtgccgatcgtattgagtttcgggtaaccaccaacccaggtcagccaatgcagcctattgccaaagtcgcatccggtggtgaattgtcccgcatcgcactggcaatccaggtcatcacggcgcgtaaaatggaaaccccggcactgatttttgatgaagtggatgtaggtattagcggtccaacagcggcagttgtcggcaaactgctgcgtcaactcggcgaatcaactcaggtgatgtgtgttacccacctgccacaagtcgcgggatgtggtcatcaacactattttgtcagcaaagaaaccgatggtgcgatgacagaaacgcatatgcaatccctgaataaaaaagcgcggttacaagagctggcgcgcctgcttggtggcagtgaagtcacacgtaatacactggcgaatgcgaaagaactgcttgcagcgtaaacttttttcctgcttcacggtcagagtaaacagcaaaacgccgtaagaccggaaagcaaaaggttttaaagtgatgaaaggtctattatcatcggcatattacagatgagccacgtactgctcgggcccgaaaaggaatcaaatcactatgcgctgtaaaacgctgactgctgcagcagcagtactattgatgttgaccgcaggctgttccactctggagcgagtggtttaccgtcctgacatcaaccaggggaactatctgaccgctaacgacgtatccaaaatacgtgttggcatgacgcaacaacaagttgcgtacgcattgggtacaccgctgatgtccgatccatttggtacgaatacctggttctatgtcttccgccagcaaccaggtcatgaaggtgtaacgcagcaaacgctgacgctgacctttaacagtagcggtgtgttgaccaatattgataacaaacctgcgctgagtggtaactaataataaagttgctctcaaagacgttaaaaaaggtgctcaatgagcaccttttttctgtctgttatttattcgctgatttttctgctcgttgcctgcgaagctctttcggatcggcaatgagagggcgataaatctccacccgatcgccatcatgcacactatcgcttagttttgccggacggctgtaaatgccgactttgtttttagttaaatcgatatcggtacgcaattccagcaagccactggcgcgaatagcttcttcaaccgtcgcgccctcctgcagcgtcacgcgctgcaggtactgcttctcaggtagcgcataagccacctcaacggcaattttacctggcactgtaaacctctttcgcacgaaccgtaaaagcctggaccatattagacgccagctctttaaacacgcgaccaaaggcgagttcaatcaacttattggtaaactcaaagtcgagatgaaactcgatacgacacgcctcctggctcagcggcgtaaacttccatccaccaatcaatttcttgaacggcccatccaccagattcataagaatactttggttactggtcaactggttgcgggtagtaaacgttttgctgatcccagccttagagacatctaccgccgcagtcatctgcccaggagtggactccagaatccgacttccggtacaacccggcaaaaactgaggataagactgaacgtcattcactaactgatacatttgctccgcgctgtagggtaccagtgcggtccggctaatctgaggcataacaatttccatcaacaaaaatccaacaaataatatcatttatcctgctgtaaaaaaacgctatcccggcgctgggtaacatcgggttcatgctaagatagagccttgtcccccgcaggattgatatggggtgttttcgatttcagattaccgatgattcacgacgcttatgacgaagaaaaaagcacataaacctggttcagcgaccatcgcgcttaacaagcgcgcccgtcacgaatactttatcgaagaagagttcgaagcgggacttgccctgcaaggctgggaggttaaatccctgcgcgcaggaaaagccaatatcagcgacagctacgtccttctgcgtgacggagaggcatttctgtttggcgctaacatcacgccaatggccgtggcctccacgcatgtggtgtgcgatcctacccgtacccgcaagttacttctcaaccaacgcgaactggactcattgtacggtcgcgtcaatcgagaaggctataccgtagtggcgctctccctgtactggaaaaatgcctggtgcaaagtgaaaatcggcgtcgccaaaggtaaaaaacagcacgataaacgttcagatatcaaagaacgcgaatggcaggtggataaagcacgtatcatgaaaaacgcccaccgttaaacctgcactccaattattgaccagttcctcaccgcgcctccctctccggcggcgcgaatgaacatcttattggctatcacatccgacacaaatgttgccatcccattgcttaatcgaataaaaatcaggctacatgggtgctaaatctttaacgataacgccattgaggctggtcatggcgctcataaatctggtatacttacctttacacattggggctgattctggattcgacgggatttgcgaaacccaaggtgcatgccgaggggcggttggcctcgtaaaaagccgcaaaaaatagtcgcaaacgacgaaaactacgctttagcagcttaataacctgcttagagccctctctccctagcctccgctcttaggacggggatcaagagaggtcaaacccaaaagagatcgcgtggaagccctgcctggggttgaagcgttaaaacttaatcaggctagtttgttagtggcgtgtccgtccgcagctggcaagcgaatgtaaagactgactaagcatgtagtaccgaggatgtaggaatttcggacgcgggttcaactcccgccagctccaccaaaattctccatcggtgattaccagagtcatccgatgaagtcctaagagcccgcacggcgcaagccctgcgggcttttttgtgccctcaatttgtcccgcgaagtccgaagaaaactaattaaatccgatccttttaggcaccttgttaggcacctcataaagctttattgttttttgaggtgcctaaaactatggaaacccggcaatggcaagacaaaccaaacctctatccgttaaagaaatagaatcagccaaacccaaggaggcggactacgttctctatgatggcgatggccttgagctactcattaaatccagcgggagtaaaatctggcagtttcgctacattcgccctgtcaccaagaaacgagcaaagaagagcataggctcctacccgtcagttacccttgccgatgccagaaactaccgtgcagagtcccgctcactactggctaaacagatcgatccgcaggaacatcagcaagaacaattgcgcagttcgctggaagccaaaaccaacactttccaactcgtagctgaacgttggtggaatgtgaagaaagccagtgtgacagaggactatgcggaagatatctggcgctctcttgaaagagacgtctttcctgcgattggcgacgttagcgttacagatattaaagctcatacactggttcaggccgtacaaccggttcaggccagaggagcactggaaactgttcgtcgcctgtgccaacgtattaatgaggtcatgatctatgcccagaacacagggctgattgatgctgttcccagcgttaatatcggtaaagccttcgagaagcctcagaaaagaacatgcccagcattcgaccggatcagctacctcagttaatgcagacgatgcgaacagccagcattagcctttccacacgctgcctgttcatgtggcaacttcttactattacccgccctgccgaagcggctgaagctctctgggaagaggtagacatagaagcgcgagagtggaagattcctgcagcacgcatgaaaatgaaccgcgaccatactgttccattgtcagatgaagcaattgcgatactagagatgatgaagccgttaagtggaaatcgagaatttatctttcccagccgcatcaagccaaaccagccgatgaacagtcagaccgtaaacgcatcgctaaaacgcgcaggttttggtggggtgctcgtttcacacggcctgcgatctatcgccagtacagcccttaatgagcagggatttccacctgatgttattgaggctgcacttgctcatgtggataagaatgaggttcgtcgtgcgtataaccgtagtgattatcttgagcagcgacggcctatgatgcagtggtgggctgattttgtgatggctgcagatcacggtagtatgattgaaggagggataaaggcaatgcggttagttggatgacatgtcgtagctaaaacccgttctgtttttgggtagattaacctgaaggtctgcaattttaaatgacgctgaaagaagttaaaccctgctcttaagcagggtttttatgatttattctaattttggttttgaatctttctattttaaatcagcctttgcggctcgaatatctgcgttttttgctgagtattcccattcgtcagcgattctaaatagcattgcagaagtacggacgcagtggggcattgaatttgcccattctcggtactgctcagctaatatcctttcttggtttccaccttcgtaacgcatacgagcaaataccccccttttattgtacctaccaatttgtataccttgctctaactcatcagaagataatatttcaatgatgtgccgaattgcttcatgtggccaggaattatctactgagctattaggggcatgtgccagaatttttcctattacatgatcagtgatttcttggcgatgatgcaattttgctaaatggcgtacattctcacaccaatcttcaagtttatcttgatcaatttcattgtctatctgccctggtagtattcgtaatttttcaagtaatctgtatatagaagtagctcttttaacttccaactccgatggttctgtttgttcatcttcgtcactacgatatacaatacatattgcttctataaaaacctctggctttttcatcattagacgatgcaggataagtggctcatcgctatccggaaaacaaggcaagtaggtcatttctttaaatgccaaatctgtttcagaaacatcgttacgttgtttgagttcatcaaaaacttttttacatagtacgatagcattgtatcaaattggatatcctggctatttatttctttaacgactatatctagaagatataaaagtgttgtagatggaatctcagaaaggcgttgatttgctgatataatagcagcaagaccccggcccctttctatatatttatccataagaacaaataaatccgaagttttacccatcattgcaatgggttgtttttgcaaccaatatttttcgttgatgttatcttcaaacccttcaataatgctccatatctcttgtgagtctcttaacgatgctaagattttcccagccctatcaggggtaattttaaactgtttaaaatacacttttattttattaagccattcagcaccaaagcattcaacaccatattgcattaacaacccacaaacttcatcaatattttttttgttgttaataagcattacaaacaaatcatttaatttttcttcatccaacgagagtgctgatatatgccttgctgcaataaaaacattattaacttgttgaaaaaggtctttcaccccagacaaacctaaagtaaagtatatttccctaagtttttcacttcgcatttcttcgacagaagaaaaaattccgccagcattttcaattgactcttcaatatcagaatcccaatcattgaaaatccataaactggctctaaccatgtcaattggtttataattatcaagtattttcgctattttttccatagactcaaatttaaatgcccagttcgcatctgaatattttttatggcgagaatactcatgacgcaaagcctcccatacgatgaactgatcctcttcagtttgttgagaaaggcaaagttcaagatgagaaagtgtttcatctattgcattctcagggaatgagcttaaatgagagattaggatttcccatcttgttgggagtatacctgcaagtttaattgcttcttggataataaagatttgcccctcccaaacaacgccccacgttagtttttctacatctttatccgactctctgaacttcattttttggttttgatcagaggtatcatgggagcgaggaaggagattttgtaacaaactccacccaatactaggaacaatagtgataattttttttataattgcatttctaacttttactggtgcccatgtattaggagaccatgccagaaaaatggttcttaaactattaagagggcgatctgagtaagttcctccgggatctattacagcgagttttgcaagacagattgcagcgcgtaatagatatgtttgttcccaagccaaggcttccaatgcccattttaatccatgataatgacttcgaggagttaacagccctttatcttcattgaatattggagcaatcatttccccattgcccttaagcaattgctcaagggcatcaaggaaagggccaggggcagcttctgccagcagcggaagttgatctcgcaaactaacaaatagtcgatggtcgttagcaagtcccggaatactctgaactattttgttaacaaaatcttggggtgtcataccagtaacccggaattcggcctgttcatgtaatattgccatatgtagcaaaactgttgtcattccattacgtaaccacgagctataagacgttttaataccattgtcaggtacaaacagatcttcggcctttggtggttcaggaatataggaaaaaacctctcttacggccttctcaaaacgctccaggtgttcttcacccagcaaatagcctaaatgtacaaaagcatctaccgacgaacgcaatgaccaaatatcatctactcggtcaattggagaatcgcggcgctttgttaatagccttaatggattttcaacttgagaatagtctgtatagccagctagttgcttgagaattaacttatctttctctgaacatgtactccatgcaccagctaataaagcagggagcaactcagggctgtctttccattcaggtgattcagccgtgctacttgatatctggcgagccaaaacagacaaacttcggccacactgccgcgctatttgataacttttatctgaatcaaaccccatagattcaagagccttacctaaagatatactatctgggcggatcagaagttcgtgatcagttcgtgtttcatcggctccggcacttactactgtgatagatgcttgctgtaataaaccggctaaagctcttgctcgatcacgtggtaagaagatcattcctctttttccagaaagctgtcttgcagcatcatccgtatcaataattagtgctcgactttgaaaggaatgtcgaagttccgcttcagtggttctgatagctgcaatcgcaaaagcaataacctcatccggagaatctgcagctaaagatatttttcgaccattttctcgtaactcattcagaaaacgctctttttgcttttctctccccgccagcaagactgcttcagttaaagggggattaaatttagtggaaaattcatcccaaaactccttaatgcttctaacaccaacctgtggcattagctcaagatggtagcgagcgtagtaagcagctacagcagggcaaacaccgagccaatcttcaagcatagaaccatcaattaatttgatgtctttccacttaccactattgcgtttctcttgtagccagtcttcaagctttaccttaggattatcccatgttcttaatgaagcgaaaacaaaagtagtctttagacgtatctctggagcaacttcgcgtgttcttttttcgtaatcaaagttagctttatcaagcaatttttcattaacaccaaattcccagaatgagtcgccatcaggaacatagggggccaccccctcggctttaagtacaccgtcataacctctaacctgtcccttatcaccattaggaaatctaatttcagtaatactgttagccgttgcacgtataagatcagcgattagtgctggaaaaataacttttgcaggaatagaatctgcccattgctgaaggttaagtgcttttatccatttcatattggtactccacccaataaaattttaaacaaccaaatctaaaaaaaactaatattaaaaattcatttttaatgtacacaaaatgctaacaaaattgctaaagagtaaaaaatcaggacttatttattgatcttaaacattagccaaatttttaaactcgcactaaaccacctcaagaataaaaaatcatcaagttagtggaactttttgcacctagaatgctcgttaacctcacagtcatataaagcatgagcctgtcctttgttcatactagaccttagtttcatacatactgatagctctacgtaaaagtaggtatgatcgacatcacagttctgagtcagaacatcttaaccaattgaagtggatggttttaattgtaaatgttcagcggacatctcttccctcattggttagactaagagcaactttttctatggtcgcaatatcttttatagggtttaaaagtggcaatctttgacattgaaaaggacgaattacttcggctctccgatatccagctggaagagctgatcgctcggctagcagaagctgaagtggcaatgcacggccatagcccagcatgtgtaaattggtctggttcaattacagcccctgacggaggaattgacatccatgttcaggttccaattgatcaactgaaagcaggctttcttgtaagacctgatacggtctttcaggcaaagaaacataagatgcctaagtctgcaattgagagggaaattggcaccggcaaagcactttctcccatcatttctgaacaagccagaaagcaaggcagttacatcattgtcagcctgggtgatgattgctcgccgtcaggaaagaaggatcgtctcaaagcgatgagggatgcagtaaaagatgatcctaacgaaagttatcttcatcttgatttctacgaccgctccaaactcatccaatggttgcgccaacatccatcagtcatgctgtgggtaaaagcaaagcttgggcaagggtattccggttggcaaccctacggagcctggagcaatccaccacaaggtgttatagacactttaatctcagccccaggcgtaaccattactttaccatcgggaaaggggcaaaaactcaaaattgatgaagcaattaacccaatgcgagcactgatccgttcgacaaacaaggctgttcgtattacaggattgtctggtgttgggaagactcgaatcgttcaggcgctctttgatgaaactgttggaacagatgcgcttgaccgaacagtagctatttatgttgatactggctatgagccagtaccgtcggctacagcaatgcttgataacctgctcgctgaaggccggcgagcaattatgatccttgataattgcccatcagaactccatgcttcgcttgccagcaaagtatcagccgcagggaaagaagtaagtctcatcacgatcgagtacgacattagggatgacaaaccacagacaactgaggtcatccacattgagacagatggtccagacgtggcagagcaacttcttatccgtcgcttcccttctattggtcagaataatgcccgtcggattgcagagttcgcagatgggaatgcaagagtggctttggctatagcggaaagagtggaagaaggtgagagtttagccctactttcagatgcgcagttgtttaatcgcttgtttgaacaacgtaatcatcccgacggccatttacgggagcaagctgaaatattgtcactggtgtattcgttctcgatatctagtccagatgcagctaccgatgaactggaaatattgggtgtgctctctgggtatcccaaaatccagttattcaaagctgttacgaagttgatggaacgtcacattgttcagaaaagatcccactggagagccatccttccccatgccattgctaacaagttggcagcatctgcacttaatagtattccgattgatcaacttagaacgacctttgaagctccggatcggcaacgattattgatgtcgttcgcgcacaggttgggactattgcatagccatgctgtggctaaagagattgttgaagcttggttacagcccgaagggctgcttggaaaaataatagacctagatgatgtatcgacacgcattctaaattatatcgctccagttgccccaggagctttgcttgagaggattgaagaaacgcttgttacgtctaattttgagcattttaaatcacgctacaacccacaacgaacagcaattatcaaattgttgcagttacttgcatatgaatcgaaatactttgaacgatgcattaagctcttaatccgtatcgcagaccaggaaagcgcgagcaataattatgattcggctcgaaataagataaagaggtttttccaaccttatctatccggtacccatgcctctttagaacaacgtgttgcgatcatgaatgaatgcattgattcaagtatggccgaacgtagaaggatggggatcgaaatgcttgaaactgctctcggcggacctccgtggacaggattcggaattaatgagtttggtgctaggccaagagattatggatttcgacccagttacgatgaacttgttgcgtggctattcgccttcatcgatattttggtgagattaggaacctcaggagtgcccgagcttgaagatgatgccaggcggatcttggctgataaatttcgctggatttggcgtcatggaggaataaggtcaaaattaattgatgcggctcgtaagttacatgcccatcgcccttggggtgaaggctggaaagctgtccgctcaacaatctactttttccatacaaaaagaaaagataacgaagacgtagaaccattgccggaaatacttgtgacattggaacgagaattagaacctaaagacttggtttcggcaatcatggcttatgtactcagtaataggcgcgatttttgggctctagatgctgattatgagcaccaaggaactaataaattcagtgaaatcaggaaaatactttgtgccaaagctttcaagttggggcacgaatttgcagtatcttcccatggacttgatgagttgtgccctaatctttttttgcgggatggaatgccgtatcgcgtcgaatttggtaaaggcttagctaacgggctcctgacctacgaatttattggcaacaactagtcattcaattggatctacaacacaaatctcaacgtgatgtttcggtcattcgaggtttcattgaagagactcattctatcgattcagcattagcgcaggaactgctcgatcagtgtgcacaacattccgaacttcgattcgaattagtcaaccttcatccttggcaggagtttactgaaatcgatctggatcgttgcatgtcgcttctggatgactctgacatacagccccatatgtatggggcaattctgtggggtgagcaattctctaatttgccagaaagcagggtcctcgagctagctcaaaggctgctgagtaaaccgaatggtgatgaagtagtattggaagcactgagtatgaaactagctgataaaggagatgctacggatacactaggtcttgcgctacgaacaatcggaatatccgctgcaatccagaggttccaaagagatcacaacgatctcggcggatatctggattatgcaatggaacgtgttatcgatgccacattgcgcttcgatggcaacgaggctgaaaagctagaatggctgaatacaatcttcgctgttgttgatgagcattttggctacatttattctttcgaagacgctatcggtatcaccgctgcatggatgccaaaagaatttctcagtcgcatttttgatggtacggaggatcaacaacagaggcggctgcatttcatcaatcatgatgattcacatcagtctcctattgcgaaaatcgatgtagatattttgattgaatggtgcaggaccactaaagaccctcaggtttgggcttcagtcgcttcaggtattaatctatggtcaaaagacggggagcaaagtcctatttgcttgcaggatgatgctctgagatttctagaagcctcacccgagccacgagccgtccttgagatctttgccgaacacgtagcaccttcatcatggttcggtagtcgtgcgaacgtgatgcaacctagggttgaagcgataggccagttggtcacccacgagcgtgcagacatttctaagtcggctagagctgtttatgaaaaactgactgactgggttgaaaaggaaaaagaacgtgagcgattggaagatgaggcattggaacaacggtttgaataaaggctagttgccgtcttcacaggaattctgtttaaaggagaaatcatggaatctgcacgtaataaatataccagtgagattattgaggcagaagatctttggttacttgatgttgtagatacgaacggttacgtatgctggggatgtgggattgagatgtatccttccgcttggcaaaaaggaagtaagaaaagaccgtcgtttaataaaatgcctggaaaagagcatattaactgtgatgcagatgctgaaagcacagtggttaagcagggacagaaaaaaagcgtccgcaacatgctagacagcgcaccgggtttgatgcccgcagggttaaaattgattgaacaacgacccgttgttgatcctggcactactggtagcgacaacaacaccaatccaatacgttctacatcgtcagcatccagcgggggaaatgctccagcgcggcaatcccgccgcccggttaatgctattcgccagatttgtagggcatttattcgcttcccgtatgaccgtggtatgtcattaaatatcccaggtattaatgccgatacttacatgaccgtgtttaaaaaactaaaagacccggttcaaccctaccctgagcgccgagttttttattcgcagttgttatggcagaaatttgagcaagacgaaaaccgaattgtcattccgctctcgggagaatgggcaaaagacgaatctggtaagtttaagccctcgcgtagctataaactacacattgagtggggagactggtcaaaagccaaaaaagactatgcttttgaatgagcttgaaactgtgcaggaagaagcaaaagaagcagtaaataaaaaagctaaagagagagctcaagtcttctttatcggtgaacaaagcactgagaatccggaaatcttctacgtgagtgattaccggttaatctgtgcgattatgggatatataatttacccctgacgtaaatgggccttcttgcaaaatgcaggcccatttacataattattttcgactaccactaaggctacttcaaacctataaatttcattcaatttctcgtgtagacacaattacaacagtcatcataacaatagtcatattaacaatgattggttttccaatagatttatgtggggtattttcatagcgatgtaatttcaaacccatcaagactgatcgtatagtagccctcctgatagacataaaaatatcaaaaccataataatattaattgttagtattgttctttaggactttatcaatctctacttttagatcacctgtagaccatttattaagtctgcggcggatagtttcctctctatcgcctgtatcatttatccatttatctggattgacctttttatcattattacaaatatatggcattaaatattcaagaagttgacgtttatttttccagtcgctatgtgaaggaatatcttcaagtaagataacaactgtatctttaatatattcaagttctgcaagtttatttttccctccagcgcttgagcgcgctcttctgcatactttatcaaaaccacttcttaatcgataaaaactcggtaagtctcggttatcatctcgcgaaatacagacattcatataagaataagcatcaagaagaaacttacaactttcttttttattgcccaatgaatattggaactgcgcccagtaaaaatcttctaaagccatagatagatatatatattcataatgtgcatcatatagtcttgctaatcctgtcagtttatacccgtccatttttcctcgaatttcaatccgatattctgcatatgtttccttataaataaaaggtttctcaaccattattccatcaacatttataaactcttgtgagtagcgtatattgtcgctattagtcatatctacaaaatattgacattgtatttttgaatactcaataattttaaattcttcaattttatcataggctctttgcctgtaagtgcgcagaacatcctggttgctctcctttttttcgacttcaagtttccattccagctcaagaagtttgtcctcacaagcggtacaaacttgcagatagaaatcatcaaaaaattcgcactcacatccttcatgaaaagtaaatccctaaagtgattttattttaatgttacttccagtgtatgacagccccagcgtggttggcaatatggacccacctgaacaaactcatactaaggaagcctagatgttacagaaccctccctccttacatacatccagttacgcaaatattcctgattcaccgaggatcttgaggctaaaagatgtcatgaaaaaaatgggaatttcacgctcaaccatatacgactggcttaatccaaaatcgccacgctacgatggaacatttccaaaacaaaaacgcttgggaaggcaatccgttggctggctggagtcagaactgaatgaatgggtaatgcgacgttagatatcatttcaccgtatcagtgaaccggggcaatgcccccggtttgctccacaaaatcacattcctccccggaattcgaatgcaaaaaaaacagacctgtattaccgcaatgaatacattgcagcgaagttgctgtatcgaatttttttcattccggaggctacatgtctgattcctttgaacggggcattaatgtcctgaagcaacctttatccattcttcctgaacatatctccgatttggttctggagcatatacgccagagtattcattacgaacccgtgattggcatcatgggcaaaacaggtgccggaaaatcctcgctttgcaatgccctttttgaacatcctctcagcccagtcagccatgcagaaggctgcacacgtaaacctttgcattttaccctgaacgctggaggacgcagcctgacgctggtcgatctgccgggtgtagtggcacactaaatttggccacctgatgaaaggtgatattctcaccacaacacaaaacaggtgacttaatgaacaagaaaaccaaacgaaccttcacccctgagttcaggctggaatgtgcacagctgattgttgataagggctactcatatcgacaggccagtgaagcgatgaatgtcggttcaaccacgcttgagagctgggtacgccagctcaggcgagagcgccagggtattacgccctctgccacacccattactccagaccagcaacgtatccgcgagctggaaaagcaagttcgccgtctggaggaacaaaatacgatattaaaaaaggctaccgcgctcttaatgtccgactcgctgaacggttcacgatagccgccagactaagtgacagccacacggttgtcagcctgtgttctgctctggaaatacaccgcagcagttaccggtactggcgaaaacgacgcgatacggttaatccggcacgagtcaggttgtgcagcgaaatacgccgggcgtggaaccaaagtcggggctctgcgggcgcgcgcactctggctgaaatgctgactcaaaacggcgtcccgatgagccgttaccgtgccggacgtctgatgaaatatctgaacctgagcagttgtcagcccggaaaacatcagtataaaaatgcccgtcaggagcataccagcctgccgaatctgcttgagcgtcagttcgcagtaccggagccagaccgggtatggtgtggagatattacgtatctctgggcaggaaatcgctggtgctatctggcggttgttatggatctttttgcccgcagggttatcggctggagtctgtcagcgcatgccgataccgcactgataagcagtgccctgcggatggcctatgagacgcgtggccaaccccgggatgtcgtgttccatagcgaccagggaagccagtatacaggccttaaatatcaacaacttctctggcgttgcagaataaatcaaagcgtcagtcggcggggaaactgctgggataacagccccatggaacgcttcttccgcagtctgaaaacagaatgggtgccaacgaatggttacgcaggcaaggacgaggcccggcagcaaattaatgattacatattgaactactacaacagcgtcagacctcaccattataacggtgggctgacgccggaagagtcagagaacagataccatttttactgtaaaaccgtggccaatattacttgaccactacagtgtgaattaccacccttaattgtcgttccattgctgataccacctgtataaacgtcctgattgccactgtcgattatcgtaccggtggaaatgcccccgtcatgaattgtctgtcttcctccgttaatggttgtattattagcctgccccacaaaattgttatgacttcctacatcttgatatccacccgattcaataagacttccattagataccccgccatgaacattctgctggccatggttgataatatgagtgttatttgttgtacctcgttcatctactctttggctgccatctacagtctcatcgtttaccacaccaataacatcaggagtgaaggccgtcatcccaggcggggcatatatcaaggcagatatcaataaggaaagtactgagcggcgacaataatagggactggtcctgttcataaatttcatcctctgaaaagtgaatactgagtagcgtttaagcgaccttagctttgctgcaacatcagcccacaggcaccagaccaggggattcatcctgaagagacagcgcaagtgtattgtgttcaccgctcatcaaagacatcatgatgaaatgatgatattccgcataagaatgaggcattttttaaacgcagtgcgctgaagtgtggttggataaaaaagtcaatccattcaggaaatacgggcgtattcttttctttcgacaatgaggccgttggcaaaataaaatgatttacataatcgtttctgatgaatatcttctgctcacataaaaatcacacaataactttgagatcgcagattgttttacttttacagcattcgtccccccattgttgggcaaatatagattgggccagagcacgaaagttaataccacgtttgcacagctcctccaacagcacgacaagatgccacatactgcgccccagtcggttcggtttacagactacccgtgcgtccaccgccgataatgtcctgaccagttttttcagtccggacctcctgccacggttttacgttgaagtggtaaccctgagcacgcagttcttcagtcaggcgtggtgcaccgtaacgctgttattgctgggtaagatcaaaaaactttcaggcagctaaggaaagttgaaccagacattagatgaaatatttcaaccaattacagcaccaattcagtcactgccagcccaccaaataaatcaaggggttacatgaaaacgtagcccctttttctttggtagtgacactaaaatggatgtagtgtgaagaataatcccgtttactcaatcaataatacatattgtttcaatctacgttattatctctttgtaaaaattgccatttattaatcattgaaaactgcttttagaacttgatacaacgggactagtcacaacaggactattctcaacgggatcatcctcagaggaactatcatcaaagtcatcatccataaataaaatatcatcgaatggtgccacgcccgtgatgagttttattttattattacgatcagtcaatactccacttaaaccgttttcgctcacaggttttaatgatttttcattactcttgttgtaagcaggcgcattaaaaatacacggagtatcaacatcaaacaatgacgttccccagttcacatattgaatatcatagttactgaagttctgtccagaaaagaagcaccccttaaaatccaatccacgtaaattatataaaccaccctcttctttttggagagtaatgttaattttggctatctcccggacatcatcgccatttttgtatttgaataccgtttcaagatgttctccagacagcttgacttcaggaaataatttgaaatcaaagcctatattattatgtgtcaacgtagatgaacaaaaaatggaaaaagcttgcagtgctgaattatagctatcgattttatcttgaggctgagctcttggtaaaaacttatagcaacactcataaaaattaaacagaagctctgaagaccttgtatttttatcaaataatacccccttgaactcattcacaaacgcatctttttttcttgaatatctatggggtgttcctttgactctgacaaagatgaaatctcatctattttgttttcatatgaattacgtgattccatacagacatttggcggcgtttctaaaataacactacgcgtactacttggcttaagtaaaccaacatgaaaatcactttttcttatattatcgaaaaggttctattcatttctcttagcgcattcaaaaaactgatcggcattatttttattcgataattttttagtttcagaaaacacattttcattgttttccagctttagtttaatgagaagattttcccagacctgcttgcttaaacatattacgtcaggctcaccagaactaactaactcgtgattattattaaagtgtacgttgaatacctttaagttattttcaccaacttcatatttaatacgttttaattgttctccagctcccataatgacaaaggcgttgccttcttgatatatacattcagacatcattttttgtaaagtttcaagagcaccgcgatacgtctctgatgcagcttccttacaaattaattttaaaatactatgagctagtagctccatgtgtttagaagatttattttcattataacttccactacccaaaactgcgctagcgttaaatccgttgcttttactaactaacattgtctattcctcaattaatgtctacatggctatttttaatgttattactgtttgtcactataaaaaaacgctcatttgagaaaattactgatattaactgcttcacttgctacgcatggaacttttaattaaattagcacaggaatgttaaatttaataaacaaaaggttatttcgctgtatgataaaaaaaccgttataatttattagtgaaaatcgtttttcaagtgttagaaatttatatctcaatagcgttggttaatgagcatagccacgctcctgtaacgctcacaaaactcatctgcctgcggcgggtgttctggtcagtagtagatgtttaaggcgtggcagagacatttcatccttactctacggcattgttctacatacattggttgtggtactcactcatcatcagtgagcgaacagagaatagttcagtgatttgagtaattaacctgattaaattaaggggtataataaatgataatactctggctttatcgttaattacttaattccacatgtaagcaatttgcccgcttggcatagcaggcattttttccaggtacttttgaatgagtactgatggataaatacattgcagtggcgtgccacgtaccaaaacaccagccctcattcgaaaccacccaccgcacttcttccttgaaatggcgttagtcatgaaatatagaccgccatcgagtaccccttgtacccttaactcttcctgatacgtaaataatgatttggtggcccttgctggacttgaaccagcgaccaagcgattatgagtcgcctgctctaaccactgagctaaagggccttgagtgtgcaataacaatacttataaaccacgcaataaacatgatgatcatatgatgtaaataacagatttttatgcgttctcattcatccttgctcgtcattacacgcgacataaaacccgacaccgcttccattcgcaaagtcgatactcgcagtcaacaagcaaatgttaataattagcactatctatagttatcatcgattcaatgatactttgtaatgattttgtatctaataatataagtttattacattaactgaagagttttcgcatcattatgatatctgttacttttcactccataaaaataaacttcgtatagcaatatattctttcatagatcttattctgctaatcattagtttcgtatgagcgatttttgacagttgcctctccagaccacatcgataattaataaaacagatttaagcattatccttttccatataaatattggataaaagtaggacatctgtttgcaattactttcacaacaattaaacatttttatgtttccgtatacatcatattactctaccattagaggaactttattatgttttctataaaaccaggacccagaaatttacctatcgacaaccccacattgttatcatggaacattactgacggggatctaaattccaaattaaatacattagaatatctaaactgtataacaaatattattaattcttgtggagtttaccctcaaggattaaaagacagagaaattatatcaacttttcacgcagaaaaagttattaatgatctgttaaaaaacgattataaaatttccctttctccagatacaacttatcgtgagttgaataaagcagcacagcgtagcattacagcgccagacaggataggagaaggaaaatcatgggtttatcaaagagatacaatgattgaaagaggtgataacagcggtgttcatcagtatggtcctgctgaacatttcacccacattatatctgacaaaccgtccccaaaagatgagtatattgcatatgctattaacattcctgactatgagctggcagccgatgtatataatattaacgtgacgtcaccttccgaacagcaagaaacatttaaaatactaatcaatccagaacatctacggcaaacacttgagcgtaaatctcttactgctgttcagaaatcacaatgtgaaatcataacccccaaaaacctggcgaagcgattcttcatgcttttaatgccacctaccagcaaatcagggaaaatatgtctgagtttgcacgttgccattatgggtatatacaaatccctccagtgacaactttccgcgccgacggaccagaaactcccgaagaagaaaagggttactggtttcatgcttatcaacccgaagatctttgtaccatccataatccaatgggagatttgcaggattttatcgcattggttaaagatgctaaaaaatttggtatcgatatcattcctgattatacctttaactttatgggaattgggggtagtggtaaaaatgacctggattatccctctgctgatatacgagcgaagatcagtaaagatatagaaggtggtatccctggctattggcaaggtcaggttttgattccattcattaaagatccagtaacaaaagaacgtaaacaaatccatccagaagatatacatctcactgcaaaagacttcgaagcaagtaaagataacatatctaaggatgaatgggaaaacctccatgcattaaaagaaaagcgtttaaatggaatgcctaaaacaacacccaaaagtgaccaggttattatgttgcaaaatcaatacgttcgtgaaatgcgaaaatatggcgtacgaggtttacgttacgatgcagcaaaacactcaaaacatgaacaaatagaaagatcaataactccaccgcttaaaaattataatgagcggttacacaatactaatttatttaacccaaaatatcaaaaaaaagccgttatgaattacatggaatacctggtaacttgtcagttggatgaacaacaaatgtcatcgctgctttatgaaagagatgatttaagcgccattgatttttcattgctcatgaaaacgataaaagccttttcatttgatggcgatctccaaacccttgcatcaaaaccgggttccacaatctcaagtatcccatcagaaagacggatattgattaatcattaaccacgattttccaaacaatggcaatcttttcaatgactttctatttaaccatcaacaagatgaacaattagcaatggcatatatagccgctctgccgttcagcaggcctttagtttactgggatggccaagtattaaaatcaacgactgaaattaaaaattatgatgggtccacgcgtgtcggcggtgaggcgtagcttaataaaggttgctctacctatcagcagctctacaatgaattccacgcattatatatagataaagcaggaatatggagcgcatttgagggtgtatctgcaactaaaaacgttctggcctttagtcgtggggattctgtgaacattaatcactctcctcatgatggactagttataataaataaaggaaacgaagaagttgaaggtacctggcctaacaaattgcaacctggaatatacaaaaacatggggagtaatagcgttaacattattattaataatacccgaaaaattatcccccctggtaaagtatttacgcttagaggcggaactctaaatatcaatattcctgggcgtagcgctcttcttttagggaaaacaggagaaccgccgaactatctctatttataatttaatgttatatctgccccgataaaacggggcagataatatgtttagtttactaacggtcattttgcagtgaagccatttactgttttttatcgaccagataatctgttctctaatgttaactccccctaacctgttgctttagttattcatttcctgtctcactttgccttaataccctacgttaaatgttactaatttgttgcttttgatcacaataagaaaacaatatgtcgcttttgtgcgcatttttcagaaatgtagatatttttagattatggctacgaaatgagcatcgccatgtcaccctacatctcataagaggatcgcttctgatgaatgcactgaccgccgtacacaataacgctgtcgattcaggccaggactatagcggattcactctcatcccgtcggcacaatccccgcgtctgctggaactcaccttcaccgaacagacgaccaaacagtttctcgaacaggttgccgaatggcccgtgcaggcgctggagtacaaatcgtttctgcgttttcgggtaggcaaaattcttgacgatctgtgtgcgaatcagctgcaaccattgctgttgaagaccctgctaaaccgtgctgaaggtgcgctgttgatcaatgcggtgggtatcgatgatgtggcgcaggcagatgagatggtgaagctggcaacggcggtagcgcatctgattggtcgctcaaatttcgatgcgatgagcggtcagtattacgcgcgtttcgtggtgaaaaatgtcgataactcagacagctatctgcgtcagccgcaccgcgtgatggaactgcacaacgacggcacgtatgtcgaagagatcaccgattacgtgctgatgatgaaaatcgatgagcaaaacatgcagggtggaaattcgttgctgctgcatctcgatgactgggaacatctggaccactatttccgccatccactggcgcgtcgcccgatgcgctttgccgcgccgccgagcaaaaacgtcagcaaagatgttttccatccagtgttcgacgttgatcaacagggtcgcccggtgatgcgctatatcgaccagttcgtccagccaaaagattttgaagaaggcgtgtggttgagcgagctttccgatgccattgaaaccagcaaaggcattctttctgtacccgttcccgttggcaaattcctgttgataaacaacctgttctggctgcacggtcgcgaccgctttactccgcacccggatctgcgccgtgaactgatgcgtcagcgtggctatttcgcttacgccactcaccactaccagacgcatcagtaagcgcaaaggaattgagcggatgtatgattttgtgattattggcggcggcatcatcggcatgtcgaccgccatgcaactgattgatgtttatccggatgcccgcattgcgttgctggaaaaagagtccggcccggcctgtcaccagacgggccacaacagcggcgtgatccatgccggggtctattacacgcccggcagcctgaaggcgcagttttgcctggcgggaaaccgcgccaccaaagccttttgcgatcaaaacgacattcgctatgacaactgcggcaagatgctggtcgccacgtccgatctcgaaatggaacggatgcgcgcgttgtgggaacgcacggcggcgaacggtatcgagcgcgagtggttaaacgccgaggaactgcgcgagcgcgaaccgaatatcaccgggctcggcggcatttttgtgccgtccagcggcattgtcagctaccgcgaagtaacggcggcgatggcaaaaattttccaggccagaggcggcgagattatctataacgccgaagtcagcggccttagtgagcataaaagcggcgtggtgatacgtacccgtcagggcggcgactatgaagcatcgacgctgattagctgttccgggctgatggctgaccggctggtgaaaatgctcggcctcgaaccgggctttatcatctgcccgttccgcggcgagtatttccgcctggcgccggagcataaccagattgttaaccatctgatttaccccattcccgacccggcaatgccgtttttgggcgtgcatctcacccgaatgatcgatggcagcgtcaccgtcgggccaaacgcggtgctggctttcaaacgcgaaggctatcgcaagcgcgacttctcatttagcgacacgctggagattttgggctcgtcggggattcgccgggtgctgcaaaaccatctacgctcaggactgggcgagatgaaaaactcgctgtgcaaaagcggctatctgcgcctggtgcaaaagtattgtccccggctttcgttaagcgatctccagccctggcccgccggtgtgcgggcgcaggcagtatcgccggacggcaagctgattgacgattttctgtttgtcaccaccccacgcacgatccacacctgcaatgcgccctccccggcagcgacatcagcaattcctattggtgcgcatattgtcagcaaggtacaaacgctgttggcaagccagagtaaccccggacgcacgctgcgtgcggcacgtagtgtggatgccttacacgccgcatttaatcaataacctttgaaaacaggacgtaacaatgaaacttaacgccagtaacttattccgccagcaggcattgattaacggggaatggctggacgccaacaatggcgaggtcatcgacgtcaccaatccggcgaacggcgacaagctgggtagcgtacccaaaatgggcgctgatgaaacccgcgcggctatcgacgccgccaaccgcgccctgcccgcctggcgcgcgctcaccgccaaagaacgcgccaccattctgcgcaactggttcaatttgatgatggagcatcaggacgatttagcgcgcctgatgaccctcgaacagggtaaaccgctggctgaagcgaaaggcgaaatcagctacgccgcctcctttattgagtggtttgctgaagaaggcaaacgtatttatggcgacaccattcccggtcatcaggccgataaacgcctgattgttatcaagcagccgattggcgtcactgctgctatcacgccgtggaactttccggcggcgatgattacccgtaaagccggtccggcgctggcggcaggttgcaccatggtgctgaagcccgccagtcagacgccgttctctgcgctggcgctggcagagctggcgatccgcgcgggcattccggctggcgtgtttaacgtggtcaccggttcggcgggcgcggtgggtaatgaactgaccagcaacccgctggtacgcaaactgtcgtttaccggctcgaccgaaattggccgccagttaatggaacagtgcgcgaaagacatcaaaaaagtgtcgctggagctgggcggcaacgcgccgtttatcgtctttgacgatgccgatctcgataaagccgtggaaggcgcgctggcctcgaaattccgcaacgccgggcaaacctgcgtctgcgccaaccgtttatacgtgcaggacggcgtgtatgaccgctttgccgaaaaactacagcaggcggtgagcaaactgcacatcggcgacgggctggataaaggcgtcaccatcgggccgctgatcgatgaaaaagcggtagcaaaagtggaagagcatattgccgatgcgctggagaaaggtgcgcgtgtggtttgcggcggtaaagcggatgaacgcggcggcaacttcttccagccgaccattctggtggacgtgccggccaacgccaaagtgtcgaaagaagagacgttcggccccctcgccccgctgttccgctttaaagatgaagccgatgtgattgcgcaagccaatgacaccgagtttggccttgccgcctatttctacgcccgtgatttaagccgcgtcttccgcgtgggcgaagcgctggagtacggcatcgtcggcatcaataccggcattatttccaatgaagtggccccgttcggcggcatcaaagcctcgggtctgggtcgtgaaggttcgaagtatggcatcgaagattacttagaaatcaaatatatgtgcatcggtctttaactggagaacgcgaatgagcagcaataaagagttaatgcagcgccgcagtcaggcgattccccgtggcgttgggcaaattcacccgattttcgctgaccgcgcggaaaactgccgggtgtgggacgttgaaggccgtgagtatcttgatttcgcgggcgggattgcggtgctcaataccgggcacctgcatccgaaggtggtggccgcggtggaagcgcagttgaaaaaactgtcgcacacctgcttccaggtgctggcttacgagccgtatctggagctgtgcgagattatgaatcagaaggtgccgggcgatttcgccaagaaaacgctgctggttacgaccggttccgaagcggtggaaaacgcggtaaaaatcgcccgcgccgccaccaaacgtagcggcaccatcgcttttagcggcgcgtatcacgggcgcacgcattacacgctggcgctgaccggcaaggtgaatccgtactctgcgggcatggggctgatgccgggtcatgtttatcgcgcgctttatccttgcccgctgcacggcataagcgaggatgacgctatcgccagcatccaccggatcttcaaaaatgatgccgcgccggaagatatcgccgccatcgtgattgagccggttcagggcgaaggcggtttctacgccgcgtcgccagcctttatgcagcgtttacgcgcgctgtgtgacgagcacgggatcatgctgattgccgatgaagtgcagagcggcgcggggcgtaccggcacgctgtttgcgatggagcagatgggcgttgcgccggatctcactacctttgcgaaatcgatcgcgggcggcttcccgctggcgggcgtcaccgggcgcgcggaagtgatggatgccgtcgctccaggcggtctgggcggcacctatgccggtaacccgattgcctgcgtggcggcgctggaagtgttgaaggtgtttgagcaggaaaatctgctgcaaaaagccaacgatctggggcagaagctaaaagacggattgttggcgatagccgaaaaacacccggagatcggcgacgtacgcgggctgggagcgatgattgccatcgagctgtttgaagatggcgatcacagcaaaccggacgcaaaactcaccgccgagatcgtggcacgcgcccgcgataagggcctgattcttctctcctgcggcccgtattacaacgtgctgcgcatccttgtaccgctcaccattgaagacgctcagatccgtcagggtctggagatcatcagccagtgttttgctgaggcgaagcagtagctatgtccgtttgtaagagttaaacgttgctaagggaatgataacgatgcagtaaaaaataataacgatgaggcgatcgacaaagttaaaaacgactgcggactgtcccctcgctcctctggggagaggttagggtgaggggtaatcacgcggctacaccctcaccccggccctctccctaagggagagggagaaaactctcccgctttcgtttttaagattttgttgaccgtctcaattaaacgcgtgacccgacgcgggaaatgtcggggcgctctcccaagtgacacactttcgagaggattcaggatggggcaatcatcgcaaccacatgagttaggcggcgggctgaagtcacgccacgtcaccatgttgtctattgccggtgttatcggcgcaagtctgtttgtcggttccagcgtcgccatcgccgaagcgggcccggcggtattactggcctatctgttcgccggattactggtggttatgattatgcgaatgctggcggaaatggcggttgccacgcccgataccggttcgttttccacctatgccgataaagccattggccgctgggcgggttataccatcggctggctgtactggtggttttgggtactggttatcccgctggaagccaacatcgccgctatgatcctgcactcgtgggttccaggcattcccatctggttattttccctcgtcattaccctcgccttaactggcagtaatttattaagcgttaaaaactacggcgaatttgagttctggctggcgctgtgcaaagtcatcgctatcctggcctttattttccttggtgcagtcgcaattagcggtttttacccttatgccgaagtgagcgggatctcaagattgtgggatagcggcggctttatgcccaacggcttcggtgcggtattaagcgcgatgttgatcaccatgttctcgtttatgggcgcagaaattgtcaccattgccgccgcggaatccgacacgccggaaaaacatattgtccgcgctaccaactcggttatctggcgtatttctatcttctatttgtgctctatttttgtcgtagtggcgttaataccgtggaatatgccggggctgaaagccgttggttcttatcgctcggttctggaattgctcaatattccccatgcgaaattaatcatggactgcgtgatattactttccgtaaccagctgtctgaactcggcgctgtataccgcgtcaaggatgctctactccttaagccgtcgcggtgatgcgcccgcgctaatgggcaaaatcaaccgcagtaaaaccccgtatgtggcggtgttactctccaccggagcggcatttttaacggtggtggtgaactattacgcacctgcgaaagtgtttaaattcctgatagacagctccggcgctatcgccctgctggtttatttagtcatcgccgtttcacagttgcggatgcgcaaaattctgcgagcagaaggaagcgaaattcgcttgcgcatgtggctttatccctggctcacctggctggtcatcggctttattacctttgtgttggtagtgatgctattccgtccggcgcaacagttagaagtgatctccaccggcttattagcgatagggattatctgtaccgtgccaattatggctcgctggaaaaagctggtattgtggcaaaaaacacccgttcataatacgcgctgataatgatcaggagtcacaccatgaccattacgtctctggatggctatcgctggctgaagaacgatattattcgcggtaattttcaaccggatgaaaaattacggatgagtttgctgacatcgcgttatgcacttggcgttgggccgttgcgggaagcactttctcaactggtggcggaacggctggtcacggtggtgaatcaaaaagggtatcgggtggcgtctatgtcagagcaggagctgctcgatattttcgacgcccgcgccaatatggaagcgatgctggtcagtctggcgattgcccgcggtggcgatgaatgggaggcagacgttctcgcaaaagcgcatctgctcagtaagctggaagcctgtgacgccagcgagaaaatgcttgatgagtgggatctgcgtcatcaggcgtttcatacagcaattgtggcgggctgtggttctcactatttgctgcaaatgcgtgaacggttgtttgatctggcggcgcgctatcgatttatctggctgcggcgaacggtgctttcggtagaaatgctggaggataaacacgatcagcaccagaccctgactgcggcggtactggcgcgagataccgcgcgcgccagtgagttaatgcgccagcatttactgacgccaattcccattatccagcaggcgatggctggcaattaactactcttccggaatacgcaacacttgccccggataaattttatccgggctttttagcatcggtttattcgcttcgaagattttattgtacagattagcgttaccgtagacctgtttggaaatggcactcagagtgtcgccagacttaacggtataaaactggctggcagtggctggtgtcgccgttttcacctgatcatcgacactggcaataccggaaatattcccaaccgcaacaaggattttctccttcgcctcctgactcaggccgtcaccagtgaccgtcgctttgccgtcggcaatttgaatgttcactttatcggcatcaggtataccggttttgctcagatgctcctgcaccttcttcgcctgatcgtctttatcgtgctgacctgtaaccgcgtcccagagtttttctccggcatctttcacaaaattgaacagacccatagctacctcattcgttaacggaaacactcagaaagtgtagcagaggaacgcggcgcgttaacgccgcgggggtgagcacaggtttaatcgcgggtttgcacccagaacgcgtgaatcaaaccggggatatacccaagcagtgtcagcagaatattaataatgaacgcccaaccgaaccctttaccgagcagcacgccgagcggcggcagaatgatggtgatgacgattctccagaaacccatatgtactccctataagaaaattactcattgtttaaaaagagattttatctcttaagcgtagtaattttagcggagcctgccagtttcagcttacgcttttactctcatttacgctgctgaggctggtatatgttgcatttttagtttagagtttacttaatttagaaaatacttaaataaatatgactgaactcgcgcaattacaggccagtgccgaacaggcagcggccttattgaaagcaatgagccatcctaaacgattgctgattctgtgcatgcttagcggttcccccggcaccagcgcgggagagctgacgcgcattaccggactgagtgcctctgcgacatcacagcatctcgctcgtatgcgggacgaagggcttatcgacagccaacgggatgcccaacgcattctatattccattaaaaatgaggcggtaaatgccattatcgccaccctgaaaaatgtctattgtccgtaaggagtcactatggctttgacaaccatttcgccgcatgatgcacaagaattaatcgcacgcggcgcaaagttaatcgatattcgtgacgctgatgaatatcttcgtgaacatattcctgaagcagatctggctccattatccgtgctggaacagtcaggtcttccacctaaattacgtcgcgagcaaattatattccactgccaggcaggtaaacgcaccagtaataacgccgataaattagcagcgattgccgcccccgcagaaatatttttactcgaagatgggattgatggctggaaaagagctggattgccagtagcggtaaataaatctcaacccttgccgttaatgcgccaggtgcagatcgctgcgggtggtttaatattaatcggcgttgtactgggttataccgtaaatagcggtttcttcttattaagtggctttgttggtgccgggttactgtttgcaggaatcagcggtttttgtggaatggcaaggttgttagataagatgccgtggaaccaacgaacttgagaagcgacgccggacgcgccctagcagcgacatccggcctcagtaattagatcaggaaatcgtcgagagatttaccttctgccagcgcctgagcaattggcttcggtgtacggccctgaccggtccaggttttagtttcaccgttaacatcggtgaatttatatttcgccggacgcggctggcgttttttaccagcgcgtggtgcagcagcagagctattacctaataactcttccgggttaattccgtcagccttcatcagctccagccaggtgctaattttttcctgacgctcagccagttcacgctgctgctgttcttcttcttcacgtctttctttagtgacaaccctgaatttttcgagcatttcttcaagaacgtcaatggagaattcgcgagccatcgcacggagagtgcgaatgttatttaaactttgtaacattacggacataataaagaaaaccttttaacgccaaaacaaaaaagtatttcgtcgcgtagtgtaagcgatcacttattatatttccacaaaatttaatctatttacagtcctgcgcgagattatttcagctgttatttctgaaactctcagaataatttcaagattatatattagccattttgatgagtaatttagattattggtgaacagaacggcgctctctgctcgctaattccgcaagcctgacaaaaccgaagtgaataaaaatgcaatataacagaataaaagaaaacacccctcactggtgctttctgctgttaatgtacattttctggcataaaaaatactgtaaatgacacggtcacgacatacaccgaattctctacgcttatagcgttacctcacccccaaactttcattagtgaaattaaaggaaatgtcatatctaattgatttaattgaaaataaatcatatcggcatgtaaaaatccacaatgtacaaaaaacgagccgttacggaatattttatctacaaaaactgactaaataaaaatttttcactaattgattagtcatagccagcgatatacgctatgcgaaaatgcagatggcaatgagatccactgttttcatctccattaacatcccattacgcttttattaaggagcattagcatgttctcaccgcagtcacgcttgcgtcatgcagttgcagatacgttcgcgatggttgtttactgttctgtcgtgaacatgtgtattgaagttttcctctccggaatgagcttcgaacagtctttttattccagattggtagcgattccggtgaacatcttaattgcatggccatacggtatgtaccgtgatctgtttatgcgcgcggcacgcaaagttagcccgtcgggctggataaaaaatctggctgatatcctggcttatgtgacgttccagtcaccggtgtatgtggcgatcttgttagtggtgggcgcagacttgcatcagattatggcggcggtcagttcaaacatcgttgtttcgatgttgatgggggcggtttatggctacttcctcgattattgccgccgactgtttaaagtcagccgttaccagcaggtaaaagcctgactcttcttttcgcgactggcatcgccagtcgcgtctttaactggcttcgccaaataaaccattcaaataacgttcaagcgcaacacgcgaactgaagccatgcgggataccgtaatgctcgtgtcgctcgcctgctaaatagagcggaaattgctggtaatgatcgcaagttttaatatcggaagcgggttcagccagtgttgaactgcgttcttttaatgttggatgaattaccagagcggtacgtcccattcgcgcttcgcgattaacatagacataattttccccacggcggtaaccatacgctttctgggttaccacatcgacagtaaaaccgactttttcaagtacgcgcgccacctcgtctggtcgtaaatacatatttgatcctcgttattatcaaccgcgggcctaccttacctgattgcgcattcacaacgctttcagaaaagtccataaagccgcgatgaacctcagttaagaaaattatggtctacactgaaaattacatcgaattctaatgggggatcatatgtttaaccgaccgaaccgcaacgacgttgatgatggcgtgcaggatatccagaatgatgtcaatcaattagctgacagcctcgaatctgtattaaagtcctggggcagcgacgccaaaggggaagctgaagccgcacgcagtaaagctcaggcattgctgaaagaaaccagggcgcgaatgcatggtcgtactcgcgtccagcaagccgcacgcgatgccgttggctgcgcggattcttttgttcgtgaaagaccctggtgtagcgtgggtacagcagctgcggtaggtatttttatcggcgcactgttaagcatgcgcaaatcgtagtgcaaaaatgataataaatacgcgtctttgaccccgaagcctgtcttcggggtttctttttgcctggtgaatcacaaaaattcccctaccccgtcacgctcatatccagggtaatttcgaccactatttgctatatattgtgtggttgaatcttttttcaactacatctagtatctctgtatcaacagtgagacaacccgacgcgtatcatcgcgccgtatcttcattttaaacgtaaatacgaatcatgagcattactatttacactcgtaacgattgcgttcagtgccacgccaccaaacgggcgatggaaaaccggggctttgattttgaaatgattaatgtcgatcgcgttcctgaagcggcagaagcgttgcgtgctcagggctttcgtcagttgccggtagtgattgctggcgatcttagctggtctggtttccgtccggacatgattaaccgtctgcatccagcgccacacgcggccagtgcatgagccagctcgtctacttctccagcagctccgaaaatacgcagcgttttatcgaacgtttaggactgcccgcggtgcgcatcccgctcaatgagcgggaacggattcaggtagacgagccttacatcctgatcgtgccctcttacggcggcggcggtacggctggcgcggtgccacgacaggtaattcgctttttaaacgacgagcacaaccgggcgttgcttcgcggcgttattgcttcgggtaatcgcaactttggtgaggcgtatggccgtgccggagatgtgattgctcagaaatgcggcgtgccgtggctgtaccgttttgaactcatgggtacgcaaagcgatatcgaaaacgttcgtaaaggagtaaccgaattttggcaacgacaaccgcagaatgcctgacgcaggaaacgatggattaccacgcgctgaatgcgatgcttaatctttacgatagcgcaggtcgcattcagttcgataaagaccgccaggccgttgacgcctttattgcgacgcatgtgcgtccgaacagtgtgaccttcagtagccagcagcagcgcctgaactggctggtcaacgaaggttactatgatgaaagcgttcttaatcgctactctcgcgactttgtcattacgctgtttgcccacgcacacaccagcggttttcgtttccagacattcctcggggcatggaagttttacaccagctatacgttgaagacattcgacggtaaacgttatctggaagattttgccgatcgagtcacgatggtggcgctgacgctggcacaaggcgatgagacgctggcgttgcaactgaccgatgaaatgctgtcaggacgctttcagccagccacgccgacattcctcaactgcggtaagcagcagcgcggcgaactggtttcctgttttttgctgcgtattgaagacaatatggagtcgattggtcgggcggtaaattccgcactgcaactgtcgaaacgcggcggcggcgtagcatttttgctgtcgaatctgcgggaagcgggcgcgccaattaaacgtattgaaaatcaatcttctggcgtaattccggtgatgaaaatgctggaagacgcattttcctatgccaaccaactcggcgctcgtcagggggctggtgcagtctatttacatgctcatcatcccgatattctgcgttttctcgacacgaaacgggaaaatgccgacgaaaaaatccgcattaaaacactgtcgcttggcgtggtgatcccggatatcactttccatctggccaaagagaatgcgcagatggcgctgttttcgccctatgacgttgagcgagtttatggcaagccgtttgccgatatcgccattagcgaacactatgacgaactggttgccgatgaacgcatccgcaaaaaatacctcaacgcccgtgatttcttccagcgactggcagaaatccagtttgagtccggctatccctacatcatgtatgaagacacggtaaaccgtgctaaccctatcgccgggcgcataaatatgagtaatctatgctcagaaattttgcaggttaatagcgcctcagagtatgacgagaatctcgactatgcccgtacaggccatgatatttcctgcaatttaggttcgttgaatattgcccacaccatggattcccccaactttgcccgcacggtagagactgccgtacgcggtttaacggcggtgtcagatatgagtcatatccgcagcgtgccgtccatcgaagccggaaatgccgcctcacacgccatcgggctggggcagatgaatttacacggttatctggcgcgagaaggcatcgcttatggttcgccggaagcactggatttcaccaatctctatttctataccatcacctggcacgcactgcgtacctcgatgttgctggcacgcgaacgcggtgaaaccttcgccgggttcaaacagtcacgctatgccagtagtgaatatttcagccaatatctgcaagggaactggcagccgaaaacgacgaaagttggcgaactgtttgcccgtagcggtattacgttacctacccgtgagatgtgggcgcaactgcgcgacgacgtgatgcgctacggcatttataaccagaatcttcaggcggtgccgccaaccggttctatctcttatatcaaccatgctacgtcgagtattcatccgattgtggcgaaagtagagatacgcaaagagggcaaaacaggacgcgtttactaccctgccccgtttatgactaacgagaatctggcgctgtatcaggatgcttacgaaatcggcgcagaaaagatcatcgacacctacgcggaagcgactcgccatgtcgatcagggtttgtcgctgacgctgtttttccccgataccgccaccactcgcgatatcaacaaagcgcagatttacgcctggcgcaaaggtatcaaaacgctctattacattcgcctgcgtcagatggcgctggaaggcactgaaattgaaggctgcgtctcctgtgcactttaaggaatatctatgaaactctcacgtatcagcgccatcaactggaacaagatatctgacgataaagatctggaggtgtggaatcgcctgaccagcaatttctggctaccagaaaaggtgccgctgtcgaacgatattcctgcctggcagacattaactgtcgtagaacaacaactgacgatgcgcgtttttactggcctgacgctgctcgacacgctgcaaaatgttatcggcgcgccttcgctgatgcccgatgcactcacgcctcatgaagaagcggtattatcgaatatcagctttatggaagcggttcatgcccgctcttacagttcgattttctcgacgctgtgtcagaccaaagatgtcgatgccgcctacgcctggagtgaagaaaacgcaccgttgcagcgaaaagctcagattattcagcaacattatcgcggtgatgatccgctgaaaaagaaaatcgccagtgtgtttcttgaatcttttttgttctattccggtttctggctgccgatgtatttttccagccgcggaaagctgaccaataccgcagatctgatccgtctgattatccgcgatgaagcagtccacggttactacataggctataaatatcagaaaaacatggaaaagatatctctgggacaacgtgaagagttgaagagtttcgccttcgatttgttgctggaactctacgacaacgagttgcaatacaccgatgagctgtacgccgaaaccccgtgggctgacgatgtgaaagcgtttctctgttacaacgccaataaggctttgatgaatctgggctacgaaccgttatttcccgcagaaatggcggaagtgaatccggcaatcctcgccgcgctttcgccgaatgccgatgaaaatcacgatttcttttccggttcaggctcctcttatgtgatggggaaagcggttgaaacagaagatgaagactggaatttctgagggtgttattttcaaaaatatcactacccgcagcagggaaataattcccgccaaatagctttttatcacgcaaatattctgtagtgatctacactgatactctgttgcattattcgcctgaaactacaatattcaggcgttttttcgctatctatgacaaaaaatatcaacttttctcgatttgctctcagcccttatatcacgggaaattccggcgatttgctcgcatcaatattcatgccacatttgccctcaggggttgcctcagattctcagtatgttagggtagaaaaaagtgactatttccattgggtaatatatcgacataaacaaataaaggaatctttctattgcatggcaattaaattagaaattaaaaatctttataaaatatttggcgagcatccacagcgagcgttcaaatatatcgaacaaggactttcgaaagaacaaattctggaaaaaactgggctatcgcttggcgtaaaagacgccagtctggccattgaagaaggcgagatatttgtcatcatgggattatccggctcgggtaaatccacaatggtacgccttctcaatcgcctgattgaacccacccgcgggcaagtgctgattgatggtgtggatattgccaaaatatccgatgccgaactccgtgaggtgcgcagaaaaaagattgcgatggtcttccagtcctttgccttaatgccgcatatgaccgtgctggacaatactgcgttcggtatggaattggccggaattaatgccgaagaacgccgggaaaaagcccttgatgcactgcgtcaggtcgggctggaaaattatgcccacagctacccggatgaactctctggcgggatgcgtcaacgtgtgggattagcccgcgcgttagcgattaatccggatatattattaatggacgaagccttctcggcgctcgatccattaattcgcaccgagatgcaggatgagctggtaaaattacaggcgaaacatcagcgcaccattgtctttatttcccacgatctcgatgaggctatgcgtattggcgaccgaattgccattatgcaaaatggtgaagtggtacaggtcggcacaccggatgaaattctcaataatccggcgaatgattatgtccgtaccttcttccgtggcgttgatattagtcaggtattcagtgcgaaagatattgcccgccggacaccgaatggcttaattcgtaaaacccctggcttcggcccacgttcggcactgaaattattgcaggatgaagatcgcgaatatggctacgttatcgaacgcggtaataagtttgtcggcgcagtttccatcgattcgcttaaaaccgcgttaacgcagcagcaaggtcttgatgcggcgctgattgatgcgccgttagcagtcgatgcacaaacgcctcttagcgagttgctctctcatgtcggacaggcaccctgtgcggtgcccgtggtcgacgaggaccaacagtatgtcggcatcatttcgaaaggaatgctgctgcgcgctttagatcgtgagggggtaaataatggctgatcaaaataatccgtgggataccacgccagcggcggacagtgccgtgcaatccgcagacgcctggggtacaccggcgactgcaccgactgacggcggtggtgctgactggctgaccagtacgcctgcgccaaacgtcgagcattttaatattctcgatccgttccataaaacgctgatcccgctcgacagttgggtcactgaagggatcgactgggttgttacccatttccgtcccgtcttccagggcgtgcgcgttccggttgattacattctcaacggtttccagcaattgctgctgggtatgcccgcaccggtggcgattatcgttttcgctctcatcgcctggcagatttccggggtcggaatgggcgtggcgacgctggtttcgctgattgccatcggcgcaatcggtgcctggtcgcaggccatggttaccctggcgctggtgttaaccgccctgctgttctgtatcgtcattggtttgccgctggggatctggctggcgagaagtccgcgagcggcgaaaattattcgtccactgcttgatgccatgcagaccacgccagcgtttgtttatctggtgccaatcgtcatgctatttggtatcggtaacgtgccgggcgtggtggtgacgatcatctttgctctgccgccgattatccgtctgaccattctggggattaaccaggttccggcggatctgattgaagcctcgcgctcattcggtgccagcccgcgccagatgctgttcaaagttcagttaccgctggcgatgccgaccattatggcgggcgttaaccagacgctgatgctggccctttctatggtggtcattgcctcgatgattgccgtcggcgggctgggtcagatggtacttcgcggtatcggtcgtctggatatggggcttgccaccgttggcggcgtcgggattgtgatcctcgccattatcctcgaccgcctgacgcaggccgttgggcgcgactcacgcagtcgcggcaaccgtcgctggtacaccactggccctgtcggtctgctgacccgcccattcattaagtaactctgcacttgcccggtaacgccgggcatatcaccctgccaaaaaaaggaataacaatgcgacatagcgtactttttgcgacagcgtttgccacgcttatctctacacaaacttttgctgccgacctgccgggcaaaggcattacagttaatccagttcaaagcaccatcaccgaagaaaccttccagacactgctggtcagtcgtgcgctggagaaattaggttataccgtcaataaacccagcgaagtagattacaacgttggctacacctcgcttgcttccggcgatgcaaccttcaccgccgtgaactggacgccgctgcatgacaacatgtacgaagctgccggtggcgataagaaattttatcgtgaaggggtatttgttaacggcgcggcacagggttacctgatcgataagaaaaccgccgaccagtacaaaatcaccaacatcgcacaactgaaagatccgaagatcgccaaactgttcgataccaacggcgacggaaaagcggatttaaccggttgtaaccctggctggggctgcgaaggtgcgatcaaccaccagcttgccgcgtatgaactgacccataccgtgacgcataatcaggggaactacgcggcgatgatggccgacaccatcagtcgctacaaagagggcaaaccggtgttttactacacctggacgccgtactgggtgagtaatgagctgaagccagggaaagatgtggtctggttgcaggtgccgttctccgcactgccgggcgataaaaacgccgataccaaactgccgaatggtgcgaattatggcttcccggtcagcaccatgcatatcgttgccaacaaagcctgggccgagaaaaacccggcagcagcgaaactgtttgccattatgcagttgccagtggcagatattaacgcccagaacgccattatgcatgacggcaaagcctcagaaggcgatattcagggccatgttgatggctggatcaaagcccaccagcagcagttcgatggctgggtgaatgaggcgctggcagcgcagaagtaatttttattcgggcggataaggcgtttttgcctcatccgccgctctgtacacaatgcctgatgcgacgctgacgcgtcttatcatgcctacaaaccacatcgcacatttcaacaagctatctttcatcccatattcatcaacatccgctattattgatttccagcttaatcatcacctgatgaacaaaaataatgactaaacctaatcatgagcttagcccggcgctgatcgtgctgatgtctatcgccaccggtctggcggtcgccagtaactattacgcccagccgctactcgacaccatcgcgcgtaacttttccctttccgccagttcggcaggctttattgttaccgccgcgcaattgggctatgcagcaggtctgctgttttttgttcccctcggtgatatgtttgaacgccgccgcctgattgtctcgatgaccttactggcagcgggcggtatgttgattaccgccagcagtcagtcgctggcgatgatgctcctcggtacggcattaaccggtttattctctgtcgtggcacaaattctggttccgctggcagcgacgctggcttcaccggataaacgcggcaaagtggttggcaccattatgagcggtctgctgttggggatattgctggcacgaaccgttgccgggttactggcaaacctcggcggctggcgcaccgtcttttgggttgcctcggtgttaatggctctgatggcgctagcattatggcgtggtctgccacaaatgaaatcagaaacccacctcaactacccacagttgttgggttccgttttcagcatgtttatcaacgataagatcctgcgcacccgcgcattgcttggctgcctgacctttgccaacttcagcattctctggacctcaatggcctttttgcttgccgctccaccttttaactacagcgatggtgtcattggtctgtttggacttgcgggagctgccggcgcgttgggcgctcgtccggcgggcggttttgccgataagggtaaatcgcaccacaccacaactttcggtctgctgctgctattactttcatggctggcgatctggtttggtcacacttccgtactggcgttgattatcggaatcctggtgctggatctcaccgtacagggcgtgcatatcactaaccagacggtaatttatcgaatacaccctgatgcgcgtaatcgcctgaccgcaggttacatgaccagctactttattggcggtgccgccggttcgctaatttcagcctcagcctggcaacatggcggttgggctggcgtttgtctggctggcgcgacgattgccctggttaacttactggtctggtggcgaggttttcatcgtcaggaagccgcaaattaagcaatcagcaaccgttttcgtggctttacacttataagggtgttaagaagcccatcagtctgataaggttaagatattcattcagtctatttataatattaacaatcgttaagcgtacactctatggaaagccctactccacagcctgctcctggttcggcgaccttcatggaaggatgcaaagacagtttaccgattgttattagttatattccggtggcctttgcgttcggtctgaatgcgacccgtctgggattctctcctctcgaaagcgttttttctcctgcatcatttatgcaggcgcgagccagttcgtcattaccgcgatgctggcagccgggagtagtttgtgggttgctgcactgaccgtcatggcaatggatgttcgccatgtgttgtatggcccgtcactgcgtagccgtattattcagcgtctgcaaaaatcgaaaaccgccctgtgggcatttggcctgacggatgaggtttttgccgccgcaaccgcaaaactggtacgcaataatcgccgctggagcgagaactggatgatcggcattgccttcagttcatggtcatcgtgggtatttggtacggtaataggggcattctccggcagcggcttgctgcaaggttatcccgccgttgaagctgcattaggttttatgcttccggcactctttatgagtttcctgctcgcctctttccagcgcaaacaatctctttgcgttaccgcagcgttagttggtgcccttgcaggcgtaacgctattttctattcccgtcgccattctggcaggcattgtctgtggctgcctcactgcgttaatccaggcattctggcaaggagcgcccgatgagctatgaggttctgctgcttgggttactggttggcgtggcgaattattgcttccgctatttgccgctgcgcctgcgtgtgggtaatgcccgcccaaccaaacgtggcgcggtaggtattttgctcgacaccattggcatcgcctcgatatgcgctctgctggttgtctctaccgcaccagaagtgatgcacgatacacgccgtttcgtgcccacgctggtcggcttcgcggtactgggtgccagtttctataaaacacgcagcattatcatcccaacactgcttagtgcgctggcctatgggctcgcctggaaagtgatggcgattatataacccacaagaatcatttttctaaaacaatacatttactttatttgtcactgtcgttactatatcggctgaaattaatgaggtcatacccaaatggatagttcgtttacgcccattgaacaaatgctaaaatttcgcgccagccgccacgaagattttccttatcaggagatccttctgactcgtctttgcatgcacatgcaaagcaagctgctggagaaccgcaataaaatgctgaaggctcaggggattaacgagacgttgtttatggcgttgattacgctggagtctcaggaaaaccacagtattcagccttctgaattaagttgtgctcttggatcatcccgtaccaacgcgacgcgtattgccgatgaactggaaaaacgcggttggatcgaacgtcgtgaaagcgataacgatcgccgctgcctgcatctgcaattaacggaaaaaggtcacgagtttttgcgcgaggttttaccaccgcagcataactgcctgcatcaactctggtccgcgctcagcacaacagaaaaagatcagctcgagcaaatcacccgcaaattgctctcccgtctcgaccagatggaacaagacggtgtggttctcgaagcgatgagctaacgcgtcatctcgctcaaaaatccagatttataaaagaaaaaatgaccggccagcatcgcaacatgctggcctttttggcaagcaggtcggctcagccgatgagttaagaagatcgtggagaacaatatgagcgcaaatgcggagactcaaaccccgcagcaaccggtaaagaagagcggcaaacgtaagcgtctgctcctccttctcaccttgctctttataattattgccgtagcgatagggatttattggtttttggtactgcgtcatttcgaagaaaccgatgacgcatacgtggcagggaatcagattcaaattatgtctcaggtgtctggcagcgtgacgaaagtctgggccgataacaccgattttgtaaaagaaggcgatgttctggtcactctcgacccgacagatgctcgccaggcgtttgaaaaagccaaaactgcactggcttccagcgttcgccaaacccaccagctgatgattaacagcaaacagttgcaggcgaatattgaggtgcaaaaaatcgccctcgcgaaagcacaaagcgactacaaccgccgtgtgccgctgggcaatgccaacctgattggtcgcgaagagctgcaacacgcccgcgacgccgtcaccagtgcccaggcgcaactggacgtcgctattcaacaatacaatgccaatcaggcgatgattctggggactaaactggaagatcagcctgccgtgcaacaggctgccaccgaagtacgtaacgcctggctggcgctggagcgtacccgtattgtcagtccgatgaccggttatgtctcccgccgcgcggtacagcctggggcgcaaattagcccaacgacgccgctgatggcggtcgttccagccaccaatatgtgggtggatgccaactttaaagagacgcagattgccaatatgcgtatcggtcagccggtcactatcaccacggatatttacggcgatgatgtgaaatacaccggtaaagtggttggtctggatatgggcacaggtagcgcattctcactgcttccggcgcaaaatgcgaccggtaactggatcaaagtcgttcagcgtctacctgtgcgtatcgaactggaccagaaacagctggagcaatacccgctgcgcattggtttgtccacgctggtgagcgtcaataccactaaccgtgacggtcaggtactggcaaataaagtacgttcaacaccggtcgcggtaagtaccgcgcgtgaaatcagcctggcacctgtcaataaactgatcgacgatatcgtaaaagctaacgctggctaatccagaggtgcgtgtgatgcaacagcaaaaaccgctggaaggcgcgcaactggtcattatgacgattgcgctgtcactggcgacattcatgcaggtgctggactccaccattgctaacgtggcgatccccactatcgccgggaatctgggctcatcgctcagccagggaacgtgggtaatcacttctttcggggtggcgaatgccatctcgatcccgcttaccggctggctggcaaagcgcgtcggggaagtgaaactgttcctttggtccaccatcgcctttgctattgcgtcgtgggcgtgtggtgtctccagcagcctgaatatgctgatcttcttccgcgtgattcaggggattgtcgccgggccgttgatcccgctttcgcaaagtctattgctgaataactacccgccagccaaacgctcgatcgcgctggcgttgtggtcgatgacggtgattgtcgcgccaatttgcggcccgatcctcggcggttatatcagcgataattaccactggggctggatattcttcatcaacgtgccgattggcgtggcggtggtgttgatgacactgcaaactctgcgcggacgtgaaacccgcaccgaacggcggcggattgatgccgtggggctggcactgctggttattggtatcggcagcctgcagattatgctcgaccgcggtaaagagctggactggttctcatcacaggaaattatcattcttaccgtggtggcagtggtggctatctgcttcctaattgtctgggagctgaccgacgataacccgatagtcgatctgtcgttgtttaagtcgcgcaacttcaccatcggctgcttgtgtatcagcctcgcgtatatgctctacttcggcgcgattgttctgctgccgcagttgttgcaggaggtctacggttacacggcaacgtgggcaggtctggcctctgcgccggtagggattattccggtgatcctgtcgccgattatcggccgcttcgcgcataaactggatatgcggcggctggtaaccttcagctttattatgtatgccgtctgcttctactggcgtgcctatacctttgaaccaggtatggattttggcgcgtcggcctggccgcagtttatccaggggtttgcggtggcctgcttctttatgccgctgaccaccattacgctgtctggtttgccaccggaacgactggcggcggcatcgagcctctccaactttacgcgtacgctggcggggtctatcggcacgtccatcaccaccaccatgtggaccaaccgcgagtcgatgcaccacgcacagttaaccgagtcggtaaacccgtttaacccaaacgcccaggcgatgtacagtcaactggaagggcttgggatgacgcaacagcaggcctccggctggattgcccagcagatcaccaaccaggggctgattatttccgccaatgagatcttctggatgtcagccgggatattcctcgtcctgctggggctggtgtggtttgctaaaccgccatttggcgcaggtggcggcggaggcggtgcgcactaagtacaactaagccagttcatttgaactggcttttttcaattaattgtgaagatagtttactgactaaatgtgcagttcctgcaacttctcttccggcagcgccagttcttcgttgctgttgatgcgcacgtcacgttccagaatgctacgcgcaatatcctgcgcttcctgcaacgagtgcatctggtaagtgccacactggtagacgttcagttccgggatctgattctgatcctgcactttcagcacgtcttccattgccgctttccaggcatcagcaacacgctgctcatctggcgtaccaatcagactcatataaaaaccggtgcggcagcccattggcgagatatcgataatctctacaccattaccgttaagatggttacgcataaaaccagcaaacaggtgctccagggtatggatccctctttctggcatcacttctttgttcggcacgcagaagcgcagatcgaacacggtgattgcgtcgccatgcggggtgttcattgttttcgccacccgaactgcaggcgcttccatccgggtatgatcgactgtgaagctatctaacaacggcatttagccacctccggtaatttttttaaaaattttctgaactctttcttcccaggcgagtctgagtatatgaaagacgcgcatttgttatcatcatccctgaattcagagatgaaattttggccactcacgagtggcctttttcttttctgtcaggcgtgtttttccagccacaccgcaaacggttcggtatctgcggcttccatttcctgctgacggcgttcagatgctcgcgctcggctacaaaatcctcttcgcgcagaatttccagcggctcttcacgcagcagattacggtacgcttcagcaaacgctttgcctgttccgccaataccagtatcaatcatagaccttaagatacgggcagagaaagtcagatcgggattatcgaagcaggcaaccagttcatcacacactttctgatacgcttcgccgccgttaatgctatccagcgtttgcgcgacgcgtttcagatcgcggaacagatctttacccacctgcagtaacgggaactgcgcggtttcgcagccgatacccagcgtcaggcccggtttgcgaccttcaaggatcacccggttccagttaacgcgcgtacaggcaagttcgctactgctcatttccggtgcatcagccagcgcacaccagaccataaacaggtcgaggaatcgcacctgctgttcatctacaccaatcggcgagaacgggttgatgtccagcgaacgcacttcaatatattcaatgccgccacgtaacagcgcatcagaaggtgactcgccgctgcgggtaacgcgttttggacgaatcggcgcatacagttcgttttcaatctgcagcacgttgctattgatttgcagcctcttaccgtctttctcaataccaatcttcgcgtactcttccgatggcgttttgattgcctgtttaaggcccgctacgtactcgtaaagatcgttgaaggtaataccaagattgctttgcgatttattggtatagccgagatcgctcaaacgaagagaggtcgcatacggcaggtaatacataccgcactcggttttctcaaacggcagcgacgttggttttccttgcaggaaagaagaacaaatcgccggagatgcaccaaacagataaggaatgacccaaccgaaacgatagtaattgcggataacgcggaaatagcccgcagaaattttctctttggcatcagcgcccgagatatcaccgcacttcgcttgccagaatgccattggcaaagagaaattgtagtgcacgccggaaatggtttgcatcagcgcgccgtagcgatttttcagcccttcacgatacagcgttttaaagcgtccggtgttagaagtgccgtactgtgccagttcgatgtcctgaccttctgcgatgtagcatggcatacttaacggccacatccgctcatcacccatattgcgcgccgtataacgatgcagatcgcgcataaaggtcagcatatgttcaatatcaccatccactggtgtaatgaattccagcaatgcttccgcaaaatcggtagtaatccatttgtgcgtcagtgcggaacctaatgcttcaggatgacctgttgttgccagtgtgccatcagcattaacacgcaaagtttcgcgctccagcccacgctgtatcccctttaacgcctgaggatgtttttccagccaggccagcgcctgtgatacgtccgggatcaaattgacctcccgcctgtcaaaatcgttttaattagcataactgtaatggtgaccatatgtgcaggcctacaattagtgccaccacatcatgccctgaacggtcgctgctgcaactgcaacatagcgtaacgctttaccaaggcacaaaaaaaagattactggcccccaggagatgcgcatccatcccgctaacagacacagtaaatcgccaaccacgggcatccagcttaataatagcgtgactgcaccatagcgtttcagccagccggtagctttctcttgccagcgcgatgttttacgcaatggaaagaaacgcccaaggataacgttagttaaccctccaaggctattacccattgttgctgttaaaactaaaacccagggataactgatcccggaaagcaacattgccaccagcacgacttcggagttgccgggtaatagtgtagcgctgagaaaactactggcaaacaacgagaaaagcgataacgcttcactcacagcaagcgaacatccacggcgtccatgcctgctgcacgggccgcctgaataccgaaatcggcatcttcaaagaccacacactgcgtcggttgcacgcccatacgctgcgcgcacaacaaaaatgtgtctggcgcgggtttatggtgtttgacgtgatcagcagcgacgacggcgtcaaaataacggcgtaatcccaggtgcgccagcaatgcctcagcgatggcgctttcactccccgttcctacagccattgggcgacgaccatgccaacttttcaccacttcaacaagaggaagcggctcgacactatccagcagcatacttcttactgcttctgttttttcacgcgctaacgcatgcgggtcgagatcggcctgattcagctcaataattgcctgagcaatacgccaggtgggcgatccattaagcgcaatcattgcctgaacatcgtactgaagaccgtagtgccctaatacttcgcgccacgctttacggtgcgtaggctccgtatccaggattgtgccatccatatcaaaaattaaacctgcataacgctcgtacatggtcttctcgcaagtcgaaaaatatgacgctactttagcgtaattgcttgattttgtcgctgatggcgaaggagaagaaaattcaggaaatggataaagtagttatttagaaatgagatatttttgaaggaaatttttgggagaagatggtgcatccgggaggattactcactggcgttcgcccttcgggccgttgctgacgcaacgttatcctccctggtgcctgcggttaataccgctatctcttcgataccttcattgctgaaggttacggagaatatggtgcatccgggaggattcgaacctccgaccgctcggttcgtagccgagtactctatccagctgagctacggatgcatcgggaaaatttattttactgctgatattgatatcgctactaaagccatatcaagtaagagatggtgcatccgggaggattactcgccttgcggctcgcccttcgggccgttgctaaagcaacgttatcatccctggtgcctgcggttaattccgctacctcttcgataccttcattgctgaagatttcggagaatatggtgcatccgggaggattcgaacctccgaccgctcggttcgtagccgagtactctatccagctgagctacggatgcatcgggaaaatttattttactgctgatattgataccgctactaaagccatatcaagtaagagatggtgcatccgggaggattactcgccttgcggctcgcccttcgggccgttgctaaagcaacgttatcctccctggtgcttgcggttagtaccgccacctcttcgataccttcatcgctgaagattacggagaatatggtgcatccgggaggattcgaacctccgaccgctcggttcgtagccgagtactctatccagctgagctacggatgcatcgggaaacttactttactgcagattttttgataccgctactaaagccgtatcaagtaagagatggtgcatccgggaggattactcgccttgcggctcgcccttcgggccgttgctaaagcaacgttatcctccctggtgcctgcggttataccgccacctcttccataccttcatcgctgaaagtacgtagaatatggtgcatccgggaggattcgaacctccgaccgctcggttcgtagccgagtactctatccagctgagctacggatgcaaatggcggtgaggcggggattcgaaccccggatgcagcttttgaccgcatactcccttagcaggggagcgccttcagcctctcggccacctcaccacacgcctcttacgagtgcttcgaagaacttgtttatcgctcatcgtcgctgcgtggcgcacatattactttctgagacttataagtcaaacaatttttcctacacttttatcgtttgcacacttcacgttcaattagtctgtaaaacgtcaaaaagagtgttttatcaacagaaaaatggaggtctgacagatagtagtaatgcaaaaaaatggagacttaagttgaatgaacgggagtaaagcgaaaagactatagagtgaaggagaaattttgagggtgcgtctcaccgataaagatgagacgcggaaagattagtaactggactgctgggatttttcagcctggatacgctggtagatctcttcacggtgaacagaaacttccttcggggcatttacgccaatacgtacctggttgccctttacccctaaaactgtcacggtgacctcatccccaatcatgagggtctcaccaactcgacgagtcagaatcagcattctttgctccttgaaagattaaaagagtcgggtctctctgtatcccggcattatccatcatataacgccaaaaagtaagcaatgacaaacacattacatgtaagcagtcatggcattacattctgttaaacctaagtttagccgatatacacaacttcaacctgactttatcgttgtcgatagcgttaatgcgaatgccgtgaagcgagtccacggcattgcctgacgcttatattattgcaatttcgcgctgacccagcctttcacactggctaacgctgcaggtaaggccgcagcatccgtaccaccggcttgcgccatgtcaggacgtccaccacccttgccgcccacctgctgagcgaccataccaatcacttcccctgctttcacacgatctgtgacgtccttagatacgcctgcaatcagagaaaccttaccttcggctaccgttgccagcacgataattgtcgaccccagctgattttttaaatcgtcaaccatggtacgcaacattttcggctcaacaccgctaagctcgctaaccaacagcttaacaccattaacatcaattgccttactggaaagatttgcgctctcctgtgcggcagcttgttctttaagctgttgtagttctttttctaactgacgcgtacgttccagtactgagcgcactttatccgccagattattgctatcgcctttcagcagatgcgcgacttcgcttaagcgatcgctgtctgcatgaacggtggtgatagcgccttctccggttaccgcttcgatacgacgaacgcctgcagcagtacccgattcagagatgatgcggaacagaccaatatcaccagtgcggctggcgtgagtaccgccacacagctcggtggagaaatcgcccatgctcagcacgcgtacacgctcatcatacttctcgccgaacagcgccatcgcacctttcgctttcgccgcttcgagatccatgatgttggtttcgatcggcaaattgcgacgaatctgtgcgttcaccaggtcttcgaccgcacgaatctcttccggtttcatcgcttcgttgtgtgagaagtcgaagcgcagcaccttgtcgttaaccagtgaacctttctgcgatacatgagtccccagaacctggcgcagcgcagcgtgcatcaggtgcgttgcggagtgattcagacgaatacgggcgcgacgagcctcatcaacatcagcctgcacagcgtcgcccactttcagagaacccgcagcaagtttaccgatgtgaccaatcgcctggccgtatttctgcgtatcttccaccgcgaaggagaagttagcgcctttcagttcgcctttatcaccaacctgaccgccggattccgcatagaatggtgtttgatccagcacgaccacagcttcctggcctgcattgatggcatcaaccgctttaccatcaacaaacagcgcggtcactttgccgttcagttccagatggtcatagcctttaaattcagatgcactatcaacacggatcattgcgttgtaatcggcaccaaagccgctggcttcgcgcgcacgacgacgctgctcttccattgctgcttcaaaaccagcttcgtcaactttgatgttgcgctcacgacaaacatcagccgtcaggtcaaccgggaagccataggtgtcgtacagacggaaagccgtttcaccatccagcgtatcaccagaaagttttgccagctcttcatccagcaacgccagaccgcgctccagagtacgggcaaactgctcttcttcagtcttcagcacctgctcaacctgcgcctgctggcgtttcaggtcttcacccgcagagcccataacgtcgatcagcggaccaaccagtttgtagaagaaggtttctttcgcgccgagcatattgccgtgacgcactgcgcgacgaatgatacgacgcagtacataaccacggttttcattggacggcattacgccatccgcgatcaggaacgcacaagaacgaatgtggtcagcgattacgcgcagcgatttattgctcagatcggtcgcgccagtgactttcgctaccgcctggatcaacgtgcggaacaggtcgatgtcatagttagagttaacgtgttgcagcaccgcagcaatacgctccagacccataccggtatctacagacggcttcggcagcggttccatcgtgccatctgcctggcggttgaactgcatgaagacgatgttccagatctcaatgtagcggtcgccgtcttcttccggacttcccggagggccaccccaaatgtggtcgccgtgatcgtagaagatttcggtgcacgggccgcacggaccagtgtcacccatctgccagaagttgtcagatgcgtatggcgcacctttgttatcgccgatgcgaataatacgttcgcgcgggatccctacttctttttcccagatttcgtaggcttcgtcgtcgctttcatagacggtaacccacagacgctctttcggcagggcaaaccatttttcgctggtcagcagttcccatgcaaactgaatggcatcgtgtttgaaatagtcgccgaagctgaagttgcccagcatttcgaagaaggtatggtgacgcgcggtgtaaccgacgttttccaggtcgttgtgtttaccacccgcacgcacgcagcgttgggaagtggtagcgcgggaataattacgcttgtcgagcccaaggaacacatccttgaactggttcatcccggcgttggtaaacaacaaagttgggtcgttatggggtaccagggagctgctggcaactacctgatgtcccttactatggaaaaagtcgagaaacgcctgacggatctcagcggtgctcttgctcataattatcctgaaatcaagctaacgaaatatcgccaccagctccagcgtgtcttaaccgccgggctggtaactgaaaagtgggaataagataagttttcttgactgggaagtaaaataccgtatgcgttcagtcggcaaaatttcgccaaatatcctggatatcttccatcagatagccacgatagagcagaaaacgctggatcttaactttttctgaaaagacagttggcaaaggttcaccatattttcgcgtcgcctgatcgcgcgccagtgcgcaccagtcgatgtcacattcacgcatcgctttttctgtcgcttcgcgggaaatacctttctgattcagttcctgacgaatacgtgcaggtccataacctttgcggctacggctggcgataaagcgcgcaacaaatcggctgtcatcgagatagccatgttcatggcaccaggcaataacgcgctcgtaatcttctgccgtagcatcaatctcttctgggccatttttgcccataatcggtgccgcgagtttacgtcgcagttcttgctcactgtgatcgcgcaccgccagaatgcgtaccgcacgatccaacaggcgagcatatgccgggcgacgggacgttgattctgtcatggcatatccttacaacttaaaaaagcaaaagggccgcagatgcgacccaggttttgctgataaacagatttaatagtcaatgagtgtgcagaatgttcccgcaggcccaattcgttagaggatcgaggtgagagtaatttttcacgccagtgctggcctgttcccctcaccctaaccctctccccaaaggggcgaggggaccgtccgtgcacacattatctattatcatcaataacgaacgattaaaaatcttcgttagtttctgctacgccttcgctgtcatctacagagaaatccggcgttgagttcgggttgctcagcagcaactcacgtactttcttctcgatctctttcgcggtttccgggttatctttcagccaggcagttgcattcgctttaccctgaccgatcttctcacctttgtagctgtaccacgcgcctgctttctcgatcagcttctcttttacgcccaggtcaaccagttcgccgtagaagttgataccttcgccgtagaggatctgaaattcagcctgtttaaacggtgcagcgattttgttcttcaccactttcacgcgggtttcgctacccaccacgttttcgccctctttcaccgcgccgatacgacggatgtcgagacgaacagaggcgtagaatttcagcgcgttaccaccggtagtggtttccgggttaccgaacatcacaccaattttcatacggatctggttgatgaagatcagcagcgtgttggactgcttcaggttacccgccagcttacgcatcgcctggctcatcatacgtgccgcaaggcccatgtgagagtcgccgatttcgccttcgatttccgctttcggcgtcagtgccgccacggagtcaacgacgataacgtctactgcgccagaacgcgccagggcgtcacagatttccagtgcctgctcgccggtgtccggctgggagcacagcaggttatcgatatcgacgcccagtttacgtgcgtagattgggtccagcgcgtgttcagcatcgataaacgcacaggttttaccttcacgctgcgctgcggcgatcacctgcagcgtcagcgtggttttaccggaagattccggtccgtagatttcgacgatacggcccatcggcagaccacctgccccaagcgcgatatccagtgaaagcgaaccggtagagatggtttccacatccatggaacggtcttcacccaggcgcatgatggagcctttaccaaattgtttctcaatctggcccagtgctgccgccaacgctttctgtttgttttcgtcgatagccatttttactcctgtcatgccgggtaataccggatagtcaatatgttctgttgaagcaattatactgtatgctcatacagtatcaagtgttttgtagaaattgttgccacaaggtctgcaatgcatacgcagtagcctgacgacgcaccgcatcacggtcgccgctgaagcattcccgccgggtaatgccttcaccgcgggcagtggcaaaagcaaaccagacggtgccgacaggcttctcttcactgccgccatccggcccggcgataccactaatagacacggcataatcagcacgagccgctttcagtgcgcctatcgccatttccaccacgacgggttcactcaccgcgccatgctgcgccagcgtctcttcgcgtacgccgatcatctgcgctttggcttcgttactgtaggtgacaaatccgcgttcaaaccaggcggagctaccggcaatatcggtaatcactttcgctacccaaccaccggtacaagactcggcagttgttacggttgcgccacgggctttcagcgcctgcccaacctgttcacttaactgcatcagttcactgtcagtcatcacaacctctgtcagtcaaaaatttatgccggacaagatagcactttcgtcaggaagatggtgttggcgttgcaattttacgaggaggattcagaaaaaagctgattagccagagggaagctcacgcccccctcttgcaaatagttactgcacgcgcgccagcgccacggcttgtcctaactgccagaccgccattgcgtaatgggtgctgtggttataacgggtaatggtgtagaagttcggcagaccgtaccagtactggtaaccggtaccgacatccagacgcagcaggctggcttgttgatggttgcccagcggctgctgtggcgttaaacctgccgtggcaagctgcgaaatgctgtacctggttttgaagccatttggcaagcctggagcctgaccgtttgccattaccgcgacctgatcgcctttcacccagccgtgcgctttgaaatagttcgccacgctaccgatcgcatcaaccggatcccacaggttgatatgcccgtcgccgctgaaatctaccgcatattgtttgtaagacgacggcataaactgtccgtagcccatcgccccggcaaaggaacctttcagattgagcggatcgtcctgctcgtcgcgcgccatcaacaggaaggtttccagctcgccagagaaatactccgcgcggcgtgggtagttaaatgacagcgttgccagcgcatcgaggatgcgagttttccccatcacgcgcccccagcgggtttcaacgccgataatcccgacgataatttccggcggtacgccatacacctgccacgcgcgattcaacgcatcttcatactgattccagaaaaccacaccgttctgcacgttgtccggcgtaataaattttttgcgataacggagccatgcgccgttcggacctgatggcggtttcaccgatgtggttggtgcctggttatccatcagccgcagtaccgaatccagacgattcgcctgggagagaatttcctgcaactgctgacgatcgaaaccgtgtttgttcaccattttgtcgatgaactgctgggcattcgggttattagcgaaatcgccgcccatctgcatcacattgtgctgcggctcaagcagnangccncnannnggnnttccggtgg

SEQ ID NO: 190 - DNA, 181540 bp, Escherichia coli
tggtcagtctcagtaggttttggcttgctgctacaggcggcaagcaacacaaaaaggggaagcaatgttacataacgacgcttgaacatgaggggtccatttaacagattcaaccaggggcaagtatggtaaagcatcacgccccacacaaggaagcggtagtcactgcccgatacggactttacataactcaactcattcccctcgctatccttttactcaaactttcaaattaaaatatttatctttcattttgagatcaaaataacacttttaaatctttcaatctgattagattaggttgccgtttggtaataaaacaataaatcctgaaggagagaacaatgatagaaaccattactcatggtgcagagtggtttatcgggctgttccaaaagggcggagaggtgtttaccgggatggtgaccggcattcttccgctgttgattagcctgctggttatcatgaacgcactgattaattttatcggtcagcatcgtattgaacgttttgctcaacgttgcgccggtaaccctgtttcccgttacctactgttaccgtgcattggcacgtttgtcttttgcaatccgatgaccttaagcctgggtcgctttatgccggaaaagtacaaacccagctactacgcggcggcctcttatagctgccactcaatgaatggcctcttcccccatatcaaccctggcgaactgtttgtttatcttggcattgccagcggtctgacaacgctgaacctgccacttggcccactggcggtgagttatctgctggttggtctggtcaccaatttcttccgcggctgggtgaccgatctgaccaccgccatttttgagaaaaagatgggcattcaacttgaacaaaaagttcacctggcaggagcaacatcatgacgcatattcggatcgaaaaaggaacgggtggctggggcggcccgcttgagctgaaagccacgccgggaaaaaaaatcgtctatatcaccgccggtacccggcctgcgattgttgacaaactggcacagcttactggctggcaggctattgacggatttaaagaaggtgaacccgcggaggcggaaattggtgtcgcggtaatcgactgtggcggcacattacgctgcggcatctatccgaaacgacgtattcccaccattaatatccactcgacgggcaagtccggtccgctggcgcagtacattgtggaagatatttatgtctctggcgtaaaagaagaaaatatcactgtagtgggtgatgcgacaccacaaccctcttccgtgggccgtgactatgacaccagtaagaaaatcaccgaacaaagcgatggtttactggcgaaggtgggaatgggcatggggtccgccgttgcggtgctgtttcaatctggtcgtgacaccatcgacactgtattaaaaaccattctgccgtttatggcattcgtctcggcgctcattggcatcattatggcttctggccttggtgactggattgcccacggtcttgctccgctggcgagccatccactgggtctggtcatgctggcgctcatctgctccttcccactgctttcacctttcctcggcccaggcgcagttatcgcacaggttatcggcgtattgattggcgtgcagattggtctcggcaatattccgccgcatctggctttaccggcactgtttgccatcaacgcgcaggcggcctgcgacttcatcccggtcggtttgtcgctggcggaagcccgtcaggacacggttcgcgtcggtgtcccttctgtactggtgagccgctttttaaccggcgcaccgactgtactgatcgcctggtttgtctccggttttatctatcaatagaggctgaaacatgaccgttatttatcagaccaccatcacccgtatcggcgcgagtgccactgacgccctcagcgaccagatgctcatcacctttcgtgaaggcgcgccagcggacctcgaagagtattgcttcattcattgccacggcgagttgaaaggtgcactccatcccggtttgcaatttacgctcgggcagcatcgctatccggtgaccgctgttggcagcgtggcggaagacaaccttcgcgaactgggtcatgtcaccctgcgcttcgatggtttaaacgaagcggaatttccgggcactgtccatgtggcaggccctgtacccgacgatatcgcgccgggatcggttttgaagtttgaatctgttaaggagtaaaaaatgaatcaggttgccgttgtcatcggtggtgggcaaaccttaggcgcgttcctgtgccacggtctggctgccgaggggtatcgcgtcgcggttgtcgatattcagagcgacaaagccgcaaatgtggcacaagaaattaacgccgaatatggtgaaagtatggcgtacggttttggtgctgacgccactagcgagcaaagcgttctggcgctctctcgtggggtagatgaaatctttggtcgcgtggatttgctggtctatagcgccggaatagcaaaagcagcctttatcagcgacttccagctcggcgattttgaccgttcgctacaagtgaatctggtgggttatttcctgtgtgcccgtgaattttcgcgtttgatgatccgcgacgggattcagggtcgcattattcagatcaactcgaaatccggcaaagtgggcagcaaacacaactctggctacagcgcagcgaaatttggtggcgtcgggctgactcaatcactggcgctggatctggcggagtacggcattacggtgcattcactgatgctcggtaacctgctgaaatcgccgatgttccagtcactgttgccacaatacgcgaccaagctgggtatcaaaccggatcaagtcgagcagtattacatcgacaaagtaccgctcaaacgcggctgcgattatcaagatgtgctgaatatgctgctgttctacgccagtcctaaggcgtcgtactgcaccggacagtcgatcaatgtcaccggcggtcaggtgatgttctgatcaacagcggagatccattaaggatctccgtgagactatagaatgcctgatgcgctacgctcatcaggcatacaggacttccgccactacattaaggaaaagttatggtatccgcactcatcaccgtcgccgttatcgcctggtgtgcgcaactggccttaggcggctggcaaatttctcgttttaaccgtgccttcgacacactatgccagcaagggcgggttggcgtgggccgttccagcgggcgctttaaaccgcgggtcgtggtcgccatcgcgctggacgatcagcagcgcatcgtcgacaccttgtttatgaaaggactgaccgtcttcgcccgaccgcaaaaaattcccgcaattaccggcatgcatgcgggtgatttacagcccgatgtgatctttccccatgatccactatcacagaatgctctatcattggcgcttaaactgaaacgtggataatttcgttgtgaatgttacttgcttgcgaagttatcattttgaaacctaaatcaggtaatcacgcccatgaaacctcgtcagcgtcaggccgccattctggagtatctgcaaaagcagggtaaatgctcggttgaagaattggcgcaatactttgacaccacaggcacaaccattcgcaaagatctggtcattctggaacatgccggaaccgtcattcgtacttatggcggagtggtgttgaataaagaggaatccgatccgcctatcgatcataaaacactcatcaacacccacaagaaagagctgattgcagaagctgccgttagttttatccatgatggcgattcgatcattcttgatgctggcagtaccgttttgcagatggttcccctgctctcgcgctttaataacatcacggtgatgaccaacagcctgcatatcgtcaatgcgctatccgaactggataacgaacaaactatcctgatgccaggcggaacgtttcgtaaaaaatcggcctcatttcacggacagctggcagagaatgccttcgaacatttcagtttcgataaattgtttatgggcaccgacggcatcgatctcaatgcgggcgtaaccaccttcaacgaggtttataccgtcagtaaggcaatgtgcaatgccgcgcgcgaagtgattttgatggcggactcatcaaagtttggccgtaaaagccccaacgtagtttgcagtcttgaaagcgtcgataagctgattaccgacgcaggtatcgatccggcgtttcgtcaggcgctggaagagaaagggatcgatgtgatcataaccggagagagcaatgagtgaagcactacagaacgcgggacgtcagacgttaatgctggagttgcaggaagcaagccgtttaccggaacgtctgggcgatgattttgttcgcgccgccaatatcatcctgcactgcgaaggcaaagtggtggtttcgggaattggcaaatcgggccacattggtaagaaaatcgccgcaacacttgccagtaccggcacaccggctttttttgtccatccggcagaagcactgcacggcgatctggggatgattgaaagccgcgatgtgatgctgtttatctcttactccggtggcgcgaaggaactggatctgattattccgcgtctggaagataaatctatcgcgctgctggcgatgaccggcaaaccgacgtcaccgctgggcctggcggcaaaagcggtgctggatatctccgtagaacgcgaagcctgcccgatgcaccttgcgccgacctccagcaccgtcaataccctgatgatgggtgacgcgctggcgatggcggtcatgcaggcgcgcggatttaatgaagaagattttgcccgctcccacccagccggggcactgggcgctcgcttgctgaataaagtgcatcatctgatgcgccgtgacgatgccatcccacaggtggcgttaaccgccagcgtgatggatgcgatgctggaactcagccgcaccggtctggggctggtggcggtatgtgacgctcaacaacaggtacaaggcgtctttaccgacggcgatttacgtcgctggctggttggcggcggcgcactcaccacgccagttaatgaagcgatgacggtcggcggcaccacgttgcaatcgcaaagtcgcgccatcgacgccaaagagatcctgatgaagcgcaaaatcactgccgcaccggtggtagatgaaaacggcaaactcaccggcgcaattaacctgcaggatttctatcaggccgggattatttaatccttcattcccagacgtttcgccagccgatgcaggttggcgacgtcggtttccagcatccgcgcgcaggcagcccagttgtgatgattttgtgccagcgcctgacgaatagtttcacgctggaacgcttctgtcgcttcacgcaggttttgcttaacaacgggcaccgccgccgcttctggcggcggcaacgtcacctcaggaaaagcaaaatgttgcgcctcaagaatcacttcatcgccgttgcgggtggctctcgacagcactaccgcccgatgaatagcatgttccagttcgcgcacgttccccggaaaacgatagtgttgcagtaaatttcgcgctccggcacttaataccacgcgggagagccccagccgcaaacgacactgctcgcagaaataccccgccagcagaatgacatcatcgccccgctcacgcagcggcggcaccgaaagtggaaacacgctcaggcgatgaaacaagtcagcgcgaaatcgccctgccagcacctcttcgcgtaagtcgcggttagtcgccgccagcacgcgcacatcgacccgcaaactgcggtcatcgccaacgcgctgaatatcgccatactgcaacaccctcagcagcttggcctgcaatgccaacgacaactcgccgatctcatccagaaacagagtgccgttatccgccatttcaaacttcccgctgcggttactgatagcgccagtaaacgctcctttcacatgcccgaacagttcactttccgccacactttccggcagtgcggcacagttgagatagaccagcggattcaccgcccgtggcgaggcttcatgaatcgctttcgccaccagctccttaccggttcccgtctcaccgctgatcaggacgttgagatcggacgccgccacaatctcaatctcttttttcagttgcgtcatgccaggggacaagccaatcatctgcgtctgtttcaccgcttcaaacggcgtggcatcgcctggcatcatattctggctttccagttgttcaatcagcaacgcattgcttaacgctcccgccgccagcgcagcaatcagccgtagctcttcgtcgctgaaaacatcgaactgatcgggctgcatcccgtcgagcgtcagtgcgccgatcaggttttgcccggcaaacaatggcagaccaacgcaggcgtgaaccttcagactctcctgcccaggaatcaaaccgtcatagggatcgggcaattcgctgtctgcgggaaagcgcaccacatccccggcgcgggcaatcgcttccagccgtggatgcccttccagcgcaaagcgtctaccgagtacatcctttgccagaccgtcgatggcaagcggaataaactgccgcgaatcgtaacgtagcaacgcagacgcatcgcactccagcacctgacgtagcgtggtgatcaggcgctgaaaacgatcctgatgaccaatcccacgctgcaattcgatggcgatattcgccagcacatcaacggaaaaactcatctttgcctcactgtcaatttgactatagatattgtcatattgaccatttgattgatagtcatttgactactcattaatgagcataattttatttatagagtaaaaacaatcagataaaaaactggcacgcaatctgcaattagcaagacatctttttagaacacgctgaataaattgaggttgctatgtctattgtggtgaaaaataacattcattgggtgggtcaacgtgactgggaagtgcgtgattttcacggcacggaatataaaacgctgcgcggcagcagctacaacagctacctcatccgcgaagaaaaaaacgtgctgatcgacaccgtcgaccataaattcagccgcgaatttgtgcagaacctgcgtaatgaaatcgatctggcggatatcgattacatcgtgattaaccatgcagaagaggaccacgctggggcgctgaccgaactgatggcgcaaattcccgatacgccgatctactgtactgccaacgctatcgactcgataaatggtcatcaccatcatccggagtggaattttaatgtggtgaaaactggcgacacgctggatatcggcaacggcaaacagctcatttttgtcgaaacaccaatgctgcactggccggacagcatgatgacttacctgacaggcgacgcggtgctgttcagtaacgatgctttcggtcagcactactgcgacgagcatctgttcaacgatgaagtggatcagacggagcttttcgagcagtgccagcgttactacgccaatatcctgacgccgttcagccgcctggtaacgccgaaaattaccgagatcctgggctttaacttaccagtcgatatgatagcgacctcccacggcgtggtctggcgcgataacccgacgcaaattgtcgagctgtacctgaagtgggccgctgattatcaggaagacagaatcaccattttctacgacaccatgtcgaataacacccgcatgatggctgacgctatcgcccagggaattgcggaaaccgacccacgcgtggcggtgaaaattttcaacgtcgcccgaagcgataaaaacgaaatcctgaccaatgtcttccgctcaaaaggcgtgctggtcggcacttcgacgatgaataacgtgatgatgccgaaaatcgccgggctggtggaggagatgactggtttacgcttccgtaacaaacgcgccagtgctttcggctctcacggctggagcggcggtgcggtggatcgtctttccacgcgcctgcaggatgcgggtttcgaaatgtcgcttagcctgaaagccaaatggcgaccagaccaggacgctctggagttatgtcgtgaacacggtcgcgaaatcgcccgtcagtgggcgctcgcgccgctgccgcagagcacggtgaatacggtggttaaagaagaaacctctgccaccacgacggctgacctcggcccacggatgcagtgcagcgtctgccagtggatttacgatccggcaaaaggcgagccaatgcaggacgttgcgctaggaacgccgtggagtgaagtcccggataacttcctctgcccggaatgctccctcggcaaagacgtctttgaagaactggcatcggaggcaaaatgagtaacggcattgtgatcatcggttcgggcttcgccgcccgccaactggtgaaaaatattcgcaaacaggacgccactattccattaaccctgattgccgccgacagcatggatgagtacaacaaacctgacctcagccatgttatcagtcaggggcaacgtgccgatgaccttacccgccagacggcgggtgaatttgccgagcagtttaatctgcacctgtttccacaaacctgggtgacggatatcgatgccgaagcccgtgtggtgaaaagccagaataatcagtggcaatacgacaagctagtactggcaaccggtgccagtgcctttgtcccgcctgtgcctgggcgtgagttaatgctgacgttaaatagtcagcaagagtatcgcgcctgtgaaacgcaactgcgggatgcccgacgcgtgttgattgttggcggtggtttgattggtagcgaactggcgatggatttttgtcgtgcaggcaaagcggtcacgctaatcgacaacgctgccagtattctggcgtcattaatgccaccggaagtaagcagccgcttgcagcatcggttgacggagatgggcgttcatctgttgttgaaatctcagttgcaggggctggaaaaaacagattctggcattctggcaacgctggaccgccagcgcagtatcgaagtggatgcggtaattgccgccaccggactgcgcccggaaaccgccctggcacgacgcgccgggctgacgattaatcgcggcgtttgcgtcgatagttatctgcaaaccagtaatgccgatatttacgcgctgggcgattgcgcggaaattaacggtcaggtattgccgttcctccagccgattcaacttagcgcgatggtgctggcaaaaaatcttctcggcaataacacgccactgaaactaccggcgatgctggtgaaaatcaaaacgccggaattaccgctgcatctggcaggcgaaacccagcgtcaggatttacgctggcaaattaataccgaacgccagggaatggtggcgcgcggcgttgacgatgctgaccagcttcgcgcctttgtggtcagtgaggatcggatgaaagaggcatttggattgttgaaaacattgccgatgtaggtgggctactgtgcctaaaatgtcggatgcgacgctggcgcgtcttatccaacctacggggagcgcatgtgttggtcacatactgcgttcatgtcgcatccacctactgtgcccaaaatgtcggatgcgacgctggcgcgtcttatccgacctacggggacgcatgtgtaggccggataaggcgtttacgccgcatccggcaatggtgtccaaatgcaacacgttttatccgttctggacttcacccgctaaccaacgcgccgcagcaataaccccctgccccagagacaaaccgccatcacccgccggtaaactctgtggaaagagcaatgtgaaatcagcgagataatgcgccagacgtgcacgcagcaaacggttatgaataaccccgccgctaaataccagcgtagtgataccacgcatcgtggcctgctcacgcatcaacgcggcaaaaccctgcgccagcgcatcatgaaacgcccacgcgcgttgattaaccggtgcctgccagttcagccactgctgccagaaagtggcgagatccagttgattgtccaccagcggcattgtcaccggatgcgtcactccgtggcacgaagctgcgagtgcctccagagcacaagccgcttcaccttcataacttaacgtggctggcgcacagcccagtgccgccgccacggcatcgaacaaccgcccacacgatgacgccagcggcgcgttaattccacgctcaatggcccgcgccagcacgctccagttttgctgttgcacacttgctgtttcagaataattctgccactccggcacaaagcgcaggcactgcgccagcaggtttcgccacggctgcttcgccgccaaatcgccacccggaagcgccactgcaggcaagccgcccaggtgctcacattcgcgatagttcacccgcagacactcgccgccccacaaagcgccgttctcccccataccgataccatcgagcgtcaaagcaatgacatcaccgccatccagcggccactgatgctctgccagacacgccgctgcgtgggcatgatgatgcagcaccgtttgcgtcggcatattcatttcgctcgcccactggctggagacatagcccggatgcacgtcatgcacaacgtattgcggagtgaaatcgtagatgttttgcatcaggcgtaacgcttcgcgccactgcatctggatgccatcgtcacttaaatcgcccagatgctgactcaacaccgcttgttcaccgcgcaccaggcagaaggtgtttttcagatccgcgccaagacacagcacaggcggaacatttttaaagcccggaggcaaaaccagcgcatccggcacatacccgcgtgaacggcgcagcatttcgccgctttcgcgcaccaccgaatcatccatccgctgcacgatgtcgcggttatgtatcaagaatccgtcggcaatgccctgcaaatcctccagcgcctgttcgttgctgatagccggtggtttaccgctcaggttgccggaggtcatcaccagcgggcattgcagttcctgtaacagcaaatgctggagcgggttcgcaggcaacattaccccgacttcgttaaggtcaggggcgatatcatcacaaagctcaggaacgtattttttatccaccagcacaatcggcgcggcgggcgtggtaagcaactggcgcgcagcgtctggtaaaccgtcagccactggcaacatgaccgccagcggtttcgccgggcgatgtttgcgcgcccgcagtgtcgccaccgcgttactgttacgtgcatcgcaggcaagatgaaatccgccaatccctttgatggcgacaatgttgcccatttttaactgtgcgatagccgcctgtaatgccgcctcttgttctgcatgttcaccatgacttacccattcaagatgtgggccacactccgggcaggccaccggctgggcgtggaagcgacgatcgagcgggtcgcggtactctttgtcacaagccggacacaacggaaacgccgccatcacggtaaacgggcggtcgtaaggcatggcgcgaataatggtgaaacgcgggccgcagtgggtacagttgataaacggataacgataacgccgttcgcctggggtattcatttcggcaagacaggcagggcaagtagcggcatcgggaacaatttgcgtattcatggtgccgcctgtgctctggcgtatagtgaactcggtgggcagttgtgaccagatgtacggctcacgctcgacgctatcaatacgcgccagtggcgggcagtgctgatgcaattgaacaagaaacgtttccgggtcttccagcagccggacttctacgccatcgccgtcattacagacatcgccgtgaagatttaattgctgtgccagctgccagacaaacggacgaaaaccgacgccctgcactttgcctcgaatacgcagttggacaccgcaagatgtgttttttgccattgagttattcccgccatcatgaattgcgtaacccgccctgccggacacgactgcgtgtgccttggcagtctcaggtcggcgataccgccagctccgtattctacgaatatttccgggaattcctttgatgccagaacagttctataagatttttagaacatcagcgccgtacggcgacgtttttctgcgctcagttgttcaagtttattacgatcgacacaaatcagcgcatgggtcgggcaagccgccatacacgccgggccgtcttcgcgatggttgcacaggtcgcatttattggcttcagctttgtcagcccgtacattcagccccgcgccgctgttgcggatcaccggacgtaccaccacttccatcgcgccatacgggcaagccaccacgcaggttttgcaaccaatgcaacgttcctgcatcacatgaacaaaccctttatcacggctgatagcaccattcgggcagacgttagcgcacggtgcatcttcacactgacggcagactgtcgccgtggaaatgttcacacctttaatgacatggattcgcggtaaaaaggtttccggggtcagcgatgcacagtcctgattttcctgatgagaaaccacgcacgccacttcacaggtacggcaaccaatacatttactcgcgtcagcaatgatgaaacggttcatcaaattctccagcaatgacagttaatgcgccgatacattcacaaatcatgccagtttttaattcactgttatttaaggaaattaatttctgtaatgcaggaaaaaagatgtcatcgacactagtgacgatgacatgtgatgacaatgtttatcgcgaaagagcaatgagtgagtcgcggcggatcagttttccgctgaaggttttcggcggtgagaaatccccgccatcgagcataaaaatcagccgtccaataatttcctgaatcatctcagtcaccggaatttttacgctggagagcgccggaacgatatagggggcaattgcgatatcatcgaatccgataactgacacctgctctggcaccgctacgccgcgctcgtgcaacgctttcatcgcacctatcgccatatcgtcgttactggcaactaacgcgctaaatttagccccacgttcgagcaacgtttctaccccttcggccccgctggcgggcgtccatttaccgttagcgataagtttttcattgagcgcaataccatgctgcgccagcgcgtctttatacccagcaagacgttcaatgctggtgggggaatccatcgagccggtaaggaaagcaatctcctgatgtccggcgtttatcaactctgccacggcattaaagctggtctgtttatgatcgcaccagacgctatggctgctatttttgcgcaggcggcgattaagcaccattatcggctgactgtgcgcgtcaataatgtcatcgatctcatccacgcttaaaaaacgcgggtaaatcataatggcgtcgcagcgcaaatccagcagatactgaatcgcctggcgctcttcttcggcgctgtgtttaccatctgccaatagcaactgccgccctttctcttccgccattcgcgcggcatgaaagagtaattcactaaaataaatgccgtggtaaagcgtgttggtcactaccagccccagcgtctgagtactcttcgccgacagattgcgcgccagcaagtttgggcggtaaccgctctcttctaccgcctgaaacacgcgatctttagtctcctggctgacgtagccattacctgaaagcacgcgggaaacggtcgcttttgaaaccccggcgcgcttcgccacttccagcatcgtcgtcatcattttcatccctttacacgcaatcaacgcagtgtactgcaccgtttgccgattgtccttgcgcaatcggcgggraaaatattcaggtgaccggtttcacaaatataaaaaatgaacaattaaccctcttgcttatttagtgacaactattcatgattttgtgaaaccggtttcctaattccgtttcagcatcggcatttttccgtcacgtcgactgataacaactacatctaccctactgataacaggataaaatccgatggccaaaaattatgcggcgctggcacgctcggtgatagcggcactgggcggcgttgataacatctcggcagtcacgcactgtatgacgcgtttgcgctttgttatcaaagatgaccagcttatcgacagcccgacgttaaaaaccatccccggcgtgctcggcgtggtacgtagtgacaaccagtgtcaggtgattatcggcaataccgtttcacaagcctttcaggaagtcgtcagcctgctgccgggagatatgcagcccgcacagcccgtaggtaaacccaaactcacgctacgtcgcattggtgcggggatcctcgatgcgctgatcggcaccatgtcaccgctgatcccggcgattatcggcggatcgatggtcaaactgctggcgatgatcctcgagatgagcggcgtgctgacaaaaggatcgccgaccttaactattctgaatgtgattggtgacggtgctttcttcttcctgccgctgatggtcgcggcttcggccgccatcaaatttaaaaccaatatgtcgctggcgattgccatcgcgggtgtgctggtacatccgagctttattgaactgatggcgaaagcggcccagggtgaacatgtcgaatttgccctgatcccggtcaccgcggtgaaatacacctacacagtgatcccggcgctggtgatgacctggtgcctgtcatatatcgaacgctgggtggatcgcattacaccggcggtgaccaaaaacttcctcaaaccaatgctgattgtgttgattgccgcaccgctggcaatcctgctgattggcccgattggtatctggatcggtagcgccatttcggcgctggtttacaccattcatggttatctgggctggctttcagtcgccattatgggcgcgctgtggcctctgctggtaatgaccgggatgcaccgcgtctttacgccaaccatcattcagaccattgccgaaaccggcaaagaagggatggtcatgccgtcagagatcggcgctaacctgtcgctgggcggttcatcactggcggtggcgtggaaaacgaaaaacccggaactgcgccagacggcgctggctgcggcggcatcagccattatggcggggatttccgaaccggcgttatacggcgtggcgatccgcctgaaacgtccgcttatcgccagtcttatcagcggttttatttgcggtgcggttgccggtatggcggggcttgccagccactcaatggcagcgccggggctatttaccagcgtgcagttcttcgatccggcgaatccaatgagcatcgtctgggtgttcgcggtcatggcgctggcggtcgtgctgtcgtttatcctcacactgttgctcggctttgaggatattcctgttgaggaagcggctgccgaggcgcgaaagcatcagagcgtacaaccgaccgtcgccaaagaagtaagtcttaattgaggatgaaaatgtcagtatttccagaaggttttttatggggcggcgcgcttgccgccaaccagtctgaaggtgcgttccgtgaaggtggcaaaggactgacaacggtcgatatgatcccacacggcgagcatcgaatggcggtgaaactggggctggaaaaacgttttcagttgcgcgatgacgagttttatcccagccatgaggcgacggatttttatcatcgttataaagaagatatcgccctgatggcagagatgggattcaaagtgttccgtacctcaattgcctggagccgcctcttcccgcagggcgatgaactgacgcccaaccagcagggcattgctttttaccgttctgtctttgaagagtgtaaaaagtatggtatcgaaccgctggtcacgttgtgccacttcgatgtgccgatgcatctggtcaccgaatatggctcctggcgtaaccgcaagctggtggagcttttcagccgctacgcccggacctgctttgaagcatttgatggtctggtgaaatactggctaaccttcaatgaaatcaacattatgttgcatagcccgttctccggcgcgggtctggtgtttgaagaaggtgaaaatcaggatcaggtgaaatatcaggccgcgcatcaccagctggttgccagtgcgctagccaccaaaatcgcccatgaggttaacccgcaaaatcaggtgggctgtatgctggcgggcggtaacttctacccttacagttgcaagccggaagatgtctgggcggcgctggagaaagatcgggaaaacctgttttttatcgatgtgcaggcgcgcggcgcgtatccggcttactctgcccgcgtatttcgcgaaaaaggggtaaccatcaacaaagcaccgggcgatgatgaaatcctgaaaaacaccgtcgattttgtctctttcagctattacgcctcgcgctgcgcctcggcggagatgaacgccaacaacagcagtgcggcgaacgtggtgaaatcgctgcgtaatccgtatctacaggtgagcgactggggctggggaattgatccactcggtctgcgtatcaccatgaatatgatgtacgatcgttatcagaagccgctgtttctggtggaaaacggcctcggcgcaaaagatgaacttgctgccaatggcgagattaacgatgactatcgcatcagctatttacgcgaacatatccgcgcaatgggcgaagcgattgcagatggcattccgctgatgggctacaccacctggggctgtattgatttagtttccgcctctacgggtgaaatgagcaaacgctacggttttgtctacgtagaccgtgacgacgcaggcaacggcacgctgacgcgcacgcgtaagaaatcgttctggtggtataaaaaagtaattgccagtaatggggaagatttagagtaagtaaccgtgccggatgcggcgtgaacgccttatccggcctacatagttcgtgcgacatgtagatactgttatggcctgcaagttttttcctggtccggtttcccggattgcaggcatgccagacacagcgccgtcaggcgctgtttttttcatcccttccgcgatttttacgccgctaccggattatgccgtgacgcatcgaacggcacgcctgacttcagcactccatacgccacctgtgccagcttgcgcatcatcgcgccgagaatcacctttcctttcttgccattagccgccagacggtcgcggaacgcccgtccccactcagtcttactggtggctaccattgcgggcatatacaacgccctgcgaagcgacacatgtccggccttactcatccggctcgcccctctcacactgctacctgattcataacgccgtggtgtcagacccgcaaaagcggcgaactgtctggcatgggcgaagcggtccttcagaccgatataagccagcaataccgcagatgttttctctccgatacccgggatgctttccagcagtttcctgcggtgtttcatatccggatcatcgtctgtcaggtcttttatctgcttctcaagacgcttcagctctgcttcaagccacagaaggtgagcatcaatgctcggtctctggacttcccgcgccgtttcagtgcgattcagttcctgcgtgtgcatatctgtcagcgcctggtggcggactaccagggcacgcaacgcgcgttcaagcgggtgaggcgcttcccaggctgcagggcgcttctgacgacagaactctgccagcatgcgcgcatccacggtatcagtcttgttacgcagtccttcactctgagcgaaagctttacccagcgcaggattaatgactgacactatgtagccagcatcgtaaaggcactcagcgacaggttccatataggtgccggtcgcttcgatgcagatatgcgcatggtcaatcttgtgacctttcagccagctcaccagctcatcgtgccctttagtggtgttagcgaattttttggtgcgatgacgaccatcaggacgcaacacatcgacatccagtttctctttagcggtgtcgataccgatataatgaagttcatgttccatagtgaaaccaaccttgcaaatacggattaccgggaaaaccggtccatgatactgtccggtttatcactttgggagaaaggcagtccgctgcataaatctacgcaacaggttagaacccaaggcccgatacggcatgcggactgcaggcagagaaaactggccgattttctctgcactggagggataatacaaggcccgataagcgcagcgcatcgggcaatctggggtttggcatcagtcaaaatcaaagaaaccattccggcttaacgccaaatcgggctgaaagtgccttaatgtgggatattgtcagggatcgttgtccagacaaaatctgactgaccagggatttagagccgatttcgttcttcaaatccgcataggtcagattatgttgatcaatcaacgtgcgaagtaacgccacgccaaccggcattgccgcaacggctttgtcgaactctgcaaacttttcgttgttgttttcatactctgcaatgcggctcgccagaaagtcgataagtggattggtgtcatcttcttcaatcaaatattcgaccagttccagtgcttcacgataatcatcttctgagtcactgcctcccagaaaggggactgcattgaccagttctcttgttgctttaacagcgcgtgcagcattagcagtcattctttgttctctctgtagtaacgtgacgtctgtctgcacgtaatccccctcatagccactctgcaaaaagtcagttctggttcaccccataaagcacatccccctttatcaagcaacgctgcgtctgcgccagatcttccgtttgcgggtcgcgcccggcgatgggtttgaggacgagtttacggttgggggtataagtaaaacgcgtgagcgcgggatagcttaacttgccaaaccagccgtgaacacgctgccatttggcgtcttttacctgatacagactggttatccagtaaccggaatcaaactgcatatccagcaattgcgtgtggccattcctttgtaaatccagcaaatcatcaatgccagtttcacttgcggtataaaaaccatcggactgaaaaacacacgggcgaccttgctgattaaaggtcatcagaatcaaaaacgcgttaggtgccagaccatttcctgaaataccccgccagataaccagatcctgaatgccgttacgatcaagatcggcacggtaaagttgcgcattacccgccatattttgcagcacccccacaggcacagaccaggatttaccggcgcgatctttaccgttcaattgccattcactatcatcatttggcatcttttcaagcgtcacgccagcaacgccgacttttctaaaatgccagttttgctcggcatcataaggcatggtcaggagaggtttcagcgcccgcttttgcgcgtattcgctgtcactcatcggcagatattcggtaaagctggtggcctgtgcaggcagcactaagctcaataaaaaagcgcacatccctgttctgatgttcaattccctgaattccttaatgaaaaactactctacttccaccgctaactgcgcaaatccaccatttccttcccagccttccagtcgttgataaacggtttcaaccgcatctttaatcggctgggtcatcgggtagtaaaagccgacgatatccggctggatgccgaggaaaatcacttcgccaatatcttctttcaactggtcgataaggtagttcaacggcatgttatgggtagtcatcataaacatctcggcgatatcatccgggtcgatgatgcggatctcgccggggtttagccccatatcagtggcgtcgacaatcagcagtcgcgtagggcgcagttcacggatggcgacgatgtcgttttccggtgcactaccgccgtcaatcaccacccagttacctttcggcgcggcggcgcacttttccgccagcagcgggcctgcgccatcatcgcccatcatgctattgccaacacagagtaaaacgtcagtcacgcagtctcctcaccatcaaatagatggcgttttcctgatgaatatcatgcagcatacttagcagcattgtactccattcctgctgttgcgaagtttgcgctgcccgggctttatcgaatgcgttggccagcatcggcacatggttaatgtcgatgacgatctcaccatatttcggcacgccttccattttgcggcgggcttcgctgcccgcctccagagtggcaatccatgccagatattcatcccacgggcaggtgagcgccgcttccaggcaatcgataaccccaaggtggtgaccaatcgccaggctgtaatagaccacctgctgcgcctcggcgggcgtggcatcgttctcatcaataaatttacggctcagttgactgaacaccaccttttcactcatcggatacgcgcctcttctacaacatgattcagatggctgacaatctcgttcagacgcggatcgttttccgcttccagccagcgtgcaacctgttcttcgccctgccctaactgtgtcaggaagtcatcggcaatctgacgaccgtaacgataacctgccaggcggcgtgcttcgcgatccactttcacacgcagcggctgcaccatatcgccatgcaggatttccgccggttgttcatcctgctcacccgggccacgggcgtgaattttctgctccagcaggccgagcgccattgcaaagccgtacagcgtggcggcaggcgttggcgggcaaccagggatgtagacatctaccgggacgattttatccgtaccgccccacacgcagtagagatcgtggaagatcccgccactgttaccgcaggcaccgtaggagatacagattttcgggtccggcgcggactgccacgcacgcagcgcaggggatcgcattgcacgggtgaccgcgccggtaaacagtaaaatatccgcatgacgcggtgaaggaacgactttaatgccgaagcgttctgcatcaaacagcggcgaaagcgtggcgaaaatttcgatttcgcagccgttgcagccgccgcagtccacgcggtaaacgtaggcagaacgtttgatttttttcagtaacgacgccttcatgctggcgatggattcatccaccgtcatcgggaccggaatgccgttggcgtcacgggggcctaataaattgctcatcagatggcctctttcatatggcgagtcagttcaatacggtcggacggcaccaggcatttctggcgcttacattccgggcaagtctcaaagctttcgcggtggttttccgcgcggctgtcaccattgtgcttaagcagcgcaatggcgtagtcgatctctttctggacggcgaaaggacgattgcagacgcgacagctgcacagcacaaaacgggactgttgcaggaaatcttctttcttccacaccgccagttcgtactcttgcgacagtttgatcgctgccgtcgggcagacttcttcgcagcgtccacagaagatgcagcgcccgagattaaactcccacgcaagctctcctgtggcgaggtcagtttcaaccgttaaggcgtttgacgggcaggcattgacgcaggccgcgcagccgatgcactgctgcgggttctgctctggcttaccacggaagtttttatcaaccgcaatcggctccagcggataagacgaggtcgccgtgccggttttgatgacttttttgataaaggtaaacatggcgattccttatttcagcggcgagtttttacgctcaatgctgtaacgctcgagttctttgtacggcaccactttgctctttttcttacgcacatcgaccacggtcatgcggtcggtacaggagtagcaagggtccaggctaccgataatcagcggcgcatcggaaacggtgttaccgcgcagcatgtagcgcagggtcggccagttcgcgtaggtcgcggcacggcagcgccagcggtacagcttctggttgtcgccggtcatgctccagtggatatcgtcgccgcgcggcgcttcggcaaagcccagcgcgaaacggtgcggaatgtaggtaaagccttccaccatcagcggaccgcccggcaggttatccagaccgtagtcgatcatgttcagcgcggtataaacttcgttgatacgcactttcagacgggaaataacgtcgcagccctgctcgctgtggacttccattggcagcaggccataaccgacaaacgggtgatcggcgcgagtatcgcgggcgtgaccgctggcgcgaaccatcgggccaacgttactgaaatcgcgggcgatttccgggtcaagacgaccaatgccaacagtgcgctgttccatgttcggtgtgctcaacagcacatccaccagctcctgcacttcacgacgcatctgttgcgccagctggcgggtctggatcatgtcatctttcaacagatcgcgacgaatcccgccgatcaggttcaggccgtaggttttacgcgcaccggtgaggatctctgccattttcatggaggtttcacgcacgcggaagaactgcataaagccggagtcaaagccggtaaagtggcaggcgagaccgaggttgagcagatgcgagtgcaggcgttccacctccagcagaatggcgcggatcatctgcgcacgttctggcacctgaatacccatcgcgttttctaccgacgtggtgtaggcggtgctgtgggcaaagccgcagatcccgcacacacggtcagagaggaaggtcacttcgttgtaacccatacgggtttccgccagtttttccatgccgcgatgaacgtagaacagacggtagtcggcgtcgataatgttttcgccatcgacgaacagacggaagtggcccggttcgtcagaagtgacgtgcagcggaccaatcggcacgacgttgtttttcttgtcgcccagttcgttgatgaactcgtaggtttcagcatcggtagtcggtgccggacgctgacgataatccatgctgtctttacgcagcggataaagttcatccggccagtcatccggcagcaccagacgacgttcatccggcagaccaaccggaatcaaaccgtacatatcgcgcacttcgcgctcgccccacaccgccgccggaacgcgcggcgtcacggacggatactccggtttgttggcgtcaacttcgacgcgaaccgttacccaacacttggtgcccttctccatcgacagcacgtaataaacggcgtaatgaccattcagtttgcgttcgtcgttaccaaacagcaccgacagccagccaccctgcttgtagtagagaaactccaccacttccggcaggtagttcaccttcacggtcacggtcagctgatctttggtctgccaggcgtggtccagcacgacgcccggaaatgcctcattcagcgcggcgagataatgttgacctaatttttcttcagacatgctcaaactctctttaatcacgccgccagcaaggagacgaacgctaaaaatgcaaagccaaacccagcccaggtaatgcgcggagtaatatcaagacgcagacgggccatgctgttttcgaacagcgcgataaccaggacgccgaccaccagtttgacgatggcaatcaccagcgccagcagcagtccaccggcggtgaaggtttccatttgtccccacggaataaacaccccgacgaacatctgcaacaccaccagctgtttcaggctgataccccatttcatgacgccaaagccgctaccgctgtattcggagagcggaccttcctgcaactcctgctcggcttccgccaggtcgaacggcagtttgcccatttcgataaaagtggcgaacgcacaggcacaaagcgccagcaccagcgggatgctctggctcagcggccagtgataaacggtgtcggtgatgttgctgatgttggtggaaccggcaacctgtgcggcaacccacagaccaagcagcagcatcggttcgaccagcacgccaagcatcgcttcacgctcgcgccgatagcagtaaacgggctaccggtatccagaccggaaatagcaaagaagaaacgcgcgatggcaaagagatacagtaaggtgatcaaatcgcccagttgcggcagcggagaaccaacggtcaccaccggcagcgcagtagcgatagtcagcattacgcccaccatcacatacggcgtcaggcggaacacccagccggaggcatccgggccaacgctctggcggcccagcagttttataatgtcacgatactcctgcaacacacccggcccacgacggttatgtaagcgggctcgagccacgcgggtaataccggagagcagcggcgcaacggcaaatagcaccagcgcctgaattaacggatataaaacactcattctcaggctcctcgtgaaacaataatcaccaccagcaccgccagttcaaccagcgccatccggcggaacagcaacgcactcccctcgcactgccagcccggcaccagagacaccggattcagccatttgcgtagtttcagcaccggcgcaaacgcctgtttcaccggcatggcaaaaccgtgagcggtaatcaccattgatttttcgtggtcgtagccgcacacccaggccgcgccgcgggaacgcgatggcaaacgatcgcctttgcaaatcgccataatgatgaatggcagcagcgggcaggcaatcagcagcaatgtgatcattggttgagaaacggtggtgttagcaggctccagcggcagaggtacagcagcagagagcatcggcagcagccacggcgcagcaacaccgccaattacgcagcaaatcgccagtgccactacgcttacgctcatcaggagcggcgcacaggtggcgttttcggcttctttggtacgcggcgcgccgaggaacgtgacgccatagactttcgccatacacatcaccgccagcgcaccggtaattgccagacccacagcgagcagcggccccagcagacgggcaacaaacgcgccactattgctcagtttgaagaaggattgatagataacccattccccggcaaacccgttcagcggcggcagcgcagccattgccattaacccgactaacatggcgatggagataaccggcattttcttgccaataccaccgagtttctcgatatcgcgatgaccggtacggaaccagacgctccccgccccgaggaacagtacgcttttgaacaggctatggttaagcagatggtacagaccaccgaccaggccaagagcaatcagcgccggttgttcgagcgcgatacccgttacgccagcgcccagccccagcaggataatgccgatattttccagggtgtggtaagccagcaggcgctggatgttgtgttccatcaacgcatacagaccaccgacgaacgcggtgatcatgccgagcaccagcagcgcgatcccccaccacagcggcgcgttaccacccagcagcgacagggttaaaatgcccagcaggccaattttcatgactaccgtagaaaacaacgcggcagctggcgcagaggcgttagcatgtgcctgcggcacccagccgtgcagcggaataatcccggccagcaggccaaagccaatcacaccgagcagccagatatcggaaccgagcggcagctgttgcatacgcatatccagcaggcgcagatccagcgtgccataacgctgccacagcagccagcaagcaatcgccagcagcagagtgccaagacgccccagcgcaaaccacagtttgccctctttgctgttgctggtaaggaacaccgcacacaaggccatgacttcagccattaccacgaacatgccgaggttgctggcgatgacggcgcagacggcggcagccatcaacatattgatctgcaagccgttgcacttcacctgcgcgtggcgatgccagtcaatgttgtagaggctgacaaacagaccgcacagaccgagcgtaatcagccaaatcgcgttaagcggagagatttgcacatcgtagcttaccagcgacagcgcaccgctcacgccaaccgcgccagtcagtacagtgaagcccgcggctgccgtatacagactaccaaccgcgccgccaattccggctatccagccacttagcgtcttttgaaaagaaaagagaaatgccagaacagcggcggcgacaaaccatgccacgccgctattgatcagggaaattgcgctcatttagcctctccactttgagcctgctgaaacaaggtgagatcgccaaagtccgtgttaaaggtcagctcacgcttacgtttgctgacgcgggcgatatcggtgttatccaccagatgcagggctttagtcgggcacatccgcacgcaggccggaccttgttcatcaaaactgcaaaggtcacatttgacggcgatcgcgcgaatacccggcacccagtcaagcagcgtactgatacgcgccggagcaggcggtgccggtggcgctttcggggtattggcatttgcaggaatatccagcggacggctgccggaaaattcaattgcgccaaacgggcaggcgatgccgcacagcttgcagcttacgcacaggctttcattcaactgcacggccccatcaacgcgggtgatggcgttaaccgggcagaccaccgcgcagggtgcatcttcacagtggtgacagagctgcggcgcagattctttttcatttagcatcactctcaggcgcggcattgattgcaggccgtgctggcgatgcgtctctgaacaggcggcctcacaagtgtggcagccgatacagagcgtggagtcagcaattacaaaacgattcaccaggcattcctcaggtgattgtcatttttgacgaaaacatgccgatgaaatgtcattttcgacactcatcgacacgccatccccaaacaggcgtaacgcctgcaaaacgggcaaagcctcagctcatgctgccgggctttgtccctttaccagttggcttaaattcaccggcacattgttttcaatggcggtgtataagctgtcgtaaacgccagcgattttttcgagatagtgttccagaacctgttcgcgatcgcggatgttgaccttgccatcaatcatgccgtcaatgctcagttgcgcctgcgcaatccgctgtttgtcttcgccatcttttgtttcgacgtaatactcgatggtgtggctgttaaagccatccgccagggtgacgtaaatacgaaaatgttcaaaaaggacgaaacagagttctttgtccggcgcgcagctcatggcgtgatgcaggcgcgctttcgataacgtgatcccctgaaccagcgaattgcagtagatgtgccactggtcctgtaggcgacgatgccgctgtgcgatgtaatcggctttctcgcttatttcccaaatagtcattgtcaggttacccgtttaacagagatgccagctttaagcattttttgtgccaacttttaatttattgttattaaagagattttaagctaaagatgaatttcgtcgccgtgtcgacgtgtcatttcgacatcatcgacattattcaccgcagggataatcaacactggcacaattattgcttgtagctggcaatagttaatgggaggcgatatgcacgaaataaccctctgccaacgggcactggaattgatcgaacagcaggccgcaaaacacggcgcaaaacgcgtaactggggtctggctcaaaattggcgcattttcttgtgtcgaaaccagctctcttgccttttgttttgatctggtttgccgcggcagcgtggcggaaggttgtaaactgcacctcgaagaacaagaggccgaatgctggtgtgaaacatgccaacagtatgtgacgctactgacccagcgcgtccgccgctgtccacagtgtcatggtgacatgctacagattgtggcagacgacggtttacagattcggcggatagaaatagaccaggagtgagcgatgtgtacaacatgcggttgcggtgaaggcaacctgtatatcgagggtgatgaacataaccctcattccgcgtttcgtagcgcgccatttgccccggcggcacgcccgaagatgaaaatcaccggcattaaagcgcctgaatttacccccagccagactgaagaaggcgacctgcattacggtcatggcgaagcgggcactcacgcaccgggcatgagccagcgtcggatgctggaagtcgaaattgacgtgctggacaaaaacaaccgtctggctgaacgcaaccgcgcgcgctttgctgcccgcaagcaactggtgctcaacctggtttccagccctggttccggtaaaaccaccctgctgacggaaaccttaatgcgcctgaaagacagcgttccgtgcgcggttattgaaggtgaccagcaaaccgtgaacgatgccgcacgcattcgcgctaccggcacaccagcgattcaggtgaacaccggtaaaggctgccatcttgacgcacagatgattgccgacgccgcaccgcgtctgccactggacgataacggtattctgtttatcgaaaacgttggcaacctcgtatgcccggccagcttcgatctcggtgaaaaacacaaagtggcggtgctttccgttaccgaaggtgaagacaaaccgctgaaatatccgcatatgtttgccgccgcctcgctgatgctgctcaacaaagttgacctgttgccgtatctcaactttgacgttgagaagtgcctcgcctgcgcccgcgaagtcaatccagaaattgaaatcatccttatttccgccaccagcggtgaagggatggaccagtggctgaactggctggagacacagcgatgtgcataggcgttcccggccagatccgcaccattgacggcaaccaggcaaaagtcgacgtctgcggcattcagcgcgatgtcgatttaacgttagtcggcagctgcgatgaaaacggtcagccgcgcgtgggccagtgggtactggtacacgttggctttgccatgagcgtaattaatgaagccgaagcacgcgacactctcgacgccttacaaaacatgtttgacgttgagccggatgtcggcgcgctgttgtatggcgaggaaaaataatgcgttttgttgatgaatatcgcgcgccggaacaggtgatgcagttaattgagcatctgcgcgaacgtgcttcacatctctcttacaccgccgaacgccctctgcggattatggaagtgtgcggtggtcatacccacgctatttttaaattcggcctcgaccagttactgcctgaaaacgttgagtttatccacggtccggggtgcccggtgtgcgtactgccgatgggtagaatcgacacctgcgtggagattgccagccatccggaagtcatcttctgtacctttggcgacgccatgcgcgtaccagggaaacagggttcgctgttgcaggcaaaagcacgcggtgccgatgtgcgcatcgtttactcgccgatggatgcgttgaaactggcgcaggagaatccaacccgtaaagtcgtattcttcggcttaggttttgaaaccaccatgccgaccaccgccatcaccctgcaacaggcgaaagcccgcgatgtgcagaatttttacttcttctgccagcatattacgcttatcccgacgctgcgcagtttgctggaacagccggataacggtatcgacgcgttcctcgcgccgggccacgttagtatggttatcggcactgatgcctataattttatcgccagcgattttcatcgtccgctggtggtcgctggtttcgaaccccttgatctactacaaggcgtggtcatgctggtggagcagaaaatagcggcccacagcaaggtagagaatcagtatcgtcgagtggtaccggatgccggtaacctgctggcgcaacaggcgattgccgatgtgttctgtgtcaacggcgacagcgaatggcgcggcttaggcgtgattgaatcttctggcgtacacctgacgccggattatcaacgattcgatgccgaagcacatttccgcccggcaccgcagcaggtctgcgatgacccgcgcgcacgttgtggtgaagtattaacgggcaaatgtaagccgcatcaatgcccgctgtttggtaacacctgtaatcctcaaaccgcatttggtgcactgatggtctcctccgaaggagcgtgcgccgcgtggtatcagtatcgtcagcaggagagtgaagcgtgaataatatccaactcgcccacggcagcggcggccaggcgatgcagcaattaatcaacagcctgtttatggaagcctttgccaacccgtggctggcagagcaggaagatcaggcacgtcttgatctggcgcagctggtagcggaaggcgaccgtctggcgttctccaccgacagttacgtcattgacccgctgttctttcctggcggtaatatcggcaagctggcgatttgcggcactgcgaatgacgttgcggtcagtggcgctattccgcgctatctctcctgtggctttatcctcgaagaaggattgccgatggagacactgaaagccgtagtgaccagcatggcagaaaccgcgcgcacggcaggcattgccatcgttactggcgatactaaagtggtgcagcgcggcgcggcagataaactgtttatcaacaccgctggcatgggcgcaattccggcgaatattcattggggcgcacagacgctaaccgcaggcgatgtgttgctggtgagcggcacgctcggcgaccacggggcgactatccttaacctgcgtgagcagctggggctggatggcgaactggtcagcgactgcgcggtgctgacgccgcttattcagacgctgcgtgacattcccggcgtgaaagcgctgcgtgatgccacccgtggtggtgtaaatgcggtggttcatgagttcgcggcagcctgcggttgcggtattgaaatttctgaatcagcgctgccggttaaacctgccgtgcgcggcgtttgcgaattgctgggactggacgccctgaactttgccaacgaaggcaaactggtgatcgccgttgaacgcaacgcggcagagcaagtgctggcagcgttacattcccatccactggggaaagacgcggcgctgattggtgaagtggtggaacgtaaaggtgttcgtcttgccggtctgtatggcgtgaaacgaaccctcgatttaccacacgccgaaccgcttccgcgtatatgctaataaaattctaaatctcctatagttagtcaatgaccttttgcaccgctttgcggtgctttcctggaagaacaaaatgtcatatacaccgatgagtgatctcggacagcaagggttgttcgacatcactcggacactattgcagcagcccgatctggcctcgctgtgtgaggctctttcgcaactggtaaagcgttctgcgctcgccgacaacgcggctattgtgttgtggcaagcgcagactcaacgtgcgtcttattacgcatcgcgtgaaaaagacacccccattaaatatgaagacgaaactgttctggcacacggtccggtacgcagcattttgtcgcgccctgatacgctgcattgcagttacgaagaattttgtgaaacctggccgcagctggccgcaggtgggctatacccaaaatttggtcactattgcctgatgccactggcggcagaagggcatatttttggtggctgtgaatttattcgttatgacgatcgcccctggagcgaaaaagagttcaatcgtctgcaaacatttacgcagatcgtttctgtcgtcaccgaacaaatccagagccgcgtcgtcaacaatgtcgactatgagttgttatgccgggagcgcgataacttccgcatcctggttgccattaccaacgcggtgctttcccgcctggatatggacgaactggtcagcgaagtcgccaaagaaatccattactatttcgacattgacgatatcagtatcgtcttacgcagccaccgtaaaaacaaactcaacatctactccactcactatcttgataaacaacatcccgcccacgaacagagcgaagtcgatgaagccggaaccctcaccgaacgcgtgttcaaaagtaaagagatgctgctgatcaatctccacgagcgggacgatttagccccctatgaacgcatgttgttcgacacctggggcaaccagattcaaaccttgtgcctgttaccgctgatgtctggcgacaccatgctgggcgtgctgaaactggcgcaatgcgaagagaaagtgtttaccactaccaatctgaatttactgcgccagattgccgaacgtgtggcaatcgctgtcgataacgccctcgcctatcaggaaatccatcgtctgaaagaacggctggttgatgaaaacctcgccctgaccgagcagctcaacaatgttgatagtgaatttggcgagattattggccgcagcgaagccatgtacagcgtgcttaaacaagttgaaatggtggcgcaaagtgacagtaccgtgctgatcctcggtgaaactggcacgggtaaagagctgattgcccgtgcgatccataatctcagtgggcgtaataatcgccgcatggtcaaaatgaactgcgcggcgatgcctgccggattgctggaaagcgatctgtttggtcatgagcgtggggcttttaccggtgccagcgcccagcgcattggtcgttttgaactggcggataaaagctccctgttcctcgacgaagtgggcgatatgccactggagttacagccgaagttgctgcgtgtattgcaggaacaggagtttgaacgtctcggcagcaacaaaatcattcagacggacgtgcgtctaatcgccgcgactaaccgcgatctgaaaaaaatggtcgccgaccgtgagttccgtagcgatctctattaccgcctgaacgtattcccgattcacctgccgccactacgcgagcgtccggaagatattccgctgctggcgaaagcctttaccttcaaaattgcccgtcgtctggggcgcaatatcgacagcattcctgccgagacgctgcgcaccttgagcaacatggagtggccgggtaacgtacgcgaactggaaaacgtcattgagcgcgcggtattgctaacacgcggtaacgtgctgcagctgtcattgccagatattgttttaccggaacctgaaacgccgcctgccgcaacggttgtcgcccaggagggcgaagatgaatatcagttgattgttcgcgtgctgaaagaaaccaacgggcgtggttgccgggcctaaagggcgctgcgcaacgtctggggctgaaacgcacgaccctgctgtcacggatgaagcggctgggaattgataaatcggcattgatttaactgcaaattgccggacagatctgcctgtccggcatactattcacgaggttttttcggacgatatttttccggcagttctggcaccggacgcttgtcatcgatgagatgacgcacggttaagatcggatgacgccacagcattctcggcccggcccaacgcataatctgtttcatctcttcacgctttgcaggctggtaacagtgcaccggacactgcttacaggctggtttctcttcgccgaacacacatttatccagccgcttttgcgcgtaaacaaacaacgcctcgtaatgctccggctccgctgacgcctgcgggcatttcgcttgataaagatcgatcatttttttaatcgtcagtttttcacgagagatacgcttgccggacatgctgcctccacctcattaagatgtatttatattacatcttaatcttaaagggcactatgactctaaagaagaaaggttcgccaaccgacgcaattttgcgtacttgcttcataagcatcacgcaaaagctgcaaaacagcatctttcccggaaccagcatcaagaactcaccgttcgcttcttcccctgaaatgattaactccggtatcatgtgcgccttatgtgattacaacgaaaataaaaaccatcacaccccatttaatatcagggaaccggacataaccccatgagtgcaatagaaaatttcgacgcccatacgcccatgatgcagcagtatctcaggctgaaagcccagcatcccgagatcctgctgttttaccggatgggtgatttttatgaactgttttatgacgacgcaaaacgcgcgtcgcaactgctggatatttcactgaccaaacgcggtgcttcggcgggagagccgatcccgatggcggggattccctaccatgcggtggaaaactatctcgccaaactggtgaatcagggagagtccgttgccatctgcgaacaaattggcgatccggcgaccagcaaaggtccggttgagcgcaaagttgtgcgtatcgttacgccaggcaccatcagcgatgaagccctgttacaggagcgtcaggacaacctgctggcggctatctggcaggacagcaaaggtttcggctacgcgacgctggatatcagctccgggcgttttcgcctgagcgaaccggccgaccgcgaaacgatggcggcagagctgcaacgcactaatccggcggaactgctgtatgcagaagatttcgccgagatgtcgctgattgaaggccgtcgcggcctgcgccgtcgcccgctgtgggagtttgaaatcgacaccgcgcgccagcagttgaatctgcaatttggcacccgcgatctggtcggttttggcgtcgagaacgcgccgcgcggactttgtgctgccggttgtctgttgcagtatgcgaaagatacccaacgcacgaccctgccgcatattcgttctatcaccatggaacgtgagcaggacagcatcattatggatgccgcgacacgtcgtaacctggaaattactcagaacctggcgggcggtgcggaaaatacgctggcttctgtgctcgactgcaccgtcacgccgatgggtagtcgtatgctgaaacgctggctgcatatgccagtgcgcgatacccgcgtgttgcttgagcgccagcaaactattggcgcattgcaggatttcaccgccgagttgcagccggtactgcgtcaggtcggcgacctggaacgtattctggcacgtctggctttacgaactgctcgcccacgcgatctggcccgtatgcgccacgctttccagcaactgccggagctgcgtgcgcagttagaaactgtcgatagtgcaccggtacaggcgctacgtgagaagatgggcgagtttgccgagctgcgcgatctgctggagcgagcaatcatcgacacaccgccggtgctggtacgcgacggtggtgttatcgcatcgggctataacgaagagctggatgagtggcgcgcgctggctgacggcgcgaccgattatctggagcgtctggaagtccgcgagcgtgaacgtaccggcctggacacgctgaaagttggctttaatgcggtgcacggctactacattcaaatcagccgtgggcaaagccatctggcacccatcaactacatgcgtcgccagacgctgaaaacgccgagcgctacatcattccagagctaaaagagtacgaagataaagttctcacctcaaaaggcaaagcactggcactggaaaaacagctttatgaagagctgttcgacctgctgttgccgcatctggaagcgttgcaacagagcgcgagcgcgctggcggaactcgacgtgctggttaacctggcggaacgggcctataccctgaactacacctgcccgaccttcattgataaaccgggcattcgcattaccgaaggtcgccatccggtagttgaacaagtactgaatgagccatttatcgctaacccgctgaatctgtcgccgcagcgccgtatgttgattattaccggcccgaacatgggcggtaaaagtacctatatgcgccagaccgcactgattgcgctgatggcctacatcggcagctatgtaccggcacaaaaagtcgagattggacctatcgatcgcatctttacccgcgtaggcgcggcagatgacctggcttccgggcgctcaacctttatggtggagatgactgaaaccgccaatattttacataacgccaccgaatacagtctggtgttaatggatgagatcgggcgtggaacgtccacctacgatggtctgtcgctggcgtgggcgtgcgcagaaaatctggcgaataagattaaggcattgacgctgtttgccacccactatttcgagctgacccagctaccggagaaaatggaaggcgtcgccaacgtgcatctcgatgcgctggagcacggagacaccattgcctttatgcatagcgtgcaggatggcgcggcgagcaaaagctacggcctggcggttgcagctctggcaggcgtgccaaaagaggtgattaagcgcgcacggcaaaaactgcgtgagctggaaagcatttcgccgaacgccgccgctacgcaagtggatggtacgcaaatgtctttgctgtcagtaccggaagaaacctcgccagcggtcgaagctctggaaaacctggacccggattcactgactccgcgtcaggcgctggaatggatttatcgcttgaagagcctggtgtaataacaattcccgattgtcttttgctatcgggaatattaacgacaactgacgaataaaataaaaacaccctgtataataggaaagcttattttacagggtaaaaccatgccatctacacgctatcaaaaaattaatgcccatcactatcgccatatatgggtcgttggtgatattcatggtgaatatcaattattacaatcccgcttacatcaactctctttttgccctgaaaccgacttacttatttctgtcggcgataatattgatcgtgggccggagagtcttgacgtcctgcgcctgctaaaccagccctggtttatctccgttaaaggcaaccacgaagcaatggcgctggatgcgttcgcgaccggcgatggcaatgtgtggcttgccagcggtggtgactggtttttcgatttaaatgattcagagcaacaagaggcaatagatctgttgctgaaattccatcaccttccacatattattgaaatcactaacgacaacataaaatatgtcatcgcacatgcagattatccgggtgatgaatatctctttggcaaagaaatagcggagagcgaattactctggcctgtttatcgtgtgcagaaatcgcttaatggcgagttacaacaaataaacggcgctgattattttatatttggacatatgatgtttgataacattcagacgttcgctaaccagatttatattgataccggatcgccgaaaagtgggcggctgtcattttataaaataaggtagtctcatgcttcttctgtgaagcatgagtaaccagatgttattgcaggccattattcatttttcgctaccagcaaagagagatcctgcttcgccagcgcgcgactggcactctccggcaaaccgtcgtctgtaataatctgatcaaactcgcttaatggtaacgccagccatgtcgccacctgaccatatttcgtcgcatcacagaccaaaactcgctggcggctggcactggcaatcgcccgtttcaccgtgactttatcttccgctggcgtagaaatcccccgcacactccatgacgatgcagaaataaaagcctgatcaatcatcaggctgcgcagcatggtcgcagcggcttccccgacacaggaacggttttcccgacacactgcaccgccagtgtgaataattgtgcaattactgttgtcgagcaagtagttcgcaataacgaaatcgtttgtgaccacagtcagtgactccatgtgaatcagatgctgtgctatcgctaacgtggtcgttcccgcatccagatagatacaacttcccggctgaacaagacttgccgccagcttgccaatagccgctttttgcgtcattgccagcgcagtttttacctgatgagaaggttcatgcgccacgcgtcccggagactggacgcctccggacaccagcacaacggctccctgctgctccagtttttgtaaatcccgacgaatggtcatatgtgacacattcattctgtccgttagttcagcaatactgacaatgcctttttcagctaccatctcaaggatgatttggcgacgctctacgggtatcaacttttgctccttcctttgtcctgctgacattctacgctatttgcctgcgaaacgtgcgcggcgcaactaacgcttagttcacataaaataacacacaatgttaatttatgtggatcagctcaccatatcgttatcttccagcgcttatattcacaatataaaacaaaatatcacttaaattaacaaggagagcagatgaaaacgggatctgagtttcatgtcggtatcgttggcttagggtcaatgggaatgggagcagcactgtcatgtgtccgcgcaggtctttctacctggggcgcagacctgaacagcaatgcctgcgctacgttgaaagaggcaggtgcttgcggggtttctgataacgccgcgacgtttgccgaaaaactggacgctctgctggtgctggtggtcaatgcggcccaggttaaacaggtgctgtttggtgaaacaggcgttgcacaacatctgaaacccggtacggcagtaatggtttcttccactatcgctagtgctgatgcgcaagaaattgctaccgctctggctggattcgatctggaaatgctggatgcgccagtttctggtggtgcagtaaaagccgctaacggtgaaatgactgtcatggcctccggtagcgatattgcctttgaacgactggcacccgtgctggaagccgttgccggaaaagtttatcgcataggtgcagaaccgggactaggttcgaccgtaaaaattattcaccagttgttagcgggcgtacatattgctgccggagccgaagcgatggcacttgcagcccgtgcggggatcccgctggatgtgatgtatgacgtcgtgaccaatgccgccggaaattcctggatgttcgaaaaccggatgcgtcatgtggtggatggcgattacaccccgcattcagccgtcgatatttttgttaaggatcttggtctggttgccgatacagccaaagccctgcacttcccgctgccattggcctcaacagcattgaatatgttcaccagcgccagtaacgcaggttacgggaaagaagacgatagcgcagttatcaagattttctctggcatcactctaccgggagcgaaatcatgatcaagattggcgttatcgccgatgattttaccggcgcgacggatatcgccagttttctggtggaaaacggtctaccaacggtacaaattaacggtgttccaacaggtaaaatgccggaagcaatcgacgcactggtgatcagcctgaaaacgcgctcctgtccggtggttgaagccacacagcaatcgctggcggctctgagctggttgcaacagcaaggttgcaaacagatctatttcaaatactgctctactttcgacagtacggcgaaaggtaatatcggcccggttaccgatgcattaatggatgctctcgacacgccgtttacggtcttctctccggccctgccggtcaacggacgtacggtttatcaggggtatttgttcgtaatgaatcaactgctggccgaatccgggatgcgccatcacccggtaaatcccatgaccgacagctatcttccccgtctggttgaagcgcaatccacagggcgctgcggcgtcgtttcggcacatgttttcgaacaaggtgtggatgccgttcgtcaagagctggctcgcttacagcaagagggctaccgctacgcggtgcttgatgcgctgaccgaacaccatctggaaattcagggagaagccttgcgcgatgccccactggtaacgggcggttctggtctggcgattggcctggcccggcagtgggcgcaagaaaacggtaaccaggctcgcgaagcagggcatccgctcgctgggcgcggcgtagtgctctccggttcatgctctcaaatgaccaaccgccaggtggcacattaccgtcaaattgcaccagcccgtgaagttgatgtggcacgctgcctctcaaccgaaactctggccgcttatgcacacgaactggcagagtgggttctgggccaggaaagtgtacttgctccactggtttttgccaccgccagcactgacgcattggcagcaattcaacagcaatacggtgcacaaaaagccagtcaggcagtagaaactctattttctcaactagcggcgcggttagcagcggaaggcgtgacacgctttattgtcgcaggcggtgagacctccggcgtagtcacacagagcctgggcataaaagggtttcatattggcccaaccatttcccccggcgtgccgtgggtaaacgcactggataagcctgtctcactcgcccttaaatctggcaacttcggtgatgaagcctttttttcacgagcccaaagagagtttttatcatgagcgatttcgcaaaagtagagcagtctttgcgagaggagatgacgcggattgccagttcattctttcagcgcggctatgcaaccggttcggctggcaatctgtcgctgcttttacctgacgggaatttactggcgacaccgacaggttcatgcctgggcaatctcgatccgcagcggctttccaaagtcgccgcggatggcgaatggttaagtggtgacaaaccctcgaaagaggtgctctttcatctggcgctgtatcgcaacaatccgcgctgtaaagcggtggtgcatttgcacagcacatggtcgacggcgctttcctgcctgcaagggctggacagcagcaacgttattcgtccgttcacaccatacgtggtgatgcggatgggaaatgtcccgctggtgccttattaccgaccgggcgataaacgcatcgcacaggatctggcggaactggcagcagacaatcaggcttttttactggcaaatcatggcccagtggtttgcggtgaaagcctgcaagaagccgccaacaatatggaagagctggaggaaacggcaaagctgatttttattctcggtgaccgcccgatccgttatctgaccgcaggtgaaattgcggaattaaggagttaatgcaatgcctcgttttgcagctaatttatccatgatgttcaccgaagtgccttttattgaacgcttcgccgcagcgcgaaaagccgggttcgatgctgtggaatttctgtttccctatgactactccaccctgcaaatccaaaagcaactggagcaaaaccatctgacactggcgctgttcaataccgctcccggagatattaatgcgggggaatggggattatccgcccttcccggacgtgagcacgaagcacacgcagacatcgacctggcactggaatatgcattggcgctcaattgtgaacaagtccatgtgatggcaggcgtcgtgcccgctggcgaagacgctgaacggtaccgggcagtatttatcgataatctccgctacgctgccgaccgctttgcgctacacggcaagcgaatattagttgaagcactcagccccgacgttaagcctcattatctcttctccagccagtatcaggcactggctattgttgaagaggttgcgcgagataacgtgtttattcaactagatacttttcatgcgcaaaaagtagatggcaacctgacgcatttaatccgcgactacgctgggaaatatgcgcacgtacaaattgccggactacctgatcgacatgaaccggacgatggagaaatcaactatccgtggctgttccgcctgttcgatgaggtgggatatcagggctggatcggttgtgaatataaacctcgtggcctcaccgaagaagggcttggctggtttgacgcctggcgctaattcgttaaatccctaattacaacgtacccatacatccccccatctacggatggggtaggttaactataactttcagacagggtttcccatgtccacaattacattgttatgcattgcgttagctggcgtaatcatgctgttgctgctggtcatcaaggcaaaggtacaaccattcgttgctctgctcctcgtcagcctgttagtcgcacttgcggcgggtataccggcgggcgaagtgggtaaagtgatgatcgccgggatgggcggtgtgcttggttccgtcactattattattggtctgggcgctatgctggggcgtatgatcgaacactctggtggtgcagagtcactggctaattatttcagtcgcaagttaggtgacaaacgaactatcgctgcgctgactctggcagcgttcttcctcggtattcccgtcttctttgatgtcgctttattattcttgcgccaatcatttacggttttgccaaggttgccaaaatatcgccactcaaatttggcctgcctgtcgctgggatcatgctaactgtacatgtggcggtaccgccgcatccaggccctgtcgccgcagcggggttactccacgcagacatcggctggctaaccatcatcggtattgcgatttctattcccgtagggattgttggctactttgcagcgaaaataatcaataagcaccaatatgcgatgtcggtggaagtactggaacagatgcaactggctccggccagtgaggaaggcgcgacaaaattaagcgataaaataaatccaccgggcgtcgcgctggtcacctcgctaattgttattcctatcgcgattatcatggcgggtacggtttccgcaacactgatgccgccttcgcatcccctgcttggtacgctacagctgatcggctcaccaatggtagctctaatgattgcgctggtgctggcattctggttattggctttacgtcgcggctggaacttacaacacaccagcgacattatgggctcagcccttcccactgcggcggtagtgattttggttactggtgctggaggggtatttggcaaagtgctggtggaatcgggcgtcggcaaagcccttgccaacatgctacaaatgattgacctgcctctgttaccagccgcatttattatttcactggcgctgcgtgcatcgcaggggtcagcaaccgtagcaatcctgacaaccggcgggttactctcagaagcggtgatgggattgaatccgattcagtgcgtattggtgacgctggcagcctgctttggtgggcttggcgcgtcacatattaatgactcagggttctggattgtgaccaaatatctggggttgtcggtagcagacggtctgaaaacctggacagtgttaacgaccattctcggttttaccggattcttaattacctggtgcgtatgggcggtaatttgaccttaataaaaaggtccgatgggcatcggacctttttatttagcgcttaccttccgccagcagcggcgggatgctcggcaccattggcgcatcatcaatatctttctgcgtcatgcggaacgcttccgggtaatgttcgtgactggtgcggcgtagcggttcggtatcgcgccaggtataaaggcaatgctggcactgatataccgtccagacatctttcaccggcgatttcaccatcacttcaatctgttcatcggcacaacgtggacaaatcatcttcttctccttatttacgtgcagccagcatagcggtcagtttttcagcccaggctttggtttccggtaaatccaccaccggttggctgtagtgaccacggttgtccggggcgacaggcgtagtggcgtcgataatcagcttgtcggtgatccccgcagggcttgagcctggatcgagttccagcacggacatattcggcaactgcaccaaatcccctgccgggttcactttcgaggagagcgcccacatcacctgcggcaggttgaacgggtcaacgtcttcatcgaccataatcaccatcttcacgtagcccagaccatgcggcgtggtcattgcgcgcaggcccaccgcgcgggcaaagccgccgtagcgttttttggtggagataatcgccagcaggccatgggtgtacatggcgtttaccgcctgcacttcagggaactcggctttcagctgctgatacagcggcacgcaggtggctggccccatcaggtagtcgatttcggtccacggcataccgaggtacagcgattcgaaaatcggcctggtgcggtaagagactttatcgatgcgcaccacggtcatgttacgcccgccggagtagtgcccggtaaactcaccgaacggcccttcgatttcgcgtttacggctttcgatgaccccttcgaggatcacttctgaaccccacggcacatcaaaaccggtcaacggggcggtggcgatcgggtacgggctttcacgcagcgcgcctggcatttcgtactcggactgatcatatttcagcggcgtggcccccatcagcgtgatgatcggatcgttaccgagcgtgatcgcaatcggcagatcttcaccgcgctcttctgctttatgcagatgcagggcgatatcgtgcatcggcaccggttgcaggccgagcttacgcttgcccttcacttccatgcggtagatgccgacgttctgcttgccgaagttatccgggtcgagcggatcgcgggaaaccacgcacgctttgtcgagatagaaaccgccatcgccatcgtttaaacgaaacagcggcaggatatcgaacaggttgatctcgtcgccatcaacggtgttctgcgcccaggctggattggcgcggcgctccggggcaatcgggaagttatcccagcggcggataaactcatcaatctgctttttaaccggggcatttggcggcaggccgagggaaatcgcgtggttctgccaggaaccgatggtgttcatcgccacgcgggcatcggtaaagccgcgaatattatcaaaccacagcgcgggcgcgccgtcgccgatacgcccggtggcgttagctgctgctgccagatccggctcggcgttcacttcttcgctgattttcagtaactggccgtggtcatcaagcgcctgtaaaaagctgcgtaaatcatcaaatgccattattcattctcctgagaaaaattccgggcctgcggcaatccttgccagcgcctggcgtggggatgttcgaggccaaattgatccagcacgcgggctaccacatggtggacaatgtcatctaccgtttcgggatggttataaaaggcaggcatcggcggcaccatcgccacgcccatgcgtgaaagtgcgagcatattttcgagatggatggtgctaagcggcatttcacgcggcaccagcaccagtttgcggccttctttgagcacgacgtccgccgcgcgccctaccaggccatcggcgtaaccagcgcggataccggcgagcgttttcatactgcacggaataacgatcatgccgtcggtacgaaaagaaccggatgagatgatcgccgcctgatccgccgggttatggctgaagtctgcgagggcagcaacatcgcgagcgctgtaaggcgtttccagttcaatggtggttttcgcccacttcgacatcaccagatgagtctcgacattcggcatctcccgcagcgcttgcagtaatgccacaccaagaggcgcaccggtagcccctgtcatcccgacgatcagtttcattgcttatcctcttaattgttcgtatacgaacgttattattaacatactccttcatttccacagcggcaaggattgaaaagtaacaacatcttcttcgtcactaaaaaaccgctatgatagcgacagagaattagcccggagtttacatggcgttacgaaataaagcgttccatcagttacgacagctttttcagcagcacacggctcgctggcagcacgagttacctgacctgaccaaaccacagtacgcggtgatgcgcgccattgctgataaacctggtatcgaacaggtggcactgatagaagcagctgtcagcaccaaagcaacgttagcagaaatgttggcaagaatggaaaatcgtggcttagtcagacgtgaacatgaccccgctgataagcggcgacgctttgtctggttgactgccgaaggcgaaaagatacttgctgcagcgatacccattggtgacagcgtggatgaggaatttttggggcgtttgagtggagaagagcaggagctgtttatgcagctggtgcgcaagatgatgaacgcatagggggcaaatttccggatgcgacgctatcgcgtcttatccagactacaaatacaccgactcaccaaccgaaagaaaaaaggccagcctcgcttgagactggcctttctgacagatgcttacttactcgcggaacagcgcttcgatattcagcccctgcgtttgcaggatttcgcgcaaacggcgcaggccttcaacctgaatctggcgaacacgttcacgggtgaggccaatttcacgacctacatcttccagtgttgccgcttcgtaccccagcaaaccgaatcgacgtgccagcacttcacgctgtttggcgttcagctcgaacagccatttgacgatgctctgcttcatatcgtcatcttgcgtggtatcttccggaccgttctctttttcatcggccaggatgtccagcaacgctttttcggaatcaccacccagcggggtgtctaccgaggtaatgcgctcgttaagacgaagcatacggctgacgtcatcaactggcttatccagttgctctgcgatctcttccgcacttggttcatggtccagcttatgggacaactcacgtgcggttcgcaggtaaacgttcagctcctttacgatgtgaatcggcaaacgaatagtacgggtttggttcataatcgcccgttcaatcgtctggcgaatccaccaggttgcgtatgttgagaagcggaaaccacgttccgggtcaaacttctctaccgcgcggatcagccccaggttgccctcttcgataaggtccagcaacgccagaccacgattgccataacggcgggcaatttttaccaccagacgcaagttactctcgatcatccggcggcgagaggcgacatctccacgcagtgcgcgacgcgcaaaataaacttcttcttcggccgttaacagtggtgaataaccaatctcaccaaggtaaagctgagtcgcgtccaacacacgctgtgtggctccctgcgataacagttcctcttcggccaaatcgttatcactgggttcctcttctactaaggccttttcgtcaaaaacctcaactccgttctcatcaaattccgcatcttcatttaaatcatgaactttcagcgtattctgactcataaggtggctcctacccgtgatcccttgacggaacattcaagcaaaagcctggttccgccgatttatcgctgcggcaaataacgcagcgggtttacggatttccccttgtaacgaatttcaaaatgcaagcgtgttgaactggttccggtgctacccatggttgctattttttgccctgccttcacttcttgttgttcccggaccagcattgtgtcgttatgggcgtaggcactcaggtaatcatcattatgtttgatgataatcagattaccgtagccgcgcagcgcgttaccggcataaacaacgcggccatctgcggtcgcgataattgcctgtcctttgctgcctgcgatatcaatccccttgttgccccctcagaagcgccaaaggtttcgatcactttgccctcagtcggccagcgccaggtggagataggcgtactggttgatgtactgctgacagttggctcggttgtgcttgctgttggtaccgttacaggcgctgtgaccgtggtcgcagctggcttattgttcggcaacattttgttagcactctgttcacccgaagattcagaatacgtaattgtcggttgcgacgcaacagcaacggtggaattttgtgcaggcttgatcacaactccttgctctgctgcgtcggcctgggtaatggcatttccgccagtgattggcgtaccggaagcattacccacctgcaaggtctgaccaacgttcagcgcgtatggtgcctgaatattgttgcgctgagcaaggtcacggaaatcgttgccagtaatccaggcgatatagaaaagtgtgtcgccttttttcacggtataggtactgccgctataactgcctttcggaatgttcccatactgacggttatagacgatgcgtccgttttccatctgtaccggctgctgagctactggctgcactggctggatttgcggttgttgagtagcctgaatttgtggctgctgtaccggctgaatttgcggttgctgggctgtagacgtcgtccccattttcggcggcggcgtaatcaacataccagaattggtatttgcaggcgcattgccattaacggagctgaccggtgccggtggatttgaagtgtcagaacagcctgccagccatagcgaaaccagtgacaaagccgcaatgcggcgaacggtgaattttgggcttcccgcgctcatttatcccccaggaaaaattggttaataaccagtgacataattaccgtgcaaggcaccctactgaacactggaaaagatgttcacgatacgctgacctgcggcaaaataaccaggaataatccaggtatttcctcacgttttaagccagctcacccttcactaaagggacaaagcgcacggcctccacggtatcgataataaattcgcctccccgacgacgcacccgtttcaaatactggtgctcctcccctacgggtaagacgagaatcccgccttcgtccagctgcgtcattagcgcagttggaatttccggcggtgccgccgtaacaatgatagcgtcaaacggcgcgcgtgcctgccaaccttgccatccatcgccatgacgggttgaaacattatgtaaatcaagatttttcaggcggcgacgcgcctgccactgcaaacctttaatccgttcgaccgagcaaacatgctggacaagatgcgccaggattgccgtttgatatcccgaaccagtgccaatttccagcacccgcgactgcggcgtcagctcgagtaattcggtcattcgcgccaccatatacggctgcgaaattgtctgcccctgacctatcggcaaggcgatattgtcccaggctttttgttcaaacgcttcatcaacgaatttttcacgcggcacggcggcaagtgcattcagcacctgctcatcctgaataccttgcgcacgtaattgatccagaagtgcttgtacgcgtctgcttaccattgcgtgccaactcccacgctgtttaaccagtctgaaaccacatcttgcgcgctatgcgcagttaaatccacatgcagcggcgtgatggagacatagccctcatctaccgcagcaaaatcggtccccggaccggcatcacatttaccgcccggcgggccaatccagtacagcgtattgccgcgcggatcttgctgcgggatcacctgatctgccggatgtcgtgtaccgcagcgcgtcacgcgaatacctttgatttgatccaagggtaaatccggaacgttaatattaagaatacgcccggtgcgcagcggctctttacacagtgcgcgcaaaattgaacaggttaccgccgcggcagtgtcgtaatgtttatgcccgtcaagcgagacggcaagcgccggaaaacctaaatgacggccttccatcgcggcggctaccgtaccggaataaataacatcatcccccagattcggcccggcgttaattccggacacaacaatgtccgggcgcggacgcatcagagcattcacgccaagatagacgcaatcggtcggggttcccatttgcacagcaatatcaccattttcaaaggtaaacgtgcgcagggaggattccagtgtcagagaatttgaagcgccgctgcggttacgatcgggggcgaccacctgaacgtcagcaaactcacgcaaggctttcgccagcgtttgtataccgggtgcatgtaccccgtcatcattactcagcaatatgcgcataatcacctgttgtgttgataagttccctgacaacgctggttgcaaaactacccgccggaagccagaaacggatctctacggtgacgtcatcccaccaattccagcttaattgttgcggatacagcagcatcgctctgcgcgcggcttcaactttttcgcgcaccagtaaagcttgtaattcagtttctgcggcgacagctgcttgttcgaatgccagcgcttcacgctgagttccccattcgccactgcccggcaatgcggcggttatcatcagctctttatcgttgacgcgacgctgtaattccgccagttcttcggtggttgcgacaaaccagctaccacgtccggctaattgtagcgcatcgccgtcaacaacttgattaacgtctgcttttttgaggcgctcagcaacaatctgattaaacaacgcactgcgggctgccgacaaccaaaaactccgtttattgcgatcgcgcaccggagtattggtttgcgcccagcgcagcgcgccctgcaagttgctaccgccaatcccaaaacgttgggcaccgaagtagttcggtacaccttttacgcaaatatcgatcagacgttgttcaacgtcatcgcgattgctcacttcgcgcagaaccagggtaaaggcgttacctttcagcgcccctaaacgcagcttgcgcttgtgccgcgcatactccagcacctggcagccttccaattgaaaggcgctcagttcgggcatttccttgcccggcacgcgagcacataaccactgttccgtaacagcatgtttgtctttttgcccagcgaagctgacttcacgggcatgaattttcaggaatttcgccagtgcatccgccacaaaacgggtattgcagccgtttttgaggattctaaccagaatatgctcaccttcaccatcaggctcaaagcccaaatcttccaccaccacaaagtcttccggattggctttcagcagcccggtgccttgcggtttaccgtggaggtaagtgagattatcaaactcaatcattttgttgccttaatgagtagcgccaccgcttcacaggcaatcccttccccacgtccggtaaatccaagtttttccgtagtagtggctttcacgttaacatcatccatatggcagccgagatcttcggcaataaacacgcgcatttgtggaatgtgcggcaacatcttcggtgcctgagcgatgatagtgacatcgacgttgcccagggtataacccttcgcctgaatacgacgccaggcttcgcgtagcagctcgcggctgtcggcacctttaaatgccggatcggtatccgggaacagcttgccgatatcccccagcgccgccgcgccaagcaatgcatcggtcaacgcatggagcgccacgtcgccatcagaatgcgccagcaatcctttttcgtaaggaatgcgtacgccaccaatgataattgggccttcaccgccaaaggcgtgtacgtcaaaaccgtgtccaattcgcattatgtattctcctgatggatggttcgggtgaggtaaaactcggccagtgccaaatcttccgggcgcgtgactttaatgttatccgcacggccttcgaccaactgaggatggaatccgcaatattccagcgccgaggcttcgtcggtaatagtcgcgccttcatttagagcgcgcgtcagacagtcatgtaacagctcacgagggaaaaattgcggcgtcagcgcgtgccataagccgttgcgatcaacggtatgagcaatggcatttttgcccggttcggcacgtttcatcgtatcgcgcactggtgcggctaggatccctcccgtgcggctggtttcgctcaacgccaacaatcgcgcgaggtcatcctgatgcagacaaggacgagcggcgtcatgcaccaatacccactgcgcgtcgccagcggctttcaaacctgccagcacggaatcggcacgctcatcaccgccatctacaacggtgatttgcggatgattcgccagaggaagttgtgcaaaacggctatcgccaggacttatggcaatgacgacacgtttcacccggggatgcgccagcagcgcatgcaccgagtgttcaagaatggtttgattaccgattgagagatattgcttaggacattccgtttgcattcgacggccaaatccggccgccggaaccacggcgcaaacatccaaatgagtggttgccatgttaattcccgggctgatttatcgattgttttgccccgcagactgtgcgcgcttcgacgcgtcaggcaccagacgataaaaagtttcgcccggcctggtcatgctgagttcattacgcgcacgctcttcgagcgcctcctggccgccattgagatcgtcaatttcggcaaaaagttgatcgtttcgcgctttaagtttcgcgtttgtagcttgctgtgccgccacatcatcattgacgcgggtatagtcatgtataccgttcttaccgaaccacagcgaatactgtagccagaccagaatagccagcaacagcagcgttagtttacccatcctgccccctgaaaaacggcatcatcatcccatgcatccgaagacgactctacatcctctgttggggataccgcgacaacgcgggcaaatgtaccacatttgtccattgttacgtatacccagggcgtgcagaacataatctcattattagttacggtttgaattatgaacagaggagacgggaaagtacaaattagcccagtagccacataaacagtgcgccaaacataatgcctactgtcaccagggtgaaaacaatactgtagcgtagctttccgtccatcaatgaatgcagcgcaatccccaccactaccgcgacgggcatcagcgccagaaagaaaggccaggtgtagataaagaagaacagcgtgttagagccataaatcaacatcggcatcgccagcgcaaataaccaggagataaaaccgaccacggcaccaggcagtgaccatgtggtttcttcatcctcagtaaggctgtcgttatttgttagtgtaatgttatggctattacgcatatttgatcctgttactttgacgaaccgggcatggaaacccggtggtgtctcaggatctgataatatcgttctgtctcaacagatctaataattgctgtaccaaatttgttactaattgttcaccattgagatgaatttctgccgattcaggcgcttcgtaaacggaatctattcccgtaaagttgcgcagttcaccggcacgcgctttcttatataagccttttggatcgcgggcttcgcaaatcgccagcggcgtatcgacaaacacttcgataaagcgcccttctcctacgcgttcgcgaaccatctggcgttcggcgcggtgtggcgagataaatgcggtcagcactaccagtccggcttcaaccatcaaattcgccacttcaccgacgcgacggatattctctttacgatcggcatcgctaaaaccgagatcgctgcataatccgtggcgaacattatcgccatccagcagatacgtactgacgccgagtttatgtaacgcctcctccagcgccccggcgaccgttgatttaccggacccggagaggccggtaaaccacagcactacaccacgatgaccgtggtgtagctcgcgttgttgcacagtgaccggatggctatgccagacgacgttttcgtcatgcagcgccattatttatcccccagcaaatcgcgcgcgccccagtgcggaaagtggcgacgaaccagagcattcaattccagttcgaatgcactgaattcagatggcgcagcagttgcctggctaactggctcgtgcaccataccggcacccacggtcacattgctcaggcgatcgataaaaatcagcccacccgtcaccggattttgttgataacgatctaacaccagcggctcgtcaaaagtgagatccacgaggccgatcccattcagtggcaggttttcaacttcacgctgggtaaggttattaatatcaacctgatagcgaatgccatcaacacgcgcgcgcgtcttcttaccggcaattttgatgtcgtaactctgccctggagaaagcggctgttccgccatccataccacatccaccgacgcgctctgcaccgccggtaacgcttcgtctgccgccagcagcagatcgccacggctgatgtcgatctcatccgtcagcaccagggtgatcgcttctccggcaaaggcttcttcgcgatcaccatcaaaagtcacgatccgcgcgacgtttgattccacaccagagggcagcacttttacacgttgcccgacttccacgcgaccggatgccagcgttccggcgtaaccacgaaaatcgagattcgggcggttaacatactgcaccgggaagcgcattggctgggcatccaccactcgctggatctccacggtttccagcacttcgagtagtgttggaccgctgtaccacggcatactttcactttgcgaagccacgttgtcgccttccagtgcagagagcggcacaaagcggatatccagattaccaggtaactgttcggcgaaagtcaggtagtcttcacgaatgcgggtgaatgtctcttcactgtaatccaccagatccattttgttgatcgctacgaccagatgtttgatccccagcagcgtggagataaaactgtgacgacgggtttgatcgagcacgcctttacgggcatcgatcagtaagatcgccagctcacacgttgaggcgccggtcgccatattgcgggtatactgctcgtgcccgggggtgtcggcgataataaatttacgcttctcggtagagaaatagcggtaggccacatcaatagtgatgccctgttcgcgctcagcttgcaggccgtccaccagcagagccagatccagtttttcgccctgggtgccgtgacgcttactgtcgttatgcagcgatgagagctgatcttcgtagatttggcgggtatcgtgcagcaggcgaccaatcagggtacttttgccgtcatcgacgctaccacaggtcagaaaacgcagcaggcttttatgttgttgcgcaatcatccaggcttcgacgccgccttcattggcgatttgttgtgcaagtgcggtgttcatcttaaaaatacccctgacgttttttcagctccatagaccccgcctggtcgcggtcaatcacgcggccctgacgttcactggtggtggaaaccagcatctcttcgatgatttccggcagtgtttgtgcatttgactccaccgcaccggtcagcggccagcagcccagcgtacggaaacgcaccatccgttttttaatcacttcgcccggttgcaggtcgatacggttgtcatcaatcatcatcaacataccgtcgcgttccagaaccggacgttccgcagcgagatatagcggaacaatgtcgatattttccagccagatgtattgccagatatcctgctcggtccagttagagagcgggaagacgcggatgctttcgcctttgttaatttgcccgttgtagttgtgccacagctccgggcgctgatttttcggatcccagcgatggaagcggtcacggaaagagtaaattcgctctttagcgcgggatttctcttcgtcacggcgcgcaccaccgaaggcggcatcaaaaccgtatttgttcagcgcctgtttcaggcctcagttttcataatatcggtatgtttcgcgctgccgtgcacgaatggattaatccccatcgccacgccttccgggtttttatgcaccagcagttcgcagccgtaggctttagcagtacgatcgcggaactcatacatctcgcggaatttccagccggtatcgacatgcagcaacgggaaaggcagcgtacctggataaaacgccttgcgcgccagatgcagcatgacgctggaatctttaccgatagagtagagcatcaccggatttgagaattctgccgccacctcgcgaataatgtggatgctttccgcctccagttgccgcaggtgagtaagtcgtatttgatccataaccgttcctttgcaataccgctattttcttgccatcagatgtttcgactatagggagcgtaagagaacgaatgaaattaccaattagaatgagtagttccttaacggaataacgatttggcaaagctaatatcaaaaagtgcttaaggcaccggatttcgggcgtttaggaagatttgaaattgttttagcgcagcggcagtttcatactatggcggtaaaaaaatttgcatggtatttaaggactcactatgttttccgcattgcgccaccgtaccgctgccctggcgctcggcgtatgctttattctccccgtacacgcctcgtcacctaaacctggcgattttgctaatactcaggcacgacatattgctactttctttccgggacgcatgaccggaactcctgcagaaatgttatctgccgattatattcgccaacagtttcagcaaatgggttatcgcagtgatattcggacatttaatagtcggtatatttataccgcccgcgataatcgcaagagctggcataacgtgacgggaagtacggtgattgccgctcatgaaggcaaagcgccgcagcagatcatcattatggcgcatctggatacttacgccccgctgagcgatgctgacgccgatgccaatctcggcgggctgacgttacaaggaatggatgataacgccgcaggtttaggtgtcatgctggaattggcagaacgcctgaaaaatacgcctaccgagtatggtattcgatttgtggcgaccagcggcgaagaggaagggaaattaggcgctgagaatttactcaagcggatgagtgacaccgaaaagaaaaatacgctgctggtgattaatctcgataacttaattgttggcgataaattgtatttcaacagcggtgtaaaaacccctgaagcagtaaggaaattaacgcgcgacagggcgctggcaattgcgcgcagtcacggaatagctgcaacgaccaatccgggtttgaataaaaattatccgaaaggcactgggtgttgtaatgacgcagaaatattcgacaaagcgggcattgctgtactttcggtggaagcgactaactggaatcttgggaataaggatggttatcagcaacgcgcaaaaacagccgcattccctgcgggaaatagctggcatgacgtaagactggataatcaacagcatattgataaggcacttcctggaagaatagaacgtcgctgccgtgacgttatgcggataatgctaccgttggtgaaggagctggcgaaggcgtcttgatgggtttgaaaatgggagctgggagttctaccgcaggggcggggaattctaagtgatatccatcatcgcatccagtgcgcccggtttatccccgctggcgcggggaacacctgaaaccagttggctcgttgttcttctttggcggtttatccccgctggcgcggggaacacactaagcatacatatctgtttttaaacaaatttattccacatcaacaatctaccaactaaattcaaacatttccttatttttaaagaacgtctaacttattgattatcaacaggaagaaaagaaaccaaacgtaacccatccaaatccaccggaatacgtctgtttttgccccaggtctgaaactcaaaaccagactcagtatttgtcgcccaggccatgaccacatttccacaacctgccagttgggtaatttgctgccagatcatctcccgaatacgttttgatgtatcaccaacatacacaccggcacgcacttccagtagccagattgcgagccgtccacgtaagcgcggcgggacattttctgtaacaaccacgaccatgctcatcagccgcgtcctcgatgaccgctatcgcccaacgtttcaggttcggggatggctggcggtaacatatccggcgcaggttgtggcggttcaatttcacctgcggcaaggacttcctcaattaacggtattaatttgcccgttaacttagtgctacggaaaatatcacgacaggctaatctgacttctttatcaggttctgcgggttgcctcgccgctatttcaaatgcctttggtacaaccgaatcaaatttaatgatatcggctatgtcataaacaaatgaaagcggtttgccactatggataaacccaatagcgggcgcatatcccgcggctaatactgccgcttcagatataccgtacagacatgatgtagcagcactgatgcagcgattcacaacatcgcctttttcccagtctttaggatcgtatttgcgaccattccatttcacaccatattgtttcgccagtaatgcatacgtctggcgaacgcgagatccctcaattccacgtagctgctccactgaacggcgagctggcggtggctcacgaaaacgtaattcatacattttgcgcaccaccttcaggcgtagatcttccgttaaagccagctttgcctggtagagtaacttatcagcacgcgccccaccgggttgtccggaagagtagacgcgaacacccgcttcaccgacccagaccagtagcgtccccaccgtggcggccagatgcaccgccgcgtgggaaactctcgttcccggttcgagcataatgcaggcgaccgatcccaccggaatgtgcgtgcggatcccggttttgttgatcagcacgaaagcaccgtccagtacgtcgatttgaccgtactggaggaagatcatggaggtgcgatcttttaacgggatcggactcagtggtacaaacgtcacgcctctgctccgggtttgatcagcatcagaccacagccgaacgcccggcttttgccatacccctgactgagacgttgcagaaataacccgggatcggtgaccgtaagcatccccgtataatccacgctactgaactggatcagttgccgggtgttttcccgccggagttgttgttgtcggtaggcatcaaccgaggtatccagtagtgtaaaaccacttctttccccctgcgctgccagccagtccagcgccgcctgttgttgatgcaaccagatatcacgcccttccgcctgccccttcacctgccgtttcgcctccatcagcagatcgtggcgcttgcccgctttacagattgttggattcgcccgcaggttgaaacaaagagattgtccggtacgcagctcggacacaaatggtcggcattcgatggtgaaagtttcactttccgccgggcgtgcctgcgagaggacaaaaaagcgaaacgcgccctggagttcttcccgacgataaagaaattgcctttctttgccgccagggaagagatcccacagccactgatgcatcacatattcaccgcgatccaccagatgcagcaactgcgcaggcgaaagctggccggtatgtaaggttattcttgagaggtacatggttcctccttgctgagccacggcccctgattgacggtgcgttccccaaacagccactgctgacgatttaaaggaacatcccggcggcgtaatattttgctcgcgaccaggccctcgtgtttcccttcccaccagcattcatcctgaagttttgggagtgagactttcagtttatggaaatgatcctgatactgttggtatgcattacataaggcatcacacgcgttgccttcgagcagtaacggcgcaagaggtaatgccagcggatgactttttcgccccagataaagcggaaaaactggatggcgtaaaccgtcctgcaactgttcgaggctgtaaggcgcatcggctgttgttgccaccgccaccatccaccaggcatcggtgtagtagtcgcgccgggagataatcgcgctcaaaagctcagggtcgctcaactcttcgcgacggctgaaataacgtgctttacgcacctcttttggcatctggaccgtgtgataatcccgtgcccagcgcgggttacggctggcgcaaaccaccagtgaatagtggcgattaaacgcgtttaagcgttcggtatcatcacgccgaatccctaccccggcagccagtagccccagcaatgctgagcgcgaaggaagttcatgggtatgacgaacttcacctggagcatcgaccccccaggacgccatcggcccatgaagctgaaaaatcagatattggctcataagccgccccttacgcgcagataaagtccagcacgtccttcatgcttccctgtttgttcatcacgtcaaaacttgcgcattcggtcttctgttcgtagaccgtattcatgttttcgcgaagcgttgtaatacgctgcaccgccacatctaactgacgtgtgccattaatgggttcatagaaagccgccgccagagagcgtggttgatcggtgcctttttctgccagcgcccaggaggcgtaggcacggctggcaaagctgttctgtttgccggttggggagactttaagtgcggcttccgtaaaggcacgtatggtctgattagctaacgcttcgtcaccgccaaggttttcgaccagcagatctttatcaatgcagatataggtgtagaacagtgcagaaccgaatccggtttcaccaagatgcccggcaccggcatcttcagaagattggcgcaaatcatcaacggcggtgaaaaaatcatcttcgacaatcgtttcactgacaccaaatgcgtgcgctacctggcaggcggcttcaacattaaactcgggtttattcgccagcatacgaccaaacatggcaatatctaccgccatacggtctttgcgtaacaacgcgagatcttcctcttttggcgtgcgcttttcttctgcaagctgatgggccagcgcttttacggcgtcaaattctgccgggctgatatggactaactgttcagtttcggcgttagtgagcggatcttttggttttttgtcatttttagctttcccaagataatcagcaatttttgccgaccattcgatggcttttttatcttcaatccctttctcaatcaggatagttgccgcctcacgcgcaatacgcccactgcgaataccaatatggcccgccagtgcctgttcaaaaagtgcagaagtgcgccacgcacgtttcagactttgcgaggaaacgcgcagacgcgttgctccacccagcaccacagtttttggcgcaccggtatcatcacggttaaggttggcagcagggtaagcggttaacaaatgaagctgaataaatgttgtcatgagatagtcctttattgattttgttcgttatcggcgtcgccagcctggtaatattccagcgcccagcggatacggataaattcggttggccgctgctggcggcggtgatgattgagcaggtcgtcgctctcctggcaccaacggaagaccccctctgccagagagtcaagattgacggaaccgtttaataatctgactgcgcggcgtaactggcgcagtaattcatccggtgtttttactgccgacagacgagtaaaacgcccctttgacattaccgccgccagctgcgcggcaaaaggctgccgttcatcaatagctttaacattggcgctaactgcggctatcagcgccagtgcggtgatacgccactcaggttcatcctgccactttatttgtctgttcttcagaaacaggcgaaatccatccgtcagacaaacatcattaaccgtcgtactacgccgcagactggcacgttcgccacgtttctcctgcaattcctcgtgccatttgcgcagcgtggctttgtgctcctcttttacaatactcattcagcagcctcctgctttttctccctggcggctttagcactttgcttctccgccgatgttgtgaaatatttcttgcgcgcggtcataacgcgtttcaaatcaacaggctcatatggattggtgaatacacgctcgtcaaaatcctgacgcgcgaataaccaaatttccttttgccatttgccgagtaattcgtccgcatcctgaccttcttcaatttggcgcactaacctcaggaagcgatgctgagttttgttccagaagtcgatatccacaaaactgaaatcaccccgtgcaccttttggatcggagaaccacgcttctttcaatgcacttcgtaacagacttagaatccgtgaagccgtttgcgcagccagacgcagtttcggtatctggccttcttttttcttgagcagcagcgggaaatggtgttcgtaccaacagcgcgctttcatgttgtcgaaatcatagccaaatccccacaggcctacttttgcctgtttcagactgctggcattaaagagtttcaccaccagcgcgggaagttccgtattgttttctgatttacccgtttcgataaggcctaaccagtcgcgccagattaaaccgcccggttgtggtttgaccgagtaaaactcgccaccctctttaagtggtatacggtaaggcgttaagggatgctgccacatggcataattcgcaccgtaatttttggtcgtcatcaggctcaggagcgcgtcgctctgttcaccgcaaatatcgcagttgccgactgtcgtggtattaaaatcaatacgaatacggcgcggcattccccagtaagcctggagtttattgacctgatcatgggttaccaccgcaccggccagttcgctggttcgcgtcgggccaagccaggggaaaaccagatcgtcaaattttttgggtagcggtaagtcggcttcatcctgcggcatcacattgggccacagtttgcgccacaagggcgtttgttgattgccttgatattcctgtaattcaatcagagtggtcatcggcccaccgccgcgcaaaccggtgcgatagcctttgccgcctgatggcgcatttaactgtagggagaacagagctaacgcggaacaatgagggcatacgtgttcagtcacgccacgcttaataaagtggtctttattaaacttcgttgtttgagcgccgggaatctcaggcagtagcgaagcgacctgaactttatctcccttgagcgcctcgaaatcctgcataaatgaaggggaatctgccccaaactggaaagcgtgttctaaggacagcaatgcttcccgtagcttttcagcctccagtccgtcttcccagatatcatcccaacgaccgtgatttttgggcgcgaagctggtttgtagtagccccaacaaaaactgccaggccgccccctggagatctgcccgcggcgcagcgatatcgacaacattttcatcagccagatcgactggtgccagtttgcctgtcgttccgtctttaaaacgaacgggcaaccacggggttgtcagaagtgaaaacgagttcatacgcatcctctcgtaaaaaagaccatcccaggtcggttgtccatccttccatccttttctgtatatcaactattcagagagtcctgtcgcagacatctcaaccaaccttgccaatcaatccctccctggccgaatacccgcaactttcgtcatcggtgactaaaatcacgtttgccatttccggatcttgccgctgttcaacgcaccactgcctgaacgcatccccttccagtaaagaaaactcatcccgatgttttttccaccagcttcggcgcactctgacaacgctcatttcccatgcgtgagcaccggtggcataaggcttcaccacaccgtcaatacaggtagccagccacagggaaacagactcttcagccagacgtgtcgacagtttttccggaaggtaatcgttgatattggcggcatagccgggcctgaagttcagcacatactttttagcccttgcgcgatcacagtaatatttgcccacttgctcctgctcgctgcgggcaaatccttccggcattaccacgtcctcaccgtaaactgattcaataagaagccgggctgcgtgtggcatctgaatagcgccttgctcacgcagcacacgctgcgtcagccagattcgcccatgatcgggatagacatatgcactgttacgcatggcactgccgaaccattcgtcaccaggagcgtcatcccagacgggggccagaatcagcaattcaggggggaacgctcgtcttttccgtcacgctttaactgaccattaatatcgcggatatgccgctgtaatcgccccgctcgctggattagcaaatcaatgggggccaggtcggagatcatttcgtccaggtcaatatccacgctttgttcaattacttgtgtacaaacaatgacttgtgacgctctctgtaaactacaatatttaccaaagcgtgccagcgtttccgtttcaattcgctggcgatcgctaaaagcaaagcggctatgaaaaagtgaaaggctggaagcaggaatgacgccgcgggcaagcagctgacgatacacctgaatagcgtcatcaacagaattccgaatccaggcgatgcatttcccctgacttaccgccgattcgatacgcgcaatacactcttgttcactatggagccaacccacgctgacgctacgttcaacttctttgcgcgtcgctacccggtgcgaatgtacatcgattttcgtgacatgcgtcagccaggggtaatcatcttttcccaggagtggggcttcttgctggccctctgcaccacgcgcaaaggcggcgacgagtttgtcgcgctgctgttgagataacgtagcagaaagcaaaataacgctgtttccgccacgcgcctgccgctcgatcagcccttcaagaatgcacgacatgtaagcgtcacaggcgtggatctcatcagccagcaggattttgttactcagccccagaagccgcagattattatgtttaaacggcatcactgccatcatcgcctgatccagggtgccgacgccaatttcagccagcaacgccttcttgttactgtcggcaaaccaggccgcacaaccctggctgaaagcttgttcatccggttcttctgacccgattaaatcaccggaccagagtgattcattaaagcggtccattaatgtgcgggcactgtgtgccagcaccaggctggggcgagattctggcgaatagaaagaaagccaggttttgaccagccgatcgtacatggcattggccgttgccattgttggcagaccaaaaaacagcccgtgagctttccccgcagctatcaacctgtgcgccaggataagcgccgcttctgttttacctgcgccagtcacatcttccagaataaataactgcggtcctggctggctgatatccagatccagcaccttttgctgtaacggtgtcggattctcaataaaaggaaacagtgtattaattccggtgaaaggtgcggtttctgcttttggaggaaagacggttaatgcgttttgagcctgcactaaagccttctgccagtaatgtttaatatccattgcctgtgcgacgcgtggaaaaaatcgcgttgacgaacctgtccagtctgcgagtacgacggttgcagagatataccaggaaaggtgttttataagttcaatgccctcgtcatcatcccagaatgcggggatctctattcgcggaaacagtgccttgattgcaaggagaaaatctcgtgctgcagctttgtcttcaggcagaaaattatccaattcatccatacgatcagggggccgaccatgatgccctgtcgtcacgggcatccacatttctatcactcgcctaagtttgcgcggagagagcgaagatgaaggaagtaactcctgacattcacttaaataatgattccacaaccagtagcccagcgttgaatgagagattttttcgtaattttttctggcactttcctgaatcttgagttcagggggcaggtaaagttgttgaaaagagcgggcaaattttccaatatcgtgccagcacagcaaccaggcgaaaaattgagccgcctgttccttgtcagaaatccctaattgacgaaaataatcagccagcccgaagcaatttcttttaaccattaaatagcccatcgcggctacatccagcgaatgccagcaaagaaggtgatagtcgtcgcccccgtctttctcgccgcgtcgggtttttccccagaaatcaaaaaaagtcacaatatttttatccttcagtaaacttaaaggatatttacgcatattttaaaaattatctgtgatatatatcagccaataaaacatttacattatgaataaattaatgattttcatttgaaattcataataataaatagagactatatattcacataaaaaatataaattttaaaaaagggtgcaggagaccaaaccatcacaattcagtactgcggggttttacccccgcgtggtggctacttcttcgattcgtaagcgagaactgccttaaactccataccacgttctctgatactcaactcacacaacgagtcacctaccatcagcgtgaatcccagtactgtacaacacagtacgatgattgccacaagggcatattttgtcagcatgtcttgcctccctgcaaagaagagactaacattcgaattgtttgggttcgaacgtaagcctcaggttgatagaaatatcgcctggggcttttgtccatctggaacctcgcgaatgcttaacgccagacagcctcaagcacccgacgccattctatacctgataattcttccagcggcgttcacgtttaaaatcaggaatactgctcgcaaaataaaaacgcccccatcatttctgacagaggcgtttaatttatccggcaatatttacccttcgtgcaatccacattccctttttaagccaaagaaacgtgtttcttcttccgacatgccaggttcccatttacgggttgtatgggtatcgcccaccgataaatatccttcgtcccataatgggtgatatttcaggccatgtttttgcagatactgatatatcgttcggttatcccagtcgataatcggcagcactttaaatacgccacgctgaattgccagcaccggtaaattggcgcggctgccggattgttcgcggcgcaggccagcaaaccacgtttgcgcattcagttctttcagcgcccggttcatcggttcgactttgttgatgtcattgtacttttcaatgccttcaacgccctgttcccacagtttgccgtagcgtgcttcctgccaggcggcgctttcggtagcgcggtacactttcaggttgagcttgagtttgtccgttaactcgtcaataaagcggtaggtttccgggaacagatagccggtgtcggtgaggatcaccggaatatccgggtgaatctgattcaccagatgcaggctcaccgccgcctgaatgccaaagctggaagaaagtacatattcaccgggcagattatccagcgcccaggcaacgcggccttcagcgtccagtttttccagttcggcgttagtttctgccagcgccagaatgcgatctaccttcggcagttcgttcagggcgtttagatcgagtttggacatagattcctcactgtttgccttgcctgatgcgacgctcacgcgtcttatcaggcctacaagaccgggctgatggttaatcccacaaatcgcgcgccggatcgagcaccgggcgaatgatgcccgcacgcaccgtaaagtcgccgaagccttcacccgcttcgcgctctttcgcccagcgccctatcagttcatcaagcgacgccaggatttccggctcggtgatgttttctttatacatccgtgggatacgtgtcccaatgcggttgccgccaagatgcagattgtagcgacccggtgctttacccaccaggcccacttccgccagcatcgcgcgaccacaaccgttcgggcagcctgttacacgcatcacgatatgctcatcgctgacaccatgtttcgccattaaattatcgatgttgtcgataaaagacggcaggaaacgctctgcttccgccatcgccagcgggcaagtcgggaatgacacgcaggccatcgagttttcacgctgcggcgtgacggcattcattaacccgctctctttggcgatcttctcgatcttcgctttctcgctttccggtacaccggcgatgatcagattctggttcgccgtaatgcggaaatcgcctttgtggatcttcgcgatctccagcaggccggttttcagcggacgccccggataatcaaggatgcgaccattttcgataaacagcgtcaggtgccagttatcatcaatgcccttaacccagccaatacgatcgcctcgtccggtgaactcatatggacggatcggttcaaatttgatccccgcgcgacgctccacttccgctttaaacgtctcaacccccacgcgctccagcgtgtatttggttttggcatttttacgatcggttcggttaccccagtcacgctgagttgtcacgacggcttcggccaccgccagcgtatgctccagcggcagatagccaaactcgctcgccgtgcgggcgtaggttttcttgttgccgtgttcgatagaaagcccaccgcccaccagcaggttgaagcctaccagcttgccgttttcggcgattgccacgaagttcatgtcgttggcatgcagatcgatatcgttctgcggcgggatcactaccgtggttttgaacttacgcggcaggtaggtctgaccaaggatcggttcttcatcagtagtggcgactttttcctggtcgagccagatctccgcatacgcgcgggtacgaggcaacagatgctcagaaatcttcttcgcccactcgtacgcttccgcgtgcagctgcgactcgtaagggttcgaggtgcagagtacgttacggttcatgtcgttagctgtcgccagcgcatcaagaccgaccgagtgcagcatctggtgcaccggtttgacgttctttttcagaatgccgtggaactgaaacgtctggcggttggtcaggcgaatgctgccatagatggtgttttcaccggcaaatttatcgatcgcttgccactgtttggtggtgatcacgccacccggcagacgacagcgcaacagcatcgcatggcgcggctccagcttctgttcagcacgttcggcgcggatgtcgcggtcatcctgctgatacatgccgtggaagcggatcagcaggaagttatcgcccttaaagccgccggtcagaccgtcgtttaaatcttccgcaatggtgccgcgcaggtagttgctttcaagcttcatgcgctcggcgtctgtcagtttaccttcgaccactaaaggccctggatgtttttcgctcattagtagacatctcgctgataacggcgctctacgcgcagctcacttaaaaattcatccgccgcttcggtgtccatgccaccaaattcggcaatcacttccagaagtgcctgctcaacgtctttcgccatgcgattagcgtcaccgcagacataaatatgggcaccgtcattgatccagcgccacagctccgcgccctgttcgcgcagtttgtcttgtacgtaaactttttctttttggtcgcgcgaccaggcgagatcgatccgcgtcagcacaccctctttgacgtagcgctgccactccacctggtagaggaaatcttccgtaaagtgcgggttgccaaagaacagccagtttttacccggtgcttcgtcggcagcacgttgctgcataaaggcgcggaacggcgcgatgccggtgcctgggccaatcataatcaccggggtttccgggttagcgggcaggcggaagttatcgttatgttcgataaatacgcggagttcgccctcttcttccacgcggtccgcgaggaagctggaggcaccaccggcacgggcgcggccttccacgtcgtaacgcaccacaccaacggtgacgtgtacttcgttctcgacttccgcctgcgaggaggcgatggaatacagacgcggcgtcagcgggcgcagcagattaattagcgcttcggcatcaagctgtgccggggagaaacgcaccatgtcaacaatcggcgtcgtcgcggcgtaatgctgtaacttcgctttatcgcccaccagcggcagcagtgtttcactgcgggtaagcgtggcgtaattctcaacaatgttggcggtgttgacggtcagttcgaagtgccactgtagcgcttcgttcagaggcaacgttttgccctcgacggtgacaggttcatcgcctgtcagccacagcagttcgacaagttctttcaccagtgccggatcgttctgataccagacgcccagcgcgtcacccggctggtaacgcaggcccgagtcacctaagtcaatttcgatatggcgaacgtctttttcagagttacgcccggtaattttctggttaacagagaggctagccaccagtggcgcgtctttgctgtacgggctggtgtggatttcatttaccgcgccagtagcgacggattgcgaaggtgccgcgacaggcgcacgcgatttaagcgcatcaaccacgcgggcgcgccactcgctggcagcagcctggtactcaacatcggcatcgacacggtcgagcaggcgttcaccgcccagttccgccagcttgctgtcgaaatctttcccggactggcagaaaaattcataagagctatcgccgaggctaaacacggcaaacgcggtgttttccagctttggcgcttttttggagaacaggaacttatgcagcgcgacggcttcctccggcggttccccttccccttgcgttgacgtcactacgatgagcagtttttcgctggcgatttgtttgaatttatagtcgcccgcgttcaccagcttaacgttcagttttgctgctaataaatcatcgcgtaatgcttcagcaacccggcgcgcattgccggtttgcgaggcggagataatagttatacccggcatttctgcggctggcgctggcgtcgctgcaagcgcagcaggctgctgattgagcacgccccagaaatagccagaaacccaggcaagctgggtgggagttaaatcggtcgtggccgcctgaaggcgtgccagttgctccgggttcaacggaagcaacgcggaaggtgggacctgtgtcgtcatgcgtcgttatgttccagtaagcaaagctgtttctgcgccctgtcagcgcccataaaacagaagagaaggtaaggttaacggggtgaacggtgtggattaaagacgggatagcgataactaataaccaaatcgactaacctgttttagcaatagtctttaacaacaaaatagattaaccaacctaatgaaaaacaaatgaatttagccaatcattaagataaatcagcgattttgcgcaacaaagtcgttttagataatgcgaaaaaacagcctttccggtactctacggcggttttatcgtcctgtagagaaattatgatgtccaccacgttatttaaagatttcaccttcgaagccgctcaccgcttaccacacgtcccggaagggcataaatgtggtcgcctgcacgggcattcctttatggtgcgactggaaattaccggggaagtcgatccgcatacgggctggattatcgatttcgctgaactgaaagcggcgtttaagccaacttatgagcgcctcgatcaccattatctcaatgatattccaggtctggaaaacccaaccagcgaagttttagcaaaatggatttgggatcaggttaaacccgttgtgccgctgttaagtgcggtgatggtaaaagaaacctgcaccgctggttgtatctatcgcggcgaatgataagagtgtgtcggcggtcaatttcccttaagtaacgctatgttagggtgttgtgttctggatatctggggcatgacatggaagacgactgcgacattattattattggtgccggtattgcaggcaccgcttgcgcgttacgctgcgcgcgatcgggtttatccgttttgttactggaacgcgctgaaatccccggcagcaaaaatctttccggcgggcggttatatacccatgcactcgcggaactcctccctcagtttcatctgaccgcgcctcttgaacgatgcatcactcacgaaagcctttccctgttaacgccggatggcgcaacgacgttttccagcttacagcccggcggtgaatcctggagtgtattacgtgcacggttcgatccgtggctggttgccgaagccgaaaaagaaggtgtcgaatgcatccctggtgcgacggtggatgcactgtatgaagaaaacggcagggtgtgtggtgtcatttgtggtgacgatattctccgcgcccgttatgtggtgctggcagaaggtgccaacagcgtcctggctgagcgtcacgggttagtgactcgtcctgctggcgaagcgatggcgttggggatcaaagaagtgctgtcgctggaaacatccgctattgaagaacgttttcatctggagaataacgaaggcgcagcgttgctgttcagcggcgggatctgtgatgacttacccggcggcgcatttctttatactaatcaacaaacgctctcgttagggattgtttgcccgctctcttcccttacgcaaagccgtgttccggcaagcgagctgctgactcgctttaaagcgcatccggcagtgcgcccgcttatcaaaaacacggaatcactggagtatggtgcgcatctggtgccagaaggtggcttgcacagtatgccggtgcaatacgccggtaacggctggctgctggtgggcgatgcgttgcgcagttgcgtcaataccggaatttccgtgcgcggcatggatatggcgctgactggcgcgcaggcggcggcacaaacgctgataagcgcctgccagcaccgcgagccgcaaaatctgtttccgctttatcatcacaacgtagagcgcagcctgctgtgggatgttctacagcgttatcagcatgttccggcgcttttgcaacgcccgggatggtaccgtacgtggcctgcgttaatgcaggatatttcccgcgatttatgggatcagggtgataaacctgttccaccgctgcgccagttattctggcatcatttacgtcgtcacggcctgtggcatctggcgggcgatgttatcaggagtctgcgatgtctgtagcccgtaatctctggcgcgttgctgatgcgccgcacattgttccggctgactccgttgagcgccagacggcagaacggttgattagcgcctgtccggcaggtcttttttcgctcacaccggaaggtgacttacgtattgactatcgcagttgcctggagtgtggcacctgccgtttgctgtgcgacgaatcaacactacaacagtggcgctatccgccttccggattcggcatcacctaccgctttggataaataataaggataatttatgcccctcttacacctgctccgccagaatccggtgattgctgccgttaaagataatgccagcctgcaactggcaatcgattctgaatgccaatttatttccgtgttgtacggcaatatctgcaccatcagtaatatcgttaaaaagattaagaacgccgggaaatatgcttttattcatgttgatttgctggaaggcgcgtcaaataaagaagtcgttattcagtttttgaaactggtgaccgaggcggacggcattatcagtaccaaagcctcaatgttgaaagcggcaagagcggaaggttttttctgtattcatcgcctgtttattgttgattcaatttcgtttcacaacattgataagcaagttgcgcaatcgaatccggattgtattgagatcctgccaggctgtatgcccaaagtgctgggctgggtgacagagaaaatccgccaaccgctgattgccggtgggctggtgtgcgatgaagaagatgcgcgtaatgcgattaacgcgggtgtcgtggcgctttccaccacgaataccggggtctggacgttagcgaaaaaattactttgacgggataatcgtaaccaattgaatttggtttgatttgtaggccgcacgccacatccgacattcagcgcctgatgcgacgcttgacgcgtcttatcaggcctacaagtccccaggccagaaccgtaggcaggatcatccggcaacacgttattggcaatctgcgtgaatgtttgtcaccagtgcctccagcaccactttccagtcatcaaccacgccaacatctgcctgtgaaaataccgcagcgctggcgtcatgattaatcgccaccacaaacttgctattgcgtacgcccgccattaacgctgctgcgccagaagcgccaacaacaatacacacctcaggtgccagcagatgtccggaaataccaatcactttttcagcatcaacgccaccgttcatcactcgcgcccgactgtagcccacttcggctcccagcttttctgccagcatagcgatttcctggttatctgcctctccgccctgccccaccaccagcacccgtctggcctcagctaatgggtcgcgagtaacatttttcagatcctctgtgctaaccagccagtcgggaagcgcacccgggacaatgttcagttgttgcattccagagggcaacgtggcgtttttcgctgctcccgcctgacgcgccagggaaaggcatagcgggcgtttttctgtttgcagcgtcgccgttagcgcatttccccagtgggatttgcgcacgcttacggttggaatatctaacgaagtcacctggcagatgcttgcaccatgtaaacgccaggccagccgggtcgacagttcatcgccaaacgttcccggcggaaagagaacaacgtccgcaggcgttcgctgccactgttccaccaacgcatccagcacctgttccgccactacaggctgaggttcaatctgccagtgcgccagggtacaaccgctgaaatcctgcgccgccagccagcttgctattgcggcattctcctgatttattgtcacaattgcgatattcatggctgcatcctttggcgtaaatagtcctgccatagcttttgagctttttctgctaccgtttgcccatcaatcagcgtcgctccgcgtcgttgctctgctcttgccagttgcagacactgcatcgctggcatttcggcagcaacagttttacggataatttctgctttccccgcagccattcgctggcgcattcccggtactggcaaggccacttcaccgcactgacgcacggcaatcaccgcaggcaagcgaacccggcaacaacgcaaaccatgttcagtacgctgttcgagggtgataaacagcgcgtcgagagtgaaacgctccacctgggtgaagcagggccagcccagcatttccgccagcaaaaatggcgtttgcccattctgcccttcgctgctttggcagccggtaattatcagatccagcggattctgatgctgccattcggcaatatggcgagcgacaaattccggcgcaaagcgcagatctgccgccgtctccagcaatacagcttcctcaaacccaagagccatgagatagcgcagccagtgcaatgcccgttcatcccccatgctcaacgcggttaaagacatcggcgtaccgttttttctctgcgccaacagcagcgcggcagcggcctgttcatcagcaccgagtaaacttcgcagtagcgaaatatccggtccgcttttaccctgagccgccgcctgccactctttttccgccagcattccggcatccggttcggctttaaacgctaacagaatgttcattcgcacctcctacatttcccgccgccaccagcgggagggctttagtttctggtgcccatagccaggtcacaacaaaaccaaccaacaacactgtcgccaggagcaataaggtgacttgcattccccactgcgccagcacccacggcagcaggccagtacttaccgccgcgccaagtcgactcatggcggtggcaaaaccgacgcccagcgagcgaatgtcagtaggaaaactttccgcaggcaaaatgcccaccagattactgactgccgaaatggtggtgctgaagagaacaaaaagcagcagcgttaatgaactgccggaaggcaaacaggccattactaccagcgttgccgccagcagcaaaaaacttcccagcaaaaatttgcgatgtgccagcaggtgcgtcagaactaatcccagcagcgcgcccacaattaacaacgcattaagcatcaggctggcagtcagcgcatcttccagaccaatagtctgggcgatagttggcagccaggtataaatcacaaaccatgggattacgaggcagacaaagaagacgctgttaaacgccgtgcgccgccagtaacgcgaagagaacaaggttttgatgtgtttatgggtcgccgttaccacttcatcgcccagtaaaacatggggaccaaaatagcgatgcacgatagcgtgagcttctgcaaaacgcccctggcgcagtagccagcgtggtgattctggcgttccccagcgtaataacgtaatcaacaacgcgggcagagctgccgatgccagtagccagcgccaggcctccgggttttcggaaataaagtgatgtccggcaatacttgccagcacatagcctacggtccacaccacgctgaatgcgcccagcaaaataccgcgatggcggcgcggggaaaattcagccagcaaggtgtgacctactgaataatcgcctcccagaccaatgccaatcaaaatgcgcagtccaataagatgctctggcgtggtggcaaaaaattgtaaaaacgaagcaagcgtaatcagcaaaaagctgaaggtgaagattttttgccgaccaatatggtcggagatccacccaagaaccaggctgccaaggaacaaaccaaggagcgccgagccgccgatcattcccgccataaacggcgtcagttgcatggcgggcgtaagctgaataatggcgtaaccaatgacgccgagaacataaccgtcggtcaggtgtgcgccgaaagtgagcgcagcaatgcggcagtgaaaacggttaagcggtaaatcatccattcgcaccggtgaagtgttcatctttaccccttcattgtccggtaataagaacggcttctcgcctgagaagccgaaaaggcaacgccccgtcatcgcggaacgctgcctgacacattatttttcaatcggatagatagtacccgtattcataatgccattaggatcgaactgctttttcagcccttccagcaacgcccacgcgctgccgtgttccagtttgctccagtgaacgcgatgtttaccgataccgtggtggtgcaccatcgaaccgccgaggcgaatggtttcttcacagatgatcttgttgagcggattgtggtacttgtcgatttcctcttccggcttacagtcaacgacgttgtaatcgtagacgaagtacatgttggtgccgttctgatagctatgagaggaatgaccgcccagcatggtgatgtcgtcggcgtgcgggaactcagtacgaatacggttaataacgctttcgtagatttcgtggatgcagctccagcagccggacacttcagtggtaaagcccatgttgccggttttgaggatctgcacacgttcggcagccactttatccggtccccagttcaggttgttaaaccaggtttcgatcagtttgctgtccacgcgctggcactgcgggtagcgggcaacgatttccgcaatcccttcgcccgtcgccttcgcaatgcgaggattgccttcagccataaagatcagcacacatttaccgtcggcaaaatgggtgaagtgttgggtgccatcttcagcgtcatacaaacgagcgatcgacggacgatacccttccaccatgacttcacgcaggatgttgaagccggttttcatgtcttccaggatatagccgtagaagaggttgttttccggggtgaatttaaagattttcactgttacttcagtgatatagcaaagtgcaccttcgttaccgatgatgatgtggcgaatgtccgggccagccgcgcggcgtggcacgtttttaatgcgtgtgacggtgccatcagccaatactgcttccagaccaacgaccatatcttcgattgcgccgtagagtgtggagaactgcccgatactgcgggttgctaccaggccgcccatctgcgccagcggctttgactgcggagaatgccccgtggtgtaacctttttcacgcaacgcattttccagcacctccagcggaacgccacattgcgccgtcgcctgcatattctcaatatcaatattaatgatttgattcatggcggagccgtcgagcaccaccgagttttccacaacggtttccagcccaccttcagtggcggaagcgccggtacgcggcacaccgttaattttgtgcgcattcataaaattcagcacacgggagacttgttctgtggaaccgagttttacgaccgctgccggaatcggcaaagtataaataccatgaatatccggaaatttacgaaaacggtcaatactgttcttctttaatactgtttcatcggtaattacgcgatctgcaccaacaatttcctttagttggtcgacaatcgctgcgcgagataaagacatagtaattccttcctgataataaaaatggaataatcattaataagagaaaacagaaaccaccgttatggattagcgcactaaataaccaccatcgaccactaataaatgcccattgacataatttgaagccggacttgcgaggaatacagctgcgcccattaaatcctgagtatcgccccaacggtttgccggaatatgatcaagaacgcgctgattggtttctggattactgcgtgtcgccagcgtaatatctgttgcataatagccaggggcaataccatttacctgaatattatattgacctagttcatcacaataagctttggtgaatccggcaagagcatgtttagtggcagaatatgcaggtgaccattgtccacctaagtaagagaacaatgaacagatattaataattttgccgcttttctgcgggatcataatttttgccgcttcatagcttaactcgaatgcggcggtcaggttcacatcaatcatcggatcccagtcggcacgaccgaagtccagcaccttattcagcttacaaataccggcattgtttaccagaatatcaactgtaccgaaacgctcacagcaagcagcgataatcttctgcggcgcgccttctgcggtgatatccacctgcatgaagtccacctcaacaccctgtttttcaatcatttcctttgtttcgccgttatctttgacgaaactaggaataaagatatttgcgccagctttggccaacgccatggcaaatgcctggcctaaaccgctattcccaccggtaacaattgcggttttacctttcagtgagaaaaaatccattgagaacgcattgagagattcgattgacatagttagctccaatttccgtaaggcaaaaaaaagaaaggtaacttcccccgcgagagggaagttacctttctcattatctctggtaactggagataatttttagcataacggcataactgctaatgtgatcgtaatcacagtgtgatattcgtattgtcaaatagttttaaaaagcagaagcgtgattactctcacacaacacctctgctttccatgttatttcttattgcaattactagagacctgagaaaagtaatccacctgaaagggcggcttacttttctcttttttttgtctattacaaatgggaatacgatatgcaacacaactcatatcgccgttggataaccctcgcgataattagttttagcggcggcgttagttttgacctggcttatttacgttatatttatcaaattcccatggcgaaatttatgggattcagcaataccgagataggtttaataatgagtacctttggtattgcggctattattctttatgcccccagcggcgttattgccgataaattttcacaccgcaaaatgattacttccgcgatgatcattaccggattactgggtctgttaatggcaacgtatccaccgctgtgggtaatgctctgtattcaggtcgcctttgcgataacgacgattttaatgctgtggtcggtgtcgattaaagccgcctcgttgctgggcgatcatagtgagcaagggaaaattatgggctggatggaagggctgcgcggcgtcggtgtaatgtcgctggcggtgtttaccatgtgggtcttttctcgctttgcaccggatgacagcgccagcctgaaaacagtcattatcatctacagtgtggtttacatcttgttggggattctgtgctggtttttgttagcgataacaacaacctgcgcagtgccaataacgaagaaaaacagtcattccagtttagcgacatccttgccgttttgcgtatcagcaccacctggtattgcagcatggtgatttttggtgtcttcacaatctacgccattctgagttactccaccaactatctgaccgaaatgtacggcatgtcgctggtggcagcgagctacatggggattgtgatcaacaaaatcttccgcgcgctgtgcggcccacttggcggcattatcaccacctacagtaaagtgaaatcccctacccgcgtgatccaaatcctttccgtactcggcctgctggcgttaactgccctgctcgtcacgaactctaacccgcaatcggtcgcgatggggattggcctgattttactgctgggattcacctgttacgcctcacgcgggctgtactgggcctgccctggcgaagcgagaacaccgtcttacattatgggcaccacggtaggtatttgttcggtgattggattcctgccggatgtcttcgtttacccgattatcggccactggcaagacaccctgcccgcagcagaagcctaccgcaatatgtggctgatgggaatggcggcgcttgccatggtgattgtctttacctttttgctgttccaaaaaattcgtactgctgatagcgcccccgcaatggctagcagcaagtaagccaggaaaattacaggagaaaaatcatgtcgaaaaaatacatcatagggattgatggcggaagtcagagcacaaaagtggtgatgtacgatctggaaggtaacgtggtttgtgaaggcaaaggcttattacagccgatgcacacgccagatgccgatactgcagaacatcctgacgacgatttatgggcatcattatgttttgccggtcacgatttgatgagtcagtttgccgggaataaagaagatattgtcggtattggtctgggatccatccgttgctgtcgtgcgttattgaaagccgatggcacgcttgctgcgccgttgattagctggcaggatgcacgcgttacacgcccttacgaacacactaatcctgacgtggcatatgtcacctctttttcgggttatctgacgcatcgcttaaccggcgagtttaaagacaatatcgccaactattttggtcagtggccggtggattataagagctggacatggagcgaagatgctgcggtaatggataagtttaatatcccccgtcatatgctgtttgatgtgcaaatgcctggcaccgtcctcggacatatcacaccacaagccgcactggcgacacatttcccggcaggactgccggttgtttgtaccaccagtgataaaccggtagaagctctgggggccggattactggatgatgaaactgcggtaatttctcttggcacttacatcgcattgatgatgaacggcaaagcactgccgaaagatccggtggcgtactggccgattatgtcttctattccgcaaacattgctgtatgaaggttacggtattcgcaaaggtatgtggacggtgagctggctgcgtgacatgttaggcgagtcgttaattcaggatgccagggcgcaggatctttcaccggaagatttactcaacaagaaagcctctagtgtgccacctggctgtaatgggctgatgacggtgctggactggctgaccaatccgtgggaaccgtacaaacgcgggattatgatcggctttgattccagcatggattacgcatggatatatcgttcgatattggaaagcgtggcgctaacgctgaagaacaattacgacaatatgtgtaatgaaatgaatcactttgcgaagcatgtgatcattactggcggcggttcgaacagcgatctgtttatgcaaatttttgccgacgtgttcaaccttccggcacgccgtaacgccattaacggttgtgcaagtctgggagcagcgattaatacagcggtaggtctggggctatacccggattacgcaacggctgttgataagatggttcgcgtgaaagatatctttataccgattgagagcaatgccaaacgctacgacgcgatgaataaaggcattttcaaagacctaaccaaacatactgatgtgatcctgaaaaaatcgtatgaagtgatgcatggggaattggggaatgtggattcgatccagagctggtcgaatgcgtaagtgaggaaggccgggcgggaaactgcccggcctgaacatacctgaatggttatccccgctgacgcggggaacataagttcgacaacttaaaaaatgataacaagtccggtttatccccgctgatgcagggaacataataaaaactttaactagttcggtttatccctgtttttacaaggaatattaactacactcgatgtctttagaataaaagacaatacgaatcgcactttatcaattttcacttaaagtatgaactggatatctttattcataagaactattcatcaacagcgtatagaggcggttatgtaaaaccactcattagcctcaaaacaaagacaaacttccagatttattacttaaccaatgaataacaagcttaaaaaacatactgttattctaaagaaaaaattaacaggcattaattcaatattaaaaaaataatagattaaaatttcttaacgatttaagaatcatacaaataacactttgattaaatttaattttttgtatcgataattgtgaacctctctggcatggagaactattttgaatatgaggtgttacgtggatatgttgcttattacaagtactgctaatataaaaacttgagaaagagataacgggttatatggtggtttatccccgctggcacggggaactcgcctgacattgcagacgttacaaattgagaggcggtttatccccgctggcgcggggaactctaatcacgttttagcgcgccctcgtccggtttcggtttatccccgctggcgcggggaactcatcttcttgttcaggaacgtcagtagaggtgtcggtttatcccgctggcgcggggaactctaakcacgttttagcgcgccctcgtccggtttcggtttatccccgctggcgcggggaactcatcttcttgttcaggaacgtcagtagaggtgtcggtttatccccgctggcgcggggaactcagcattaacccccaccagctcgacgtgtgtggcggtttatccccgctggcgcggggaactcgcgggcgttaacgcggtgatactgtttgacggcggtttatccccgctggcgcggggaactcaccgagcgccgctgggaggcgtatctcacgttcggtttatccccgctggcgcggggaactctgaatgatcggaaagacgctgcaaaggcaatgcggtttatccccgctggcgcggggaactcattaaaggattattttgatgagtctgaaaaatcggtttatccccgctggcgcggggaactctgattttggtggcgggggtgactgggggaatacggtttatccccgctggcgcggggaactctaccggtgtgaattacagcaccaccgccaccccggtttatccccgctggcgcggggaactccaaacaggtcgacatgtttggctaacagctaacggtttatccccgctggcgcggggaactccgataacacagggccgtcaatgcggcccttttcggtttatccccgctggcgcggggaactcataccgggttttgctccagcagcgccagttcctggtttatccccgctggcgcggggaactctgtaaacataacctattattaattaatgattttttaagccagtcacaatctaccaactttatagtatcacacaaacaacacatccattatgttaaagagcacttaatccattgattaaaaaggtaaatatttaaaataactctatacaaactaaaatctaccaaactttaccgcaataattttcactccagcgaaaaattaatgccacagaatttgtagagaatgctaatgattagccctggatgggtaaaatggaggagttttcagaggcgacaaacaatataaatgagtagaagtctttacaggttccacccatttataacgcttataaatgtttaatcaggcaatatttagatatttatgtgtttgcatcgacaaacgccaattacgcgcaatgcaggtttcaatgcacaaacgtgtggcatcatccttttggctaatcggctgcagtgcaatgactcgcggtttatcatcggtcagcgttgccagtagttcatccagtgcttcaatatcacgtacgcgccccactggatgcttgatttcgttggctcgctccagtgcctgtgacaacacttcatagccgccgcgcatgttcagctttggtgatacggtaacccaggtattcggtgtgcagcgtacttcatgagttccactggtttcgatctggcagctaaaaccgttcttttcgagcaggtcagtcagtggcagcaaatcatgaatgcaaggctcaccacccgtaatcaccacatgccgcgcggtatatccctgccgaccaatgacagccagcaaatcttcactgctcgccgccccccacttatcactctctttggtcttcgccagaatgctgaaaagggagacttcccgatcctcaagcttttcccaggtgtgtttggtgtcgcaccaggcacagccaaccgggcatccctgtaaacgaataaaaatggcggggacgccggtaaagtaaccctcaccttgcagggtctggaacatctcgttaatcgggtactgcatagcattctctgtgaagtggataattgttaattattgcagatcctgccgcaacaatcatgtcttattaacattctgttacatgcagatttaaagaaaaatgcgaaacatatcgttaataattaaagggagtaacgtattatgtcagaagaaaataaagaaaatggatttaatcatgtcaaaacattcaccaaaattatatttattttttctgtattagtttttaatgataacgaatctaaaattaccgatgccgccgtcaatttatttatccagatttaatgagaaatttataatgcgctatttcatactaatgttcactttcgtatgttcctttgttgcagcccaaccaactattgtcccacaattacagtaacaagttacggatcttacgagtagcttaaactcacaagaaaagaaagaactgacgcacaagttagaatctattttcaataatacccaagtgcaaattgctgtattaattgttcccacaaccaaagacgagacaattgaacaatatgctacaagagtttttgacaattggcgtttaggagatgccaaacgtaatgatgggatactgatcattgttgcctggtcagatcgtactgtccgcatccaggtaggttatgggctggaagaaaaggtaaccgatgctctggctagagatatcatccgtagcaacatgatacccgcatttaaacaacaaaaatttgctcagggattagagctagctataaacgctttgaataaccaactcacttcacaacaccaatatccgactaatccttcagaaagtgaatcagcgtcttccagtgatcattattactttgctattttttgggtatttgcagtgatgttcttccctttctggttttttcatcaaggcagtaatttttgtcgcgcatgtaaaagtggagtctatatttcagcaatctatcttttagatttattcctgttctccgataaaattttttccattgctgtattttccttcttttttactttcaccatatttatggtctttacctgtttatgtgtacttcagaaaagagcatcaggtaaaagttatcattcagacaacagcggttccggtggaggctcaagtggcggcggatttagcggcggtggcggttcttctggaggtggcggcgcatccggccgctggtaactcaaccataaaaaatgccagcccggaggctggcatttttaaatcagataaagtcagtcttatgcctggcctttgatctctttacgaccgttgtacggtgctttttcgcccagagcttcttcgatacgaatcagctggttgtatttagcaacacggtcagaacggctcatagaaccagttttgatctggcctgcagcagtaccaacagccaggtcagcgatggtagcgtcttcagtttcgccagaacggtgagagataactgcagtgtagccagcatctttcgccatcttgattgcagccagagtttcggtcagagaaccgatctggttgaatttgatcaggatggagttagcgatacctttttcgataccttctttcaggatcttggtgttggttacgaacaggtcgtcaccaaccagctggattttgtcgcccagaactttggtctggtatgcgaaaccgtcccagtcagattcgtccagaccgtcttcgatagaaacgatcgggtactgtttggtcagttcttccaggaagtgagtgaattcttcagaggtgaacgctttgttgccttcgccagccagaacgtatttaccatctttgtagaattcagaagctgcgcagtccatcgccagagtgatgtctttgcccagttcataaccagcagctttaacagcttcagcgataacagccagagcttcagcgttggaacccaggttcggcgcatagccaccttcgtcaccaacagcagtgttcatgcctttcgctttcagaacttttgccaggtgatggaaaacttcagaacccatgcggatggcttctttcacagttttcgcgccaaccggctgaatcatgaattcctggatatcaacgttgttgtcagcgtgctcaccaccgttgatgatgttcatcatcggaaccggcatagagtatttgcccggagtaccgttcagttcagcgatgtgctcgtacagcggcatacctttagcagctgcagcagctttggcgttagccagagatacagccaggattgcgttcgcgccgaatttggatttgttttcggtgccgtccaggtcgatcatgatcttgtcaatgccagcctgatctttagcatctttgccaatcagcgcctgagcgatcgggccgtttaccgcagcaacagctttggttacgcctttacccaggaaacgggatttgtcgccatcgcgcagttccagagcttcacgggaaccagtagaagcacctgacggagcagctgccataccgacgaaaccaccctccagatgtacttcggcttcaacagtcgggttaccacgggagtcgatgatttcacgaccgatgatttttacgattttggacattaggttttcctcaagtcactagttaaactgaaactccagacaaacaacgcgtacccagggtacgcgttgccgttctaacttttttacttacttcgcctgacgtttctggaactcgctggcggctttcacaaagcctgcaaacagcgggtgaccatcacgtggagtagaagtaaactccggatggaactggcaagccacgaaccacgggtgattcggaacttcgatgatctcgaccaactgatcatccccggaacggcccgcaacgcgcagacctgcatcttcaatctgtttcaacagcatgttgttgacttcgtaacggtgacgatgacgctcaacaattgtcggcgcattgtacagctggcgaaccaggctatcgtcaaccaactggcactgctgtgcgccgagacgcatggtaccgccgagatcgctcttctcgctacgaacttcaacgttgccgttttcatcgcgccactcggtaatcagcgccacaaccgggtacttacagtctggcacaaattccgtagagttggcgttctccatgttggcaacatggcgagcgtaatcaattaacgccacctgcatacccaggcaaatgcccagataaggaatattgttctcacgcgcaaaacgcgcggtcgtaatcatgccttctacgccacgatagccgaaaccgccaggtacgaggattgcgtccagacctttaaggatttcaacgccgcgcgtttcaacatcttgtgaatcgatcagtttgatgttgacgctgacacgattcttcagcccaccgtgtttcagtgcttcgatcactgatttataagcatccggcagttcaatgtacttgccgaccataccgatggtgacttcacttaccgggttcgcttcttcgaagataacctgttcccattcggacagattcgcttccgggcagtttaagctgaatcgtttacaaatataatcgtccagcccctgagatttcaacaggcccggaattttatagatggaatcgacgtctttcagagaaataaccgctttttccggaacattacagaacaatgcaatcttcgcacgttcgttcgccggaacagcgcgatctgaacgacaaatcaggatgtcaggctggataccgatggagagcagctcttttacagagtgctgagtcggtttggttttgacttcaccagacgctgccatgtacggcaccagcgtcaggtgcataaacagagtgtgctcacggccaatttcaacagccatctggcgaatcgcttcgaggaacggcaaggattcgatatcacctactgtaccgccgatttctaccagtactacgtcatgaccttcgccaccttccagcacgcgctctttgattgcgttagtgatgtgcggaataacctgcacggttgcgccgaggtagtcaccgcggcgttctttacgcagaacgtcagagtagatacgacccgtggtgaagttgttgcggcggctcattttggtacgaatgaaacgctcgtagtgccccaggtccaggtcggtttcagcgccgtcttcagtaacgaacacttccccgtgttggattgggctcatagtacctggatcgacgttgatgtaaggatccagtttcatgatggtcacattgaggccacgggcttcaagaatggctgcgagggaggctgcggcaatgcctttacccagagaggatacgaccccgccggtcacaaaaatatagttcgttgtcatgctgaacctgagaagttaggttgaaaagacgatggaataaccaagacgggaaagcagtatacccgaacatgacctgtgccacaaactttcattatccctcctcttcgccagcgcactattgaaatcaggagtgagaaaatagcccctttggggtaaatgtttttgacgcaaatcaagcgcttgtcatttaaaaaatgacacaaatggcgcttgaccgcgtaattcccttagagatcaatttcctgccgttttacctgttgccagacttcttccattgtttcgaggtcaacacctgtcatttccagtccacgcgcggcaacaatacgctccacttcgcgaaaacgacgctcaaatttttcgttcgctttttgcaatgcgatttccgcttttgtccctaaatgacgagccagattgaccgtggcaaacagcaggtcccccatttcctcctccagtttagcctggtcgacaacagcctgccgcgcttcgtacatcacctcgtcgatctcttcgtagactttatcgactaccggaccaagcgtcgtccaatcgaagccaacgttggcgcaacgtttctggattttttgcgcacgcattaaagccggtaaactacgaggaatatcgtccagcgccgaatgctgcgctttctgcgcgcgctcttcggttttgatttgctcccaacgggcaagcacttcactactgttttcggcagaactatcagcaaaaacatgcggatggcgacgctctaatttatcgctaatagcagcgcaaatatcattaaagtcaaagcgcccttcttcctgagccatttgcgcgtaaaacaccacctggaatagcagatcgcccagttcaccgcgaagatcgtcaaaatcttcacggggcgatggcgtccagcacttcgtaggtttcttcaagggtgtaaggcgcaatggtggcaaatgtctgctctttatcccacgggcagccgttttccggatcgcgcaggcgctgcataatagtgagcaaacggtcgatttgattcattgaattgtcctgaaaattgcgggtctgtcaggtggaaacctgtgaccagaatagaagtgagttagtaacactacccaatcagtacgttaattttggctttaatgagttgtaattcctctggggcaactgttcctttcttcgttgctcctcttgcccgccaggcgatactttttacctgatcagctaacgctacgccatcacgttcctgaccggataaaacaacttcgaacggatatccttttgattgcgttgtataaggaacacacagacacatacctgttttgttgttgtacatgaaaggactcaggacaacagctggacgatgtccagcttgctcgctaccttttgtcgggtcaaaatcaacccaaatcagatcgcccatatcgggtacgtatcggcttaccattaccagacttccttatctttcggctctccccagtcgatattctcgtggaggttttccggcgtgatgtcgttgaccagttcagcaagcgtaaatacgggctctttacgcactggctcaataattaatttgccatccaccaggtcaatcttcacttcatcatcaatattcagattgagcgcctgcattaacgtagccgggatccgcaccgccggtgaatttccccaacgctttacgctactgtggatcataaccctttcctcaaaccgctatcatatgtagatacagtatatatcaatctacattgtagatacgagcaaatttcggcctaactcccgtgcaaccgacgcgcgtcgataacatccggcacctggttgagtttacccagcacgcgccccagcacttgcaggttgtaaatctcaatggtcatgtcgatggtcgccagttgctgtttggtgtcgctacggctggcaacgccaagcacgttcaccttctcgttggcgagaatggtcgtgatatcacgtaacaacccactacgatcattagccaccacgcggaccaccagcgaatatccggcggagtagctctcaccccataccgcgtcaacaatgcgttctggcgcatgggagcgcagttccgccagttgttcgcaatcggcgcggtgtactgaaataccgcgcccctgggtaatgaagccgacaatctcatctccaggaatcggctggcagcagcgcgcgatgtggtgcatcaggttgccaacaccttcgaccaccacgcgaccgttatctttactgcggttttgcggcgtgtagcttttttgctgaagttgcttcagcgcggcggcgtcctgctcttcggcactcggcttattaaattgcgattgcaggaagttcaccatctgattgagacggatatccccgccaccaatcgccgccagcaactcgtcgacatcattaaagttgtaacgcggcagcagatgtttttctgcttctttcaggctgatccccagatgttccagctcgtcgtcaaggatttgccgcccagccagaatgtttttgtcacggtcctgtttacggaaccaggcgtgaattttcgaacgcccacggctggttgtgacgtaaccgaggtttgggtttaaccagtcacggctggggttcggctgtttctgggtgataatttcaatctggtcgcccatctgcagctggtaggtgaacggcacaatgcgcccgccaatttttgccccgatgcagcggtgtccgacatcactgtggatgtggtaagcgaagtccagcggcgttgatcccgcaggcaaatcaacgacatcacctttcggcgtaaagacatacacccggtcgtcaaagacctggctgcgtacttcgtcgagcatttcgccggaatcagccatctcttcctgccacgcaatcagtttacgcagccaggcaatccggtcttcatgtcccgaacgtgcgccgccagctgccgcgccctctttatatttccagtgcgcagcaacacccaactctgcatcttcatgcatctgtttggtgcggatttggatctcaacggttttgccacctggccccagaaccacggtatgaatagactgataaccgtttggtttcgggttagcgacataatcgtcaaactcatccggcaggtggcgatagtgagtgtgcactatccccagtgcggcataacaatcctgtaaacgctcggcgacaatacgtaccgcacgcacatcaaacagctcatcgaaggcgaggttctttttctgcattttgcgccagatactgtagatgtgtttcggacgaccatacacttcagctttaacgccttcagctttcatctcagcgcgcagatggccgacaaactcttcgatatagtgttcgcggtcgagacggcgttcatgcagcagttttgcgatgcgtttgtattcggtcgggtggagataacggaagcagtaatcttccagctcccatttcagttgcccaatcccaagacggttcgccaacggcgcgtagatattggtgcactcttttgccgccagtacgcgttcatcttccggcgcatcttttacttcgcgcagatgagcaatacgctccgccagtttgatgaccacgcagcgaaaatcatcgaccatcgccaataacatccggcgaacgttatcgacctgttcggaggaaacagaatcagtgtgcgtcgctttcagctggcggatcgccgccatatcacgcacgccgtgaataaggttaacgaccgacttaccgacgctctcacgcagcacatcttcgctgactacgttggcatcagccagagggaacagcagcgccgcccgcagcgtgtcaatgtccatacttaatgtcgagaggatctccaccatctcaacaccacgccacaataacagactggcatccggatgcccctgcgtctgttgcagacaatacgcccaggtttcggctaagcactcacacgacttctggctggtaatacccagacttgcgatccatttttccggatcaaattcaccagccttattgatatgtgcacttcttaccgcaaccattgtcctctcctttagggaccagacctgccgaaatcggcaaatcgtaactatttaacgcgcgagaaaagtaccatcgattccagatgtcccgtgtgtgggaacatatccagcatcgccagtcgcgcaatggtatatcctgcttttaataacgcttcgctatcccgagccagcgttgcagggttacaggatacataaactatacgaataggttccagttttataatttgctgcataacacctgcggcacctgctcgcgccgggtccagcaacactttatcgaagccgtttttcgcccacggctgctttgtgacatcttcttcaagattttcgtgataaaacgtcacattctgtaaaccattaagacgcgcattctgctggcctttttccaccagcgccggaacaccttctacaccgaccacactggctgcttgtttcgccaatggcagtgtaaagttgcccataccgcagaacagatccagtacgcgatcttcaggttgcacatccagccattccaacgcacgcgctaccattttttggttcacacccgcattgacctgaataaaatcgcgcgggctaaaagttaagcgcaacccgtttgagtcataccagggcatctcaccagagacggtttcgagtatctcactatcggggcgagatacagatccaggccttcagaatgcgaaaagcgttccagtttttcgcgatctgccgaacttagcggtgcggtatggcgcaaaatcatcagcgtgccgctggttgcctgtaccagttcaacatgaccaagatggcgcataacttgtaagctgcccaggcatgccctgactttgggcagcaatgcttcaagtttgggcactaaaatggggcattgtttaacgtcgacaatgtcactggagcccgctttgcgaaagcccatctgaagttgctgtgttttcggtaagtagttcaaacttaaacgcgcgcgacggcgatagccccagggaacatcggcgatcacttcagagacttcgtgtttcattaatcgggcgagtgccgcacttttgcttcgctgctgtaaatccacgctggcgtgttgttgctgacagccaccgcatacgccaaaatgagggcagcgtggcgtttcgcgttccgggctatcgcttaaccggcgcacgactttagcgcgggcgtactgttttttatcttcagtaacagtaacttccgcgttttcctgtggcagtaatccaggaataaataacgctttgccgttatgtcgcgccacgccctgaccaaaagagtcgaggtcgttgactgaaacggttatgatctgacgcgtcgtcgtgcgtcgttttgcagagtagaattgcgccattggcgagactttctcaatttaacagtgtgaccttaattgtcccataacggaactccatgaccaactacagcctgcgcgcacgcatgatgattctgatcctggcaccgaccgtccttattggtttattgctgagtatctttttcgtcgtgcatcgctataacgacttgcagcgtcaactggaagatgccggtgccagcattattgagccgcttgcagtttctactgaatatggcatgagcctgcaaaatcgcgaatctatcggtcagttaataagcgtactgcatcgtcgccattccgatattgttcgcgcgatttcggtttatgatgaaaataaccgactctttgtcacctccaatttatcgtgatgctgccaacttactgatttagtgtatgatggtgtttttgaggtgctccagtggcttctgtttctatcagctgtccctcctgttcagctactgacggggtggtgcgtaacggcaaaagcaccgccggacatcagcgctatctctgctctcactgccgtaaacatggcaactgcagttcacttacaccgcttctcaacccggtacgcaccagaaaatcattgatatggccatgaatggcgttggatgccgggcaactgcccgcattatgggcgttggcctcaacacgattttccgccatttaaaaaactcaggccgcagtcggtaacctcgcgcatacagccgggcagtgacgtcatcgtctgcgcggaaatggacgaacagtggggctatgtcggggctaaatcgcgccagcgctggctgttttacgcgtatgacaggcttcggaagacggttgttgcgcacgtattcggtgaacgcactatggcgacgctggggcgtcttatgagcctgctgtcaccctttgacgtggtgatatggatgacggatggctggccgctgtatgaatcccgcctgaagggaaagctgcacgtaatcagcaagcgatatacgcagcgaattgagcggcataacctgaatctgaggcagcacctggcacggctgggacggaagtcgctgtcgttctcaaaatcggtggagctgcatgacaaagtcatcgggcattatctgaacataaaacactatcaataagttggagtcattacctccaattttcatcttgatccctcatcaatgcagctcggcagcaacgtgccgtttcctcgccagctcactgtcactcgtgacggcgatattatgatcctccgcacgccgattatttctgagagttactcccccgacgaatcgcccagtagcgatgccaaaaatagtcaaaatatgttgggatatattgcgcttgagctggatcttaaatcggttcgcttgcagcaatataaagagatctttatttccagcgtgatgatgctgttttgtatcggtattgcgcttatttttggctggcgcttaatgcgcgatgtaaccggtccgattcgcaacatggtgaataccgtcgaccgcatccgtcgcgggcaactcgacagccgggtggaaggatttatgctcggcgagctggatatgctgaaaaacggtatcaactcgatggcaatgtcgctggctgcttatcacgaagagatgcagcacaatatcgaccaggcgacgtccgatctgcgtgaaacgctggagcagatggaaattcagaacgttgagttggatctggcgaaaaagcgcgcccaggaagcggcgcgtattaaatccgagtttctggcaaatatgtcacacgagctgcgtacaccactgaatggtgttattggctttacccgcctgacgctgaaaacagaattaacaccaacgcagcgcgatcacctgaatacgattgaacgttcggcaaataatttgctggcaattattaatgatgttctcgacttctcgaaactggaagcaggtaagctgattctggaaagtattccattcccactacgcagcacgctggatgaagtcgttactctgctggcacattcttctcacgataaagggttggaactgacgctcaatattaaaagcgacgtgcctgataacgtgatcggcgacccgctgcgattacagcaaatcatcactaacctggtggggaatgcaattaaattcaccgagaatggcaacattgatattctggtagaaaaacgtgcgctgagtaataccaaagtgcagattgaagtgcagattcgggataccggcattggtattcctgaacgcgatcaatcgcgcttattccaggccttccgacaggctgatgccagtatttcccgccgtcatggtggcaccgggctggggctggtgattacacaaaaactggttaatgaaatgggcggcgatatttcgttccatagccagccgaatcgcggttcaactttctggttccacattaatctcgatctgaacccgaacattattatcgaagggccatccacccagtgcctcgccggtaagcgcctggcctatgtcgaaccaaactccgcagcagcgcaatgcacgctggatattttaagtgaaacgccgctggaagtggtttatagcccaacgttctccgcgctgcctcccgcgcattacgacatgatgttgttaggcatcgcggtgaccttccgcgagccgctaacaatgcaacatgagcgattagcgaaagcggtatcgatgaccgatttcctgatgctggcacttccttgccatgcacaagtcaatgcagaaaaactcaagcaagatggtatcggcgcgtgtctgctgaaaccattaacacctacgcgcctgttgcctgccctgacggaattttgtcatcacaaacaaaacacgcttttgcctgtaaccgatgaaagcaagctggcaatgacagtcatggcagttgatgacaaccccgctaacctgaaacttatcggcgcattgctggaagatatggtgcaacatgtggaactttgcgatagcgggcatcaggcggttgaacgggcgaaacagatgccgttcgatttgatcttaatggatattcaaatgcctgacatggatggcattcgggcctgcgagctcatccaccagctcccccatcagcaacaaacgccggttatcgcggtaacggcgcatgcaatggccgggcaaaaagagaagctgcttggcgcagggatgagcgattatctggcgaaaccgattgaagaagagcgattgcataatttgttgttgcgctacaagcctggcagcggtatttcctctcgcgtcgtgacgcccgaagtcaacgaaattgtggtgaacccgaatgcgaccctcgactggcaactggcactacgccaggcagcaggaaaaaccgatttagcgcgcgatatgctgcaaatgttactcgatttcctgcctgaagttcgcaacaaagttgaggaacagctggttggagaaaacccggaaggcctggttgatttgattcataaactgcatggcagttgcggctatagcggtgtgccgcgtatgaagaatctctgccaactgatcgaacaacagctacgtagcggtactaaagaagaagatttggagccggagctgctggaactgttggacgagatggataatgtagcgcgcgaagccagcaaaattctcgggtaacggacgtcttgtcgagtagcaatcggctttttatgacgctggtttcagattggtgacaaagtgcctgtgtttatgccggatgcggcgttaacgccttatccggcctacaaaaccaattaaattcaatgaattaaaaaatgatgtagacctgatacatagcacaacaggctattttgcgtttagcatcagtctcaagccggctccagatagagccggttttggttttctgtcttaacgcaccatgcacgggcgcttgttatcgaacgtccagccaggaatcagatactgcattcccatcgcatcgtcacgcgcgccaagcccgtgtttctgatacagctcatgagctttcatcacttgatccatatcgatttctacacccagccccggtttttccggcacctgaaccagaccgcctttgatctcaaacggttctttggtcaagcgctgattgccttcctgccaaatccagtgcgtatcaatcgcggtgattttacccggtgcagcggcggcaacatgggtaaacatcgccagggaaatatcgaagtggttgtttgagtgtgaaccccaggtcaggccaaattcatggcacatttgcgccacacgtaccgaaccttgcatcgtccagaaatgcggatccgccagcgggatatcaacggattgcagggagagcgtatggcccatctgccgccagtcggtggcgatcatattggttgcggtcggcaggccagttgcgcgacggaactctgccatcacttcacgcccggagaaaccttgctccgcaccacacggatcttctgcataagccagcgaccctttcaggtatttaccaattttaatcgcttcgttcagcgaccaggcaccgttaggatcgagcgtaatacgcgcctgcgggaagcgttgcgccagtgccacaatagactcggcctcttcttccccggccagtacaccgcctttcagtttgaaatcgttgaagccatatttttcatacgccgcttccgccaggcgcaccaccgcatccggcgtcatcgcttcttcatgacgcaggcgataccagtcgcatgagtcatccggctggctttgatacggcagcggtgtggctttgcgatcaccgacgaagaacagataaccgagcatttcgacttcgctacgctgttgaccatcgcccagcagggatgccacgtttacccccagatgctgccccagcagatccagcattgccgcttctatcccggtaactacatgaatagtggtacgcaaatcaaatgtctgcaaaccgcgcccaccagcatcacgatcggcaaaagtattacgcaccagcgtcagaacgtttttgtattcacccagcgttttacctaccaccagcggaatcgcatcttccagcgttttacggattttctcgccgccgggaatttcccctacgccagtgtgaccagaattatctttgataatcacaatattacgcgtaaagaacggtgcgtgtgcaccactcagattcatcagcatactgtcatgacccgccaccgggatgacctgcatttcagtaacaacaggcgtcgtaaattgagaactcatatttatgtcctttttcagaatcaatgacggccgaaaacgggacgtttacggtcaaaggtccagccggggatcaggtactgcatcggacctgcgtcgttacgcgcaccgacaggcagacgtttataggcctcatgtgccttttgtacctgttcccagtccagttccacgcccagaccgggcgcatcaggaacggcaatttttccgtttttaatctccagcggatttttggtcaggcgacaatcgccctcctgccaaatccagtgggtatcgatagcggtaggattacccggtgccgccgcgcccacatgggtaaacatcgccagagagatatcgaaatggttattagaatggcagccccaggtcagcccccagtcgtcgcaaagctgcgccacacggactgcaccggaaagcgtccagaagtgcggatcggcaagtggaatatctaccgcattgagcatcaccgcatgacccatttcgcgccagttggtggcgatcatgttagtcgcgacgggcaagccggtcgcccgccgaaactccgccataacttcacgaccggagaaaccctgttctgcgccgcatggatcttcggcataggtaagaacatcattcagccctttgcatagagaaatggcttcatcaagtagccaggcaccgttgggatcaacggtaatccgcgcatcagggaagcgtttcttcaatgcacgaacagtgtcgatttcttgctcgccaggtaacaccccgcccttaagtttgaaatctttaaagccatagcgatcctgtgaggcttccgccagacgcacaacggcttcgctgttcatcgctttctgatggcgcaactgataccactcatggttgcccggcgtattttccagataaggaagatcggttttggtccgatcaccgatataaaacagataaccgaggacggtaatagtctcgcgttgcttgcctggccccaacagttcgcagaccggaacattcagcgccttacctagcaggtcaagcaaggcggcttacagcgccgccacggcattaacgcgcaattcaaaagtccaggcacctttgccgaaggtatcaaaatcggctgcctgattacctttatgcacctgctgaaccactttattcaggcgcgcaacttcctggcccagaaccatcggaatagcatcgaccagtgtttgataaatcacctctccgcccggcgcttcaccaatgccggtatgcccggcgttatcggtgagtaccacaatattgcgggtgaaatatgcgttatgtgccccaccaatattaagcaacatgctatcgtgcccggcgaccggaatgactttcatatcagtaataacaggactggattgtgtcgtcatcttattgccccgcgacaggtttcagctcgatacgcttgatatcgcccaccagcaccaggtagctcagtaccgcgattaaggcatgaacaccaacataaatcagcgccccattaaaggagccagtcgtgccaacgatataaccaattgcgattggcgtgacgatgccagaaatgttaccgaacatgttgaacaggccaccggaaagaccgctgatctcttttggcgcggtatctgccattactgcccaacccagcgccccgatgcccttaccgaagaaggccagcgccataaagccgatgatcatccactcaacgttgacgtagttgcagaacaccatcaccatcgacagcaacatgcccattacgatcggtgttttacgcgcaatgttcagcgatcccgtgcggcgcatcagccagtcggaaataatcccacccagcacaccgccgataaaaccgcaaaccgccggaacggaagccacaaagcccgctttcagaatcgacatcccacgcgcctgcaccagataaaccggaaaccaggtaatgaaaaagtaagtcagggcgttgatacagtactgaccgatataaacgccgatcatcatccgtgacccgagcagttgtttgatctgcccccacttcacgctgaacggcactttaactttggtgttttgctgatccatattgatcagcgcgccacccgcggcgatgtactccagctctttctgatttacccccggatgttgatttggctcgtggatgactttcaaccagataaagctgatgacaatccccagaccgcccataaagaagaagacgtgtgaccagcccacttcatgcgtcagccagcccataatcggcgcgaagatcaccgttgcgaagtattgagcggagttaaaaatcgacaccgccgttcccctttcctgcgccggaaaccaggccgcaacaatgcgactgttgccggggaaagatggcgcttcagcaagcccgaccaggaagcgcagagtaaacagggcaacgataatgccgaatccactaaagatatcgacgaagccttgcagcaaggtaaacatcgaccagataaagatcgaccagaagtagacgcgttttgaaccaaaacgatccagcaaccaaccaccagggatctgcccgataacataagcccatgagaaggcagagaacacatagcccattcccacgggatcaaggccgatatctttggccatttccgaaccggcaatagaaagcgtagcgcggtcgccgtagttgaaggatgtgacgataaacaacatcaccactatccagtaacgagcattcgtgcgtttttccacactgctcgcagcctgacttaaagaactcattgttgcactcctgaaaattcgcgttagccacgctcactctggactgcgacatagccaggaaatcagaggtgacgtagggtgttttttgccgtttttataggtcgttcgccgaatacggcgcgtgtttatatctggcaatagcagtataaaaagcgcgccatagcggctcaccgtgcaacaacacaacattaatgcgttcaatgaggcccgattttggcattagccctggacggtggaatccacttcacggaaatgaaaacaagaacaagaaaggaagggttaaaacgaagaaataaagaagagtatgaaatggatcgcttgactccaggcaaacgccagtaaaaatccgcgctatgaagcagtttttactggcatttgcctgaaaatattcgattcagcaccgctaaaacgacatttaccgctcgctgaacatatcaggacaacagcgtgccccactgttcgacccacggatttgattccgtttccggttccgggttctcactggcgtcaatcaacagcatttcgccaacccgctgagcgctctgttcctgcaacaaggcatcgaactgtttgccgccattgcagaaatttacataactgctgtcgccgagcgcaatcacgccataacgcagattcggctggaagcccagactatctttgattccctgaaagagcggcacaatgctatcaggaaggtcgccctgcccggtcgtggacgtaaccaccagaacatacttatcctgatagggcagccagtcgcttaattcaggatcttcaaataccgttgctttgtggccctgtgcggtcagaattgcttctgcttcttccgccactaacagcgaatttccgtacatggtgccgacaaaaataccaatttccgccataccgttttctccctggattaggaacttatctctccatcctgacccgatggcgcactgaactcaaccctttcattttcaggaagcagaccgcgccagccaaattgtgataacgcctgcatccaggtgtcgtccaggcccgcgtgaatagtcagcggctcgccagtaaaaggatgcgtcaatgacaactgactggcatgtagcattaaccgctggaggccaaaatgctcagcaccgctgcgattctggcgtaaatcgccatgtttgctatcgccaataatcggatgacgcaaatgggcaagatgtcggcgaagctgatgtttgcgtccggttttcggctccagttccaccaggccgtagcgcgtggtcgggtaacgtccggtcgctaccggcatttctacggtcgccagaccgcgataatgcgtcactgctggctgcgagcctttatcttcgcgggcaaatttatcagcgattttgtccagttattccaccagtggataatccagaactgcttcttccatcaaccagccgcgcacaatcgcatggtaacgtttctggatttggtgctgttcaaactgttgtgccagcagccgtccggcctcgctggataatcccatcaacaacacaccagaagtgggtcggtccagacgatgagcggtaaaaacgtgctggccaatctgatcacgcacggtttgcatgaccactactttctcgtcgcgatccagccagctgcggtgaaccagccagccggagggtttatttaccgcaaccagccattcatcctgatagagtatttccagcattagctcgcatcatccgcaaaaagagcatccagtttttccagctcagccagaataagcgcgcgttgcggatggtccgtcgccagcgccatttcataatagggtgcaacggcaaaagcgcccggtaacggctgtttgttatctaacaaatcgtgcattcgcgggatcagcacccactgcaaccactccagtggttccatggtgtccataaagaacggttgggtactattaaattgatgcggctggggttcatcgtttcgccagtgctgatgttcacgcagtaacgcttcaagcgcctgcaactggagacgaacgcggtcatgagtggtcataaagcaacctcaataagaaaaactgccgcgaaggatagcaggaataaaaaaagggagcactgtattcacagcgctcccggttcgtttcgcagcattccagctacttttgttgctccctgctcatccttgacaacttttcctctggccttgcggccaatcgttcatcctgaactattgcttcctgctcacaccaccccgatgtgatacttcatcctgaagtgtccctggccttcctgacccaccgaatcatcctgaccggttctcattctccatcctggaggtgtcctttaacgcgtcctgcgtcatcctcttcgcttcatccagaagcctttccctgaaacaccatcctggtgtgtcctgcagaagtgtcatcatcctgatgttcacttcgttgtctgactccctgtcgacgaagatagaatcgtctttttcgcgaagtcttacaaggcgcttacagacaatgccttaaggaaaatttcatatgaaagttaagaattaacaatcaacattttgattttaaatgaaaataacgattcttatctttttaagtattcgcttatttcctggcgatctcctacagagtctgtaagagatctctcacaaccagatggggtatttggattacagaagaggcttaagttgattaaggaattccgcaagatttgaggctaaatgcgtccgtttacgtgttcccagcgtctctttgcacacttcaccggagagattacacaccgagatgacctctaactcttcttccagcgtcgcgataaatagcgtgggcggcagttttagccttttctgagtcaccagatgaccaatcagattttcctgcacccgacggaagtcgtcttcactccaggtttgcagcaatgtcagtttgatatcgccaaactgcgcgtgcatatccccggcaaactgagtcgtataaaaggtatgaattgtgggttgtatcacaatatcaaaagcgcgttcaaccgcgtttacattttgttccccggtaaacggctggggttgccagtatacggcatcttcggtagttgaaataatgcacggtgaaggaacaccgtacagttcctcacttaacggccagcttttatgctcttcatgccacgcatcgcagtagcgtgcagtaaaatctttcagggcttgtgcggtcaaatcgtccactaatttctctcttcacttaaaccagatacacttgtcgtttagtttatctggtttatgacggtgaaacatgtcttcttatgcaaaccatcaggcacttgcgggcctgactcttggaaaatcaaccgattaccgggatacctatgacgccagcctactgcaaggcgttccacgcagcctgaatcgcgacccgctgggtctgaaagcggataacctgccttttcacggtacggatatctggacgctgtatgaactttcctggctgaatgcgaaaggtttgccgcaggtcgctgtcggtcatgttgaacttgattacaccagcgtaaatctgattgagtcgaagagttttaagctctatctcaacagttttaaccagacgcgttttaataactgggatgaggtgcgccagacgctggagcgcgacttaagcacttgcgcccagggtaaggttagcgtggcgttatatcgtcttgatgaactggaaggccagccgataggtcatttcaatggcacctgcattgatgaccaggatatcactatcgataactatgaattcactactgactatctggagaatgccaccagcggtgaaaaagtagtggaagagacgcttgtcagccacctgctgaaatcaaactgcctgatcacccatcaaccagattggggttcgatccaaattcagtatcgtggacgccaaattgacagagaaaaactgctgcgttacctggtctcattccgtcatcacaacgagttccacgaacagtgcgtggaacgcatctttaatgacctgttacgcttctgccagccagagaaattaagcgtttacgcacgttatacccgtcgtggcggtctggacattaacccgtggcgcagtaatagcgattttgtcccatcgaccacaagactggttcggcaataaattttttctcaattttgcgtgctggattcacgcagaaggttgtgaaaggtcatcaggcagggctattgtaatcaaagggaatgacgatattcgtcccataaggagtttttcttgattacacatattagcccgcttggctccatggatatgttgtcgcagctggaagtggatatgcttaaacgcaccgccagcagcgacctctatcaactgtttcgcaactgttcacttgccgtactgaactccggtagtttgaccgataacagcaaagaattgctgtctcgttttgaaaatttcgatattaacgtcctgcgccgtgaacgcggcgtaaagctggaactgattaatcccccggaagaggcttttgtcgatgggcgaattattcgcgctttgcaggccaacttgttcgcggttctgcgagacattctcttcgtttacgggcaaatccataataccgttcgttttcccaacctgaatctcgacaactccgtccacatcactaacctggtcttttccatcttgcgtaacgctcgcgcgctgcatgtgggtgaagcgccaaatatggtggtctgctggggcggtcactcaattaacgaaaacgagtatttgtatgcccgtcgcgtcggaaaccagctgggcctgcgtgagctgaatatctgcaccggctgtggtccgggagcgatggaagcgccgatgaaaggtgctgcggtcggacacgcgcagcagcgttacaaagacagtcgttttattggtatgacagagccgtcgattatcgccgctgaaccgcctaacccgctggtcaacgaattgatcatcatgccggatatcgaaaaacgtctggaagcgtttgtccgtatcgctcacggcatcattatcttccctggcggtgtgggtacggcagaagagttgctgtatttgctgggaattttaatgaacccggccaacaaagatcaggttttaccattgatcctcaccggcccgaaagagagcgccgactacttccgcgtactggacgagtttgtcgtacatacgctgggcgaaaacgcgcgccgccattaccgcatcatcattgatgacgccgctgaagtcgctcgtcagatgaaaaaatcgatgccgctggtgaaagaaaatcgccgcgacactggtgacgcttacagctttaactggtcaatgcgcattgcaccagatttgcaaatgccgtttgagccgtctcacgagaatatggctaatctgaagctttacccggatcaacctgttgaagtgctggctgccgacctgcgccgtgcgttctccggtattgtggcgggtaacgtaaaagaagtcggtattcgcgccattgaagagtttggtccttacaaaatcaacggcgataaagagattatgcgtcgtatggacgacctgctacagggttttgttgcccagcatcgtatgaagttgccaggctcagcctacatcccttgctacgaaatctgcacgtaatctccgctcccccggtgacgtttgttgccgggttttctcgtttttggtcacttactcatcaactcatttcatttgttatatgaatgtttcttaccaccctcacgcgacaaatatcatcacagttaatatgtcatacaatttatgttgcaacgcaaacgtttccctattttcataaaccgtattttatcgctatgaaaaagaaattatcgccatgattaactaaaagtattgattttttcagttcaacctacatatattgcgcgccccggaagaagtcagatgtcgtttaatgggcaaatattgcccttaaattctcttttacttttgatttacagagtaaagcgttgggataatctatcttccaagtagattattgtatttgagatcaagatcactgatagatacataacttgtgtgtatctttccgccctcaaattattacggcggtaaatgattaagccatcgccgatagacagatttcatttttacggtcaggcaccttcccgggctgaactggctaaaagctgaattatttgcattcctccaggagaaatagatggaaacgactcaaaccagcacgattgcgtcgaaagactctcgtagtgcctggcgcaagacagacaccatgtggatgctgggcctttacggcacggcaatcggcgcgggcgtgctgttcctgccaatcaacgccggtgttggcggtatgatcccgctgatcatcatggctatccttgcgttcccgatgacgttttttgctcaccgcggcctgactcgcttcgtactgtctggtaaaaacccgggcgaagacatcaccgaggttgtagaagaacactttggtattggcgcaggtaaactgattaccctgctctacttcttcgctatctacccgatcctgctggtttatagcgtggcaatcaccaataccgttgaaagcttcatgtctcaccagctgggtatgacgccaccgccgcgtgcgattctgtcgctgatcctgatcgtgggtatgatgaccatcgttcgctttggtgagcagatgatcgttaaagcgatgagtattctggtattcccgtttgttggcgtactgatgctgctggctctgtacctgatcccgcagtggaacggcgcagcactggaaacgctgtctctggacactgcatctgcaaccggaaacggtctgtggatgaccctgtggctggcaattccggtaatggtgttctcgttcaaccactctccgatcatctcttctttcgccgttgcgaagcgtgaagagtacggcgatatggcagaacagaaatgctcgaagatcctggcattcgcacacatcatgatggtgctgaccgtaatgttcttcgtcttcagctgcgtactgagcctgactccggcagacctggctgcggctaaagagcagaacatctcgattctgtcttacctggctaaccactttaacgcaccggttatcgcgtggatggctccgattatcgcgattatcgctatcaccaaatccttcctcggccactacctgggcgcacgtgaaggcttcaacggtatggtgattaaatctctgcgtggtaaaggtaagtctatcgaaatcaacaagctgaaccgtatcactgcgctgttcatgctggtaacgacctggattgttgccaccctgaacccgagcatcctgggtatgattgaaaccctgggcggcccaatcatcgcgatgatcctgttcctgatgccgatgtacgcaattcagaaagtaccggcaatgcgtaagtacagcggtcacatcagcaacgtattcgttgtcgtgatgggtctgattgcaatctccgcaatcttctactctctgttcagctaagtcctttcgcgccgctttcgggcggcgcttcctccgttttaacgcgatgtatttcctatgattagcgtattcgatattttcaaaatcggcattggcccttccagttctcataccgttggaccaatgaaagcgggtaaacaatttaccgacgatctgattgcccgtaatctgcttaaagacgtgacccgcgtggtggttgacgtgtacggctcgctctctctgaccggtaaaggccaccacactgatatcgccattattatgggcctggcgggtaacctgccggataccgtggatatcgattccatccctggttttattcaggatgtgaatactcatggtcgcctgatgctggcaaacggtcagcatgaagtggagttcccggttgatcagtgcatgaacttccatgcagacaacctttctctgcatgaaaacggtatgcgcattaccgcgctggcgggcgataaagtcgtttacagccagacttactactctattggcggtggctttatcgttgatgaagagcattttggccagcagaatagcgcaccggttgaagttccttatccgtacagttcagcagccgatctgcaaaaacattgtcaggaaaccgggctgtcactctctggcctgatgatgaaaaacgagctggcgctgcacagcaaagaagagctggaacagcacctggcgaacgtctgggaagtcatgcgcggcggtattgagcgcggtatttctaccgaaggcgtgttgcctggcaaactgcgcgtaccacgccgtgctgcggcactacgccggatgctggtcagccaggataaaaccaccactgacccgatggcggttgttgactggatcaacatgtttgcactggcagtgaacgaagagaacgccgctggcggtcgcgtggtgactgcgccgactaacggtgcgtgcgggattatcccggctgtgctggcgtactacgataagtttatccgcgaagtgaacgctaactcactggctcgttacctgctggtagccagtgccattggttctctttataagatgaacgcgtcaatttctggtgctgaagtcggctgccagggtgaagttggtgtggcgtgctcaatggcggcggctggtctggcagaactgttaggtgcaagcccggcgcaggtgtgcatcgcggcggaaatcgccatggagcacaacctcggtctgacgtgtgacccggtcgccggacaggtccaggtgccatgcatcgagcgtaacgccattgcggcagtaaaagcggtgaacgccgcacgtatggcgctacgccgtaccagcgagccgcgcgtctgcctcgataaagttatcgaaaccatgtacgaaacaggtaaagatatgaacgccaagtaccgcgaaacctctcgcggcggcctggcaatgaagatcgttgcctgcgattaatcgctctccagaggcctcgttttgcgaggcctcttcccgatttctcatccagccgtagcctgttccggcatcgaatgttacccttatcgcctgatctttaagggggttatcgtggctgttcatttgcttattgtcgatgcactgaatcttattcgtcgcattcatgccgttcagggatcgccctgtgtcgaaacctgccagcatgcgctcgatcagctcattatgcacagccagccaacccacgcggtcgccgtttttgatgatgaaaaccgcagtagcggctggcgtcatcagcgtttaccagattacaaagcgggtcgaccgccaatgccggaagagttgcacgacgagatgcctgcattacgcgccgcctttgagcaacgcggcgtcccgtgctggtcaaccagcggcaacgaagccgatgacttagccgccacgctggcggtcaaagtgacacaggccgggcatcaggcaacgattgtttcgacagataaaggctactgtcagttactttcaccgacattacgtattcgtgattacttccagaaacgttggctggatgcgccatttatcgataaagaatttggcgttcaaccgcagcagttgcccgattactggggacttgcggggatcagcagttcaaaggtaccgggtgttgcgggaatcggaccaaaaagcgccacgcagctgctggtcgagtttcagagtctggaagggatatatgagaatctggatgcggttgccgaaaagtggcgcaaaaaattagaaacccataaagagatggcgtttctgtgccgcgatattgcccgcttacaaaccgatttgcatatcgacggcaatttacagcaattgcggttggtacggtaacggcgagccggatacgccgcaaacgtcgtatccggcattatcacatcagcgcatttaccaggcggtatggtaaagctctacaatatcctcaagcgttgcttcacgcgggttgccaccggtacaaacatcatccagtgccgcctgcgccagtgccggaatgtcttccttgcgtacaccaacatcacgcaaatgtggcggaataccgacatcacggttgagagcaaacaccgcttcaacagcggcattacgcgcctcttccaggctcataccttccactttcacgcccataacgcgcgcgatatcgcggtacttctcaccggtaaagtcagcgttatagcgcatgacatgcggtaacaggatggcgttcgcaacaccgtgtggagtgttgtaaaacgcgcccagtggatgcgccataccatgcaccaaccctaacccaacattcgagaagcccatacccgcaacatactgcccgagcgccatttcttctccggcatccttatcaccagcaaccgatcctcgcagcgccccagcaatgatttcaatcgctttaatgtgcagtgcatcggttagcgcccacgcgccacgggtaatatacccctcaatagcatgagtgagcgcatcgacacccgtcgcagctttcagcgctggaggcataccatccatcatgtcagcgtcaataaacgccacctgcgggatatcatgcggatcaacgcaaacaaacttgcgccgtttctcttcgtcagtgatcacgtagttaatggtcacttctgccgcagtacctgctgtggtaggaattgccagaatcggtacactgggtttattggtcggggaaagcccttccaggctacgcacatcggcaaactccgggttgttgctgataatgccaatcgctttacaagtatcctgtggagaaccaccaccaatagcgatcaggtaatccgcgccgctattctggaatacaccgagcccttctttgacgacagtaattgttgggttgggcactacgccgtcgtaaatcgcccatgccagccctgcagcatccatcttatcggtcactttcgccaccacgccgcattgcaccagcgttttatcggtgacgatcagcgccttctgataaccacggcgtttcacctcatcggttaaagccccaacagcaccccgaccaaaccatgccgtttcgttcagaatcattctgttagccatcatccttctccttgttgctttacgaaattactcttcaatccgtaacccataggttttgaatttctccagcactacggcaatctcttcatcgctcagcactggcaccgggtccgtaatcgccagggtcgtcaggtaaagttgcgccagcacttcaacttcatgcgccagccataacgctttttccagattcacctcacaagcgataagcccatgatgttgtaacaaagttgccttacgatttttgagagcctgcgcaacatgttcagaaagttcacgtgttccaaaggtcgcataaggcgcgcaaggaatagaattaccgccagccgccgcaatcatgtagtgaatagcggggatcgatcggttaagaatggaaactgccgtgcaatgaacggcatgattgtgaacaaccgcgttggcatccggtctgctttgataggccgccatatggaaacgccattcgcttgaggggagctttccttcctcatgtttaccgttgccatcaataaagacaatatgcgactccgtcagtttttcatatggaatgcctgtaggcgtaatcagcatcccatcctgataacgtacactgacgttccccgctgtcccctggttcagtcccaggcgggtcatttccaggcaagtgtcaataatctgacgagcaagtttatttcgttccattagctacctctctctgattcaaaacagggcaataatgttgttcctttcacactattgaattagccgtttaattacccaccatcttcttcctgattaaccagaaagaaattcacaagcttatattttgtgacctggttcaactaatcacagtaaataactgcaagttctctttttataaccccattaaaaatgaccgctcttaaaaatatttatcaaaacggtcatttttctattcactcaagccaggaatgcccgttttcggcataaacaattaatacggtcatctggtttgtgttttttatgatttattttctgaaacgggcatgaaatttcgattattaaagtgatggtagtcacataaagtcaccttccagctaataagtgtgaccgccgtcatattacagagcgttttttatttgaaaatgaatccatgagttcatttcagacaggcaaatattcactgatatgaagcccgaactcgctggttttgcacttttgaaaacataaccgattacgtgcttaagcttctgaacctaagaggatgctatgggaaacacatcaatacaaacgcagagttaccgtgcggtagataaagatgcagggcaaagcagaagttacattattccattcgcgctgctgtgctcactgttttttctttgggcggtagccaataaccttaacgacattttattacctcaattccagcaggcttttacgctgacaaatttccaggctggcctgatccaatcggccttttactttggttatttcattatcccaatccctgctgggatattgatgaaaaaactcagttataaagcagggattattaccggattatttttatatgccttgggcgctgcattattctggcccgctgcagaaataatgaactacaccttatttttagttggcctatttattattgcagccggattaggttgtctggaaactgccgcaaacccttttgttacggtattagggccggaaagcagtggtcacttccgcttaaatcttgcgcaaacatttaactcgtttggcgcaattatcgcggttgtctttgggcaaagtcttattttgtctaacgtgccacatcaatcgcaagacgttctcgataaaatgtctccagagcaattgagtgcgtataaacacagcctggtattatcggtacagacaccttatatgatcatcgtggctatcgtgttactggtcgccctgctgatcatgctgacgaaattcccggcattgcagagtgataatcacagtgacgccaaacaaggatcgttctccgcatcgctttctcgtctggcgcgtattcgtcactggcgctgggcggtattagcgcaattctgctatgtcggcgcacaaacggcctgctggagctatttgattcgctacgctgtagaagaaattccaggtatgactgcaggctttgccgctaactatttaaccggaaccatggtgtgcttctttattggtcgtttcaccggtacctggctcatcagtcgcttcgcaccacacaaagtcctggccgcctacgcattaatcgctatggcactgtgcctgatctcagccttcgcaggcggtcatgtgggcttaatagccctgactttatgcagcgcctttatgtcgattcagtacccaacaatcttctcgctgggcattaagaatctcggccaggacaccaaatacggttcgtccttcatcgttatgaccatcattggcggcggtattgtcactccggtcatgggttttgtcagtgacgcggcgggcaacatccccactgctgaactgatccccgcactctgcttcgcggtcatctttatctttgcccgtttccgttctcaaacggcaactaactgaacatattttccgaataaagtgaggaatctgtaatgaaaaaaatcagcttaccgaaaattggtatccgcccggttattgacggtcgtcgcatgggtgttcgtgagtcgcttgaagaacaaacaatgaatatggcgaaagctacggccgcactgctgaccgagaaactgcgccatgcctgcggagctgccgtcgagtgtgtcatttccgatacctgtatcgcgggtatggctgaagccgctgcttgcgaagaaaaattcagcagccagaatgtaggcctcaccattacggtaacgccttgctggtgctatggcagtgaaaccatcgacatggatccaacccgcccgaaagccatttggggctttaacggcactgaacgtcccggcgctgtttacctggcagcggctctggcagctcacagccagaaaggcatcccggcattctccatttacggtcatgacgttcaggatgccgatgacacatcgattcctgccgatgttgaagaaaaactgctgcgctttgcccgcgccggtttggccgtcgccagcatgaaaggtaaaagctatctgtcgctgggcggcgtttcgatgggtatcgccggttctattgttgatcacaacttctttgaatcctggctgggaatgaaagtccaggcggtggatatgaccgaactgcgtcgccgtatcgatcagaagatttacgacgaagccgaactggaaatggcactgacctgggctgataaaaacttccgctatggcgaagatgaaaataacaaacagtatcaacgcaatgccgagcaaagccgcgcagttctgcgcgaaagtttactgatggcgatgtgtatccgcgacatgatgcaaggcaacagcaaactggccgatattggtcgcgtggaagaatcacttggctacaacgccatcgctgcgggcttccaggggcaacgtcactggaccgatcaatatcccaatggtgacaccgccgaagcgatcctcaacagttcatttgactggaatggcgtgcgcgaaccctttgtcgtggcgaccgaaaacgacagtcttaacggcgtggcaatgctaatgggtcaccagctcaccggcaccgctcaggtatttgccgatgtgcgtacctactggtcaccagaagcaattgagcgtgtaacggggcataaactcgatggactggcagaacacggcatcatccatttgatcaactcaggttctgctgcgctggacggttcctgtaaacaacgcgacagcgaaggtaacccgacgatgaagccgcactgggaaatctctcagcaagaggctgacgcttgcctcgccgctaccgaatggtgcccggcgatccacgaatacttccgtggcggcggttactcttcccgcttccttaccgaaggcggcgtcccgttcaccatgacccgtgtcaatatcatcaaaggcctgggaccggtactgcaaatcgcggaaggctggagcgtggaattgccgaaggatgtgcatgacatcctcaacaaacgcaccaactcaacctggccaaccacctggtttgcaccgcgcctcaccggtaaagggccgtttacggatgtgtattcggtaatggcgaactggggcgctaaccacggggttctgaccatcggccacgttggcgcagactttatcactctcgcctccatgctgcgtatcccggtatgtatgcacaacgttgaagagaccaaagtatatcgtccttctgcctgggccgcgcacggcatggatattgaaggtcaggattaccgcgcttgccagaactacggcccgttgtacaagcgttaatacattactccctgatgtgatgcccggtcgctccggctaccgggcctaaacaagcaagagtggttagccggataagcaatgttatccggctatattgcaggagcgattatgaaacaagaagttatcctggtactcgactgtggcgcgaccaatgtcagggccatcgcggttaatcggcagggaaaaattgttgcccgcgcctcaacgcctaatgccagcgatatcgcgatggaaaacaacacctggcaccagtggtctttagacgccattttgcaacgctttgctgattgctgtcggcaaatcaatagtgaactgactgaatgccacatccgcggtatcgccgtcaccacctttggtgtggatggcgctctggtagataagcaaggcaatctgctctatccgatcattagctggaaatgtccgcgaacagcagcggttatggacaatattgaacagttgatctccgcacagcggttgcaggctatttctggcgtcggagcctttagtttcaatacgttatataagttggtgtggttgaaagaaaatcatccacaactgctggaacgcgcgcacgcctggctctttatttcgtcgctgattaaccaccgtttaaccggcgaattcactactgatatcacgatggccggaaccagccagatgctggatatccagcaacgcgatttcagtccgcaaattttacaagccaccggtattccacgccgactcttccctcgtctggtggaagcgggtgaacagattggtacgctacagaacagcgccgcagcaatgctcggcttacccgttggcataccggtgatttccgcaggtcacgatacccagttcgccctttttggcgctggtgccgaccaaaatgaacccgtgctctcttccggtacatgggaaattttaatggtccgtagcgcccaggttgatacttcgctgttaagtcagtacgccggttccacctgcgaactggatagccaggcagggttgtataacccaggtatgcaatggctggcatccggcgtgctggaatgggtgagaaaactgttctggacggctgaaacaccctggcaaatgttgattgaagaagctcgtctgatcgcgcctggcgcggatggcgtaaaaatgcagtgtgatttattgtcgtgtcagaacgctggctggcaaggagtgacgcttaataccacgcgggggcatttctatcgcgcggcgctggaagggttaactgcgcaattacagcgcaatctacagatgctggaaaaatcgggcactttaaggcctctgaattattgttagtcggtggaggaagtcgcaacacattgtggaatcagattaaagccaatatgcttgatattccggtaaaagttctcgacgacgccgaaacgaccgtcgcaggagctgcgctgttcggttggtatggcgtaggggaatttaacagcccggaagaagcccgcgcacagattcattatcagtaccgttatttctacccgcaaactgaacctgaatttatagaggaagtgtgaaatgctgaaaacaatttcgccgttaatttctcccgaactattgaaagtgctggcagagatgggacatggagatgaaattattttttccgatgctcactttcccgcccattcgatgggaccgcaggtgatccgcgctgatggcctgttggtgagcgacttgctccaggcgattatcccgttatttgaactggacagttatgcaccgccgctggtgatgatggcggcggtagaaggtgacactctcgatcctgaagtagaacgacgttaccgtaatgcgctttcactacaagccccgtgtcctgacatcatccgcatcaatcgttttgcgttttatgaacgggcgcaaaaagcctttgcgatcgttatcacaggcgaacgagcgaagtacgggaatattcttttaaaaaaaggggtaacaccgtaatctcataccggtacgcccgcatgacgcgggcggttatcgaatgatggggtgaaaaatatgaaagcggcacgccagcaagcgatagtcgacctgctgctgaaccataccagcctgaccacggaagctctctctgaacagctaaaggtcagtaaagaaaccattcgtcgcgatctcaatgaattacagacgcagggtaaaattctgcgcaatcatggacgcgctaaatatatccaccgtcaaaatcaagacagtggcgatccctttcacatcaggctgaaaagccattatgcgcataaagcagatatcgcgcgcgaggcgctcgcgtggattgaagaagggatggtgatagccttagacgccagttcaacttgctggtatctggcacgccagttgcctgacatcaacattcaggtcttcaccaatagccatccgatttgccatgaactcggtaaacgcgaacgcattcaactgatcagttccggcggcacacttgagcgcaaatatggctgttacgtcaatccctcgctgatttcccaacttaaatcgctggaaatcgatctgtttattttttcttgtgaagggatcgatagcagcggcgcactgtgggactccaatgcgatcaacgctgattacaaatcgatgctattaaaacgtgccgcgcaatcgttgttattgattgataaaagtaaatttaatcgttcaggggaagcccgcatcgggcatctggatgaggtaacgcacattatttctgatgagcgccaggttgcaacttctttggtaacagcctgacggaaagggtagcaggccggagacgacgccccggccttgcctgttatcgctcgtcgcgacgaccacccaccgcagcccagatgcggcggacgtgcaccgtcacttcttcgcgatcgtgatacaactgccgcgcctgaatctgagcatttatgccatgttcatcaagctgtgcctgaatatacgccagattgtgtgacacttcttcgtagcgttttttcatcggcagtttgaggttgaaaatggtttcacggcaccagccattaaccagccactgcgccatcaatgccgcaactttcgccggtttttcaaccatatcgcataccatccaggagatattgctgcgcgtcggacggaatttgaaaccgtcttcccgcagccacgtcacctgtccggtatccatcagactttgcgccatcgggccgttgtcgacggaataaacccacatgttgcgcttcaccagttggtaggtccagccgccagggcaagcgcctaaatccaccgcccacatcccgttcgccaggcgttcatcccactcatccgcaggaataaacacatgaaatgcctcttccagtttgagcgtggaacgactcggcgcatctgccggaaatttcaggcgcggaatgcccatatagaacggcgaattattgttgctgtatgagtaaccggtatagcagcagcctggtgcaataaagaatacatgcacaaccggacgcttcggcgtttcatagttcgccagcaccccggcatcgcgcaaggcagcgcgtagcggaacagtaaatttacggcagaatttcagtaactctttgctttcgttggtatcggcaacttcaacacgcagttcaccgcccttctctactacgccctgtaacatgccgacaatgggggtaatacgatcttctggcggcaaatgctgcaggagttcccccaccacaaaccactggcgggcaaaaattaatgaactgaacggcagctcacggattaacttatcgccatcatcaggttgataacattcataaatgacataacccgcattctctttcacgcgggcaaaaccgaaaatttcccgctggccggctttatcggtaatttctgcggcgcactctttttcaaagcccggacggcacagcaatacaaccttattcatgacttacgcccttgcgctttaaacggatagcaccaactaacattaacgcccagcccgcgaggaagctcacgccgccaaccggagtgacaaacgcccacaaacgcagatgggacagcgccaggcaataaaggctgccgctgaacaacaccgtgcctaacgcgaggaaaacgctactccagtaaaaccagatactgatgcgacgctgcattgccaccgccagacctaagatcgccagcgtatgaaacgcctggtattcgaggccggtctggatccagcccatctcaacggcccccatggttttacttaacacatgcgcgccaaaagcgcccagagccacaaaaatgaagccgctaatggcggcgaaaatcagcatgaaacggctggtcatggtcgtaccctacgtaaattattgttcataacgaaagcggaatttttcttgttcagcagcggctttcgccaggatccattggcgaaaggcggctattttacccagttctgcctggctgtcatgacaaaccagataaaaagcgtttttactgaccagaacatcattaaacgggcaaacaagacgtccggcctcgatttcagattgcgccatcacgttatttgccaacgccactccctgcccgtgaatagccgcttgcagcaccatggcgctatgactaaaaattggcccttgctgaacgttgatatgatttaaccccaactgtcgggtatatgtctgccagtcacggcgtgacgcatcatgtaataacgtatgtttagccagatcttccggggtcttcaagggtttttcgcctgtcagcagtagcggcgaacacaccggcaataaatattcggcgtacagtttttccacccgtagccccggccagttgccccgaccataaaatatcgccacatcaacatcatccgccagcttatcttcctgacgatcaaccgcctggattcgaacgtcaattcccggataagctgaattaaagctggaaagtcgcggaaccaaccaatgaatggcgaaactggggagtaaactgaccgtcaacgcccccttggcgctacgggcctggagtttacgcgtcgcttcggttaattgcgaaaatatctctttgatatcgaggaaatagctttgcccttcctcggtcagcaggagtgaacgattacggcggcggaacagttttagccccaaaaaatcctcaagagacttgatttgatgacttactgcggcctgggtcacaaaaagctcttctgctgcgcgagtgaaacttaaatggcgtgctgcggcatcaaaaactcgtaaggcatttagcggtggtaatcgtttagacatggcttttaaactttgatgttaaatgaatttaacaattagatcacactgtgtaacctattagtttttttaatctgagccattataaattgtccgttgagcttctaccagcaaatacctatagtggcggcacttcctgagccggaacgaaaagttttatcggaatgcgtgttctggtgaacttttggcttacggttgtgatgttgtgttgttgtgtttgcaattggtctgcgattcagaccatggtagcaaagctaccttttttcacttcctgtacatttaccctgtctgtccatagtgattaatgtagcaccgcctaattgcggtgcttttttttaccttgcgatcgcgaattactgatccagttcgaccatctctttcacgtcagtacggttgatctgctgtttgttgccattagcgtctttatacgaaatcataccggtatcgttatcagtctgtggtttgccgtcagagacgatggtacgtccgtcattggtgtgcatcacatagttcgaaccggaacaggcgctcagggcaaaagtcagcatacaggcagaaataattgcggcagtctttttcatcatcttctccttaaagcgattaataaatcttaatagtattgattaacaggctaaaattaacgcctaacactattcagcatatgttacttgcgcggcttcgccaggatatccagataattctgatggttagcactctccttgtatcaaagtgaattttgcgtcacgatcggtgcatcaagccgaggagtaccatgaacgtttttaatcccgcgcagtttcgcgcccagtttcccgcactacaggatgcgggcgtctatctcgacagcgccgcgaccgcgcttaaacctgaagccgtggttgaagccacccaacagttttacagtctgagcgccggaaacgtccatcgcagccagtttgccgaagcccaacgcctgaccgcgcgttatgaagctgcacgagagaaagtggcgcaattactgaatgcaccggatgataaaactatcgtctggacgcgcggcaccactgaatccatcaacatggtggcacaatgctatgcgcgtccgcgtctgcaaccgggcgatgagattattgtcagcgtggcagaacaccacgccaacctcgtcccctggctgatggtcgcccaacaaactggagccaaagtggtgaaattgccgcttaatgcgcagcgactgccggatgtcgatttgttgccagaactgattactccccgtagtcggattctggcgttgggtcagatgtcgaacgttactggcggttgcccggatctggcgcgagcgattacctttgctcattcagccgggatggtggtgatggttgatggtgctcagggggcagtgcatttccccgcggatgttcagcaactggatattgatttctatgctttttcaggtcacaaactgtatggcccgacaggtatcggcgtgctgtatggtaaatcagaactgctggaggcgatgtcgccctggctgggcggcggcaaaatggttcacgaagtgagttttgacggcttcacgactcaatctgcgccgtggaaactggaagctggaacgccaaatgtcgctggtgtcataggattaagcgcggcgctggaatggctggcagattacgatatcaaccaggccgaaagctggagccgtagcttagcaacgctggcggaagatgcgctggcgaaacgtcccggctttcgttcattccgctgccaggattccagcctgctggcctttgattttgctggcgttcatcatagcgatatggtgacgctgctggcggagtacggtattgccctgcgggccgggcagcattgcgctcagccgctactggcagaattaggcgtaaccggcacactgcgcgcctcttttgcgccatataatacaaagagtgatgtggatgcgctggtgaatgccgttgaccgcgcgctggaattattggtggattaatgacaaacccgcaattcgccggacatccgttcggcacaaccgtaaccgcagaaacgttacgcaataccttcgcaccgttgtcgcaatgggaagataaatatcgccagttgatcatgctggggaaacagcttccggctttgccagacgagttaaaagcgcaggctaaagagattgtcggatgcgaaaaccgcgtctggctgggatataccgtgactgaaaacggtaaaatgcacttctttggcgacagcgaagggcgcattgtgcgcggcctgttggcggtgttgttgactgccgttgaggggaaaaccgtcgccgaattgcaggcacagtcgccgctggcattgtttgatgagctgggattgcgtgcacagcttagcgcctcacgcagccaggggttgaatgcgttaagcgaggcgattatcgctgcggcgaagcaggtttaagcacagaaccaggtcggataagacgttcgcgtcgcatccgacctgattgtttaaccctgacgcgccgctttcgccatcatcttcttcagcgcatgagaaaccgcaacaaacccaaaggtggcggtcaccatcgttgccgcgccaaatccagatgcacaatccatccgcttcggcccttctgccgtggctttcatcgcacacacagtaccgtctgactgcgggtacaccagcgcttcagtagaaaacacgcaatcgacgccgagcttacctttactgtttttcactacgccaaaatcgcttttcaggcgctcgcgcaacttcgccgccagcggatcctgaatcgttttcgccagatcggtaacctgaatctgcgtcgggtcaatctgcccacccgcgccaccggtcgtgaccagcgggattttattgcgccgacaataagcaatcagcgccgctttgggccgtacactatcaatggcatcaatcacgtacgaataacccacgctcatatactgcgctacgttatccggcgtcacgaaatcatccaccaccgttacacggcactccgggttaatctggcgaatacgctccgccatgacttccgcttttgccagcccgacgttatcgcgcagagcgtgaatttgccgattggtattggtgacgcacacatcatccatatcgataagcgtgattgcgccaatccccgtgcgcgccagcgcttccgccgcccaggaaccgacaccaccgataccaaccacacaaatatgcgcgtcagcaaacagttgcaacgctttttcaccatacagacgcgctgtgccaccaaaacgctgacgccatgcatcactaattaccacagacatagcacctcagaattaaaaagggtgaggttatccctcaccctggcgtatccgtaaaaacggtatacagaataacacatcagccgctaaagacgttacctgcgcccggggcggttttcagcacccagacacgtccatagtggttgtaccaacctgcgcgatgtccggcttccggcccgatcccttgatagatatcgaagtgttggcctttgattgcgccaccgacatccagcgccaccatcagacgcaattcgtactgaccgttaaatttgccgttattatccagcagcggcacttctgccagcaaggtagtacctggcggaataattgaacgatcggaggcaacagaagcacggccaaccagcggcaccgcacttgcccctttcaccggtgcaaaagattgcggtttaaagaaaacgaaagacgggttctgttccagcagctcgcgaacctcggcttcactgtgtgtttcgccccaatgacgaatcgcctgcatcgacatatcttcttttttcacttcgccacggtcgatcagcaccttaccaatgctgcgataggcatgaccgtttttccctgcatagctgaaaaagttaagcggactgccatcaccaaagtcgatatacccgctaccctgcacatccataatgaagttatccatcagggagttgctgtaagcgagaatatatttatcactcagcgcccctgcgtagatctccgcacgagacggcagacgaccacgttttggcggcatacggtaaataggatactggaactcgccctggcgggtatggcgcgcctgaattaccggcgtgtaatagcctgtaaactgcacgttaccatagttgtcggcaccttccatctgccaggcatcaatgccgaactggcgcatattgcgggtatcaccgcctgcgcgcagccactcttgcaccgcgttataaacattactctggttgccatacagacgcggtgacgaattacggatatggttaatttgctcggcaaaatcaccggcgttaatcggcgcgccaacggcatctggctggttcaccagagagaaaggctgggtaaatttcccgtctttatattgctgtccgcgatcggttggtttggaagagcaggcggcaagcattgccacaaccgtgcccataagaaggtactttacccaacgtcctttcattgttctcttcttcaggttaaaaaataaggcgcaacgaagataacaaaccgccgcgtttaatgaaatgagcagcctctccctgacgcaaattttgcacaaaaaataggctttagtggtttgtttttgttcaaaatcatgctaaatccgtgatcggggtaaaaaaaaggttgcatgaaaacgcgagcggagtatagtgcgcatccacggacgcggggtggagcagcctggtagctcgtcgggctcataacccgaaggtcgtcggttcaaatccggcccccgcaaccaattaaaatttgatgaagtaaagcagtacggtgacgcggggtggagcagcctggtagctcgtcgggctcataacccgaaggtcgtcggttcaaatccggcccccgcaaccaatcaaatttgatgaaataaagcagtacggtgacgcggggtggagcagcctggtagctcgtcgggctcataacccgaaggtcgtcggttcaaatccggcccccgcaaccaattattgaacaccctaacgggtgtttttttgtttctggtctcccataaaaaagcgccattcagcgcctttttatcatccccttctcgccagcgtcgcccatcggcaaaatacgctttaattcccgcaagaatagactccgcaacttcctgctggaaagtcgccgttttcagtttacgctcttcctcaacgttactgataaacgccgtttcgaccagaatggagggaatatctggtgcctttagtacggcaaacccggcctgttcaacttgatttttatgcagcttgttgattttaccgagcttattcagcaccgctttaccaaacttaaggctgtcagcaatggtcagcgactgcaccatatcgaacatggtgtggtcgacatagcggtcaccgcttttgctcacgccaccaatcaagtccgaggcgttctgggtttgtgccagatattttgccgcagtactggttgcacctttggttgagagcgcaaacacagaggaaccgctcggctgacgactggtaaaggcgtcggcatggatagagacaaacaggtcagcacgctgtttctgggcttttgctacgcgcacttgcaatggaatgaagatgtcttcattgcgcgtcatgtacaccttcatattgccctctttctcgatcagagagcgcaaacggcgagctatttgcaataccacatctttttcgcgcgttttgtatttccccaccgcaccggagtcttcgccaccgtggccagggtcaagcataatgacaatcggacgatcgcgccctgctttacccggttgtggaccactttgcgctggcggcacctgcttttcgaggtcgcctttgttgtaatcctccagcagcgccagcagcgggtcctgcatatcctgtgcattggccggatagaggtccatcaccagacgctctttaaacccggcgaccggcgcaagggcaaacagctgcggttttacgttttgctttaattcaaaaaccatccgtacggtttgcgggtcaaattgcccgacgcgcgccgacttgatgaacgggtcgtctgcacgaatttgtgccgccatccccttgagtaccgagttcaggtttacatcttcgatatccaccaccacgcgttcagggttactcaacgcgaactgcttatatttcagctgacgatttgattccaccgtcacgcgggtgtagctggacgcaggccagacgcgcaccgccacgacctggctgaccgcagccagactgacctgacttacgctcaatagccacatggcacccgcgccttgcagtaaacgacgacggctgattgcagtgttggatcctgacatgcctctcccgagcaaaagaaatctaagctgtgtaacaagtaaacgactaatttgaccggaaactttagcgaaagacgcataatctgtcatctaataaacggtaaacattctttttatattcacggcattactgataaaaaagtcgctctcgcataaaatttacacttgcaccctgcgaaaaaacagaataaaaatacactaatttcgaataatcatgcaaagaggtgtgccgtggtaaaggaacgtaaaaccgagttggtcgagggattccgccattcggttccctatatcaatacccaccggggaaaaacgtttgtcatcatgctcggcggtgaagccattgagcatgagaatttctccagtatcgttaatgatatcgggttattgcacagcctcggcatccgtctggtggtggtctatggcgcacgtccgcagatcgacgcaaatctggctgcgcatcaccacgaaccgctgtatcacaagaatatacgtgtgaccgacgccaaaacactggaactggtgaagcaggctgcgggaacattgcaactggacatcactgctcgcctgtcgatgagtctcaataacacgccgctacagggcgcgcatatcaacgtcgtcagtggcaattttattattgcccagccgctgggcgtcgatgacggcgtggattactgccatagcgggcgtatccggcggattgatgaagacgcgatccatcgtcaactggacagcggtgcaatagtgctaatggggccggtcgctgtttcagtcactggcgagagctttaacctgacctcggaagagattgccactcaactggccatcaaactgaaagctgagaagatgattggtttttgctcttcccagggcgtcactaatgacgacggtgatattgtctccgaacttttccctaacgaagcgcaagcgcgggtagaagcccaggaagagaaaggcgattacaactccggtacggtgcgctttttgcgtggcgcagtgaaagcctgccgcagcggcgtgcgtcgctgtcatttaatcagttatcaggaagatggcgcgctgttgcaagagttgttctcacgcgacggtatcggtacgcagattgtgatggaaagcgccgagcagattcgtcgcgcaacaatcaacgatattggcggtattctggagttgattcgcccactggagcagcaaggtattctggtacgccgttctcgcgagcagctggagatggaaatcgacaaattcaccattattcagcgcgataacacgactattgcctgcgccgcgctctatccgttcccggaagagaagattggggaaatggcctgtgtggcagttcacccggattaccgcagttcatcaaggggtgaagttctgctggaacgcattgccgctcaggcgaagcagagcggcttaagcaaattgtttgtgctgaccacgcgcagtattcactggttccaggaacgtggatttaccccagtggatattgatttactgcccgagagcaaaaagcagttgtacaactaccagcgtaaatccaaagtgttgatggcggatttagggtaagtgatgaaaatcgtcggatgcgacatgcgtaacactcgtacgtcgcatccggcaattacgtttattcccgtgaactaaacaacgccgccagaccactgcgccgctcagtacgagtggcgattgccgcacttaatatgcgctcatcggcatacagcgacagacggcgacgcgcgcgggtcactgcggtgtaaaccagctctcgcgttactaccggcgtgcgttggctcggtaaaatcaacgccgcatggtcgaactccgatccctgcgatttatgtaccgtcatcgcccacgtcgtttcgtgctctggcaggcggctcggttgcacagacttaatattgccgtccggcatcgcaaaccaaacgcgcgtcccctgcccgcgatccagcgcaataccgatatcgccattaaacaacccaagcgcgctgtcattacgggcaatcatcaccggtcggccttcgtaccaacgagagtgcggatgacgatgaattttgcgcttctgttgcataaactgctcaattcgttcattcagtccagccacgccaaacggcccttcccgcagggcgcacaaaagctggtactcattgaacgcctgaatgattaaatccggctcggcacgcgcttgcagcagatccagataacgtccgtaacccgcaagagcttcctcaagcatcgcaatataatcttcgccgctctgtaaaagtcgtttttcgatatcagtaaaatcctgctgaaaaacggttttcactgccgttttatcaccacggttgatcgccgcagctaactgaccaatgccagaatcgctgccgaaacgatagcttttttgcagcaggcagagactgtcgcgcaaagatgccgcttctgtgccggttcctgccggaacgtgagtccccgtcaggcggcttagctgcctggcacgctcggcggtaaagcccgcgttggcataagcgcagatatcgcccagcacagcccagcctcaaccgaggccagttgatcacgatcgccgagaaagatcactcgcgcatgatctggcaaggcgtcgatcagtctcgacatcataggcagatcgatcattgacgcttcatctaccaccagcacatcaagatgcagcgggttaccggcatgatgacgtaaacgctggctacccggctgcgcgcccagcaatcggtgcaaagtgctggcatcttccggaatgcgtttcttttgttcatcggtcagcggtaactgtcgcaaagccttgccgagagattcggttaagcgcgcggcagctttacccgttggtgcagccagacggatacggcagcgttcgccgtcggccatttgaattaacgctgccagcaacttcgccacggtggtcgttttaccggtgcctgggccgccggaaatcaccgagatccgccgcgtcagcgccactgccgctgcaactttttgccagttaatttcatcgcttactggaaaaagtttgtccagggtttgcgccagtagagcttcatcaacctcaatggcatgattcacctcattgaagaagcgcgctaccgtccgctcgttacaccacatgcgattcaaataaagacgatcgccacagaggatcatcggcgtgggttcatctcccctgctgaccgcttgagaagccagcaagcattcttcccaattttgtagctcaccgatttcactgacacaggtcgccaacagcggatgcgacgcctcgttattttccagtcgtgaaagcggcaaacagacgtgtccctctccggcatcatgacttaacagtgccgccgcgagggtgacggcaggatgttcatctcccgccacggtcagggcaaattgcacatccagcgggcgtagctgtttgtgctccacagcttccagtaattgcttttgcaatttcattacgcctcctccagggtcataccggcaaacatctcatccatcagggcaatcaacccggcgttgggtcgggttgtgtaaatcccttgttgcggatgttctttatcaacgccacgcaggaacagatagataacgccgccaaagtgacgatcatagtcgtaatcagcaatgcgatggcgcagataacgatgcagcgccagggtataaagctgatattgcagatcatagcggtgtgcctgcatcgctgctgccatagcctgttgggtgtaagccgaactgtcttcacccagccagttggatttatagtcgagcaggtaataacgcccttcgtggcggaataccaggtcgataaagccttttaacatgccgcgtacctgcatgaactccagcggcgggcagccagcggatagcgggtcaaactggcgaattagtgcatcaagctggctggcgatgagcggttcgctaatcggcaggtaaaactccatctccacctgtttatcgcggtcggaaagctgactcaggctaacacccgtttcattgagaggtgcctggaggacagccgtgatccactcggtcaacaccggttcccactgcgattcaaagccgccgagttccagtttttcctgtacccagttcgggtcaaccggctgggtaaaatcgaggtcttcaaacaaactgtgcaagaatgtccccggtgacgcaccgcgcgggaactgatgcggtgttaacgtcggttcttcaacgacgctgaccacgcctgcggcatcaacatccagccgtggcatcagatcctgagcgataccgtgaccacgctgctgcaagccggagtagctggtgacacgccagttatcgccgggcaatcgttgtagtgtcctcgcattcagttctgcagttaaagcatcattaacctgccagggctggttatcaccagtttgtgccgtttgccaggcaatatcatcatcgcataacgcttcaatacaggtgcgaagccctgccgcatcttgcggttcccctttttgcagcaaacgcccgagcgcactttggtggacgtcggtgtcaccttttttatcgccacgacggcgcaccagcggtgcaacgccgagactgcaatgccaaaccgaacgcgtcagcgccacgtaaagcaaacgcagatcttccgccagacgttcgacctccgcgaggtcgacgctttctggcgcagcattaagatccaaaactgcctcaaacgagtggcgatcgtgataaaacgcctgatcctggacgcggaaattggtaataaatggcaaccagaccagcggatattccagccctttcgatttatggatcgtgacaatctgcaccagatgtttatcactttcgaggcgcatttgttggctggaggcattactgtctggctcgaggatatgttgcgataaccagcgtaccagcgcatgttcactttccagctgcgttccggcttcttgaagcagttcgctgatatgcaagatatcggtaagacgccgctcaccggctgccgttgccagcaagttttctgcaatgttacgcgccgacatcagcgcccgcagcatcggcataacgccacgtttgcgccagatttgccgataaccatcgaactcttcgactaccgcatcccacgcatgttcgtcattattcagcgtttcaatatccagcgcgttcagccccatcattgacgttgccagcgcactacgcagggtgttctcacgttcgggcgtcatcaccgcctgcaacaaccaaagcatttcctgcgcttccagagtttcaaaaacactgtcgcggttcgaaaggtaaacggaagggatttccagcaacgttaaggcatcgcgcacctgggcggcctcctggcggctgcgcaccagcacgctgatgtccgaagcacgcaccggacgcgcgtcgtcgccgttcatcagcaacgcttcgccccgctgtccggcttgtagccagtcgcggatttgcgcagcacatacctgcgccatggtactttgataatcgccaactccgcagctttcgccttccatcagccacattttcatcgcaggctgcatttcacctttaaagacaaaacgtaacgcctgatttttcccggctgatttcactggaataaacggtatttcgcgaaacatgaacgcgtcatcagtctggctgaaaagcttattcacgctgttcaccattcctggtgcggaacgccagttggtgtctaaagtgtagtgggcgtgaacttcgctacgcgccttcatataagtgaagatatccgcaccccggaatgcatatatggcctgtttcgggtcgccaattagcaacaatgcggtttccggctgatggtgccagatacggcgaaaaattcggtactgctgggggtcggtatcctgaaattcatcgatcattgccaccgggaatcgcgtacggatcgccgctgccaacacctcaccgctttcgctacgcagcgcggaatcgagccgacttaacatgtcatcaaaacccacttcgccacggcggcgtttttcacgcgctactgtttcgcggatctcagccaatgcgcgggtgatcaccagatcgcggatcgacaatggttctgcaagcagttgatcgatcgcctcaaacagtggatgtcgcggggtttcccccccggctttcgtgcgatcttctaagaaacgctgggagaatttttccagcgactctggcaactgataactgttggtctcttcttctgcccaggcgctgatcttttcgatccatttagcctgattactacggttaaacttgcgtcgatcaataccagaagattcgatcagcgcatccagttcacccactgcgtcgcgccactgctgttttaccgtatcaatacgcgccacaatttgcgcgtggcgggaagccagcgtttcatcatcgggcggcggtgctttgataaccggcgcttcgccttgcagataacgattaatatcgcgcagcaacgcctgcggccctttccaggtttcaaagacgacctgggctatttcacgcggcagcgggtagcagtggcgacgccagaaatcggcgcaggcctggtagcgtagcagagactcatcttcaatcagctgctgctcaaacagcatgccggattcaaaggcattcaggttgagcatgcgctggcaaaagccgtgaatagtaaagactgccgcttcatccatctgccgttcggctaacaacaaccactgcgcggcttgcgctttatcgtcgatctcttccagcaggcgttcgtacagtggattgtcggtggtttcacgcagacaggcgatgcgcaactcgtggatattgctacggatacgaccgcgcaattctgccgtggcagcctcggtaaaggtgaccaccagcagttcttcaacggtcagcgggcggggaaaggcggcggaaccgcctagtccaagtaacaggcgcaaataaagcgccgcaatcgtaaaggttttgcctgtgccggcagaggcttcaatcaggcgctcgccctgtaagggcaagcgcaaaggatctagtgtctcggcgacatcactcattcttttcactcatcaggggcattgtttgctgcaacgcgctgacgttctcccacactttccagccttcaggatgcacatattcggctttcccgttctggctgccggaaatctgcgacagaatagccatgccttgcggctcgaccaccgcctgatggaagaaatcagcaagtttttgcggcgtcagcagttttatctgggccacgattttatcacgcgaatcgaagcgcatattgccgcgatcgaaatctttacttaacttcgatgcttcttcgccgagcgtttgcggtgcctgcagcatctgggtaattaccgcctgctggatttgcgcaaactcttctggcttcatcgcccgcaattttgcctctgcggttgggaaaaacgccttgtaacgctcccacaagaatgaaggctgtttatcattgctttgcaaaaggaagcccatgccccactgacgccccacgctcattgggaatgcaaacacggcatagcccaactgttcttcggtacgcaactgattgtagaaccacggctgtacgatctgccccaacagagagctataggctgagctggtgtattcatcgtagccagtcggtacaaataccgctgccagtgcggagtcggtgctgttaccggctttttcaaagatgacggattgttttttatcgaccactacatctttgtttcgacaccactctgaaccatcagcgcccaactgtttttgcacatcgcgtgccagcgttgttgcctgggcctcggtcatgttgccgataaccataaactctggtcgagcccctgattttaaggcgtcgcgataggccagcacctctttcaacgtaatggagggcaaaattttacgccgttcatctcgcgagaagtacggcacttgcgagagcatctgcgcgggcataatcgcctgctcaaacgctttacccttttctgcggaatccatcatctggttataccaggacttcgcctgctcaagctgatcttccgtagcggtatagctaaagtacccctcgagcaatgcctggaacagctgcggcagacgctgggtgtaaccattagcattaaccataaggccgttgttagcgttggtggaaaaacttatgccaccaaccgacgcctggttgcttaactgatcaagcgccagccctgcgagataatcattgagcgcaaacatcacctgattgcgggcgctgtccatggctttcggattacgcaaaatcaggctgacatcagctttgggttcgctggaaaaataacggcttggcgcatacaccacgcgcagattcgactcatcaacaatcagctctggatggtcatatttcttctctgacttaatcagcgagaaatcgtcaggaatataggggttaagctccggtaaggagagcgcaatattggcagctttttgctgccagtcagcgaaagtttgttcgctgattttatcgacctgatacggcgcatcgacaaaataagccgttttattgtgcggctctttcgggctgatataccagatacgcgcattctgcggcgtcatcatcgccagacgttcttttactgctttagcatcgtaccgatcggcaatattgactgcatccagcgtatgctcaacaggaacgcgaatcatggtatctgccagccattcgacgtaatccatatcacgggtgattgacggataacggaagtcgatatccagcacattcgccagttcatcgaagtattgtttatcgatccctttttcacgtaacaaattgaggtagctaaaaatagccgccacaacctgatcgcgattcgccagacctttatcggttaaagacgcagagatcgctaatacgccgctgttgccgttgacgataggatcggagttggcgctaatgccctcaactaatccctgcttttgcagccagtcggaaagtgtacctgggctgcgattaccaatcagataggtaatcaattcatcggttttgctacggaatttcgccgagttgttatcaatacgaaactctacgcgcaacactttacgcggcagcgccgggacgtaatgaatgataatgcccttttgcgcgtcggtgactaccggcacggtgatttccggttttttgctctctttgttcggcacgcgaccaaaggtgtccgccgccatttttgccaattccggcaacggtttattactgtaaataaccgccttcatcaaattggcggaatagtacttctcgtggaaatctttcagcgcctgctgcaccggattaccaggtttgtcgcttaaagtttcgaggttaccgcctgaaaactttgaaccagggtgcgccgggttaatggtttctgcgctgacctgtgccatgcgcatcccgtcacgcgtacgcgccatggttaattcagcgttcactgcattacgctcacgttcggcgtatttcttgtcgagcaagggttctgcaatagcatcggccaggcggtctaccgcaccgggcaaggcgtcgttctcaacttccagatagaaagccgtgcgatacggcgcagtgctggcattgtgactaccgccgtgcattttgagatattcggccagactgtcagcctgcgggtactttttcgaccccatcagactcatatgttcaaggtaatgtgccagcccctggtacgcctcgggatcttccagcgacccaacgggcaccaccagcgccgagagcgatttaactgcctgcggatcagaaaccagcaagaccaccataccgttatccagacgtatagcctgatactggcggttatctttatcacttttacggatggtttcctgaatcggctgccatcccgtttctgcctgacttaagggtgcccaaagggcaactaacaacaataatgctttgaaccaggtgctgcggggcattcacggacctcataatcaactttattttctggccagattcaacaggttaacgcaaatcatctgccagaatttaatcttgtgctgcacgagtcagcctatgtttatataaccatcagtccgtgactggtgcgcatcataaagtaagcggatagattgcgcaatttttatacagcactcatgactgattaaagcgaaacagcggtaacaggaaacgttgcgactgttcaacgatggcctccattgtctctggtgttaattgccgccagagcctttgataccagatatcatcaccttcgccacgcaccatcatgttgccttcgtaagcctgaaggaatttcgtacgggctttttgcaacgtggaatcgtcatccagcatggcatcgttttgcgcgtcataacaggtttttagccacgcgccgccactttcaggtaacaccagcaatggcgcggacatcccttcacgatacccctcaatcagttgtgagaggtaatgcaaagcctgttcggctgcaagcggcggaaaacgccactcgccgtctttgcgtagaaaaaggcgactttcaccattaccaccgctggcacagtagacaaggtgttccagccaaagttgcattccctgcgccacacttaataaagagggacgccagcgcaacaagccatccggctgcacctgcggcaaccagccagttatctgcacaccgttgcaggcgagatcaatttccatactctgccccggctggcgacaggcaatgactctgtcggcaagctgctgcatctcctggcactgtgtttcccagaaaatttcaccaaaagcgccatacggtaaatcccctgccgcccggaagcggcggaacaagcgttcggcatcatcctgctcaaccagtgcattcaataactgctgattgatttgataacgactaagcccttcaagaataaatggctcggtgtcggggatttcgctgtcttcagtacggaagttcacctgcaaacgcatctggaagaacgcccgcaccggatgtgcccagaatcgttgtagcgtttccagcggcacggtttccggtaaggtaaacggcagcggctgaacaaattcagaatgtgctttaccagcctggctggccgcaggtagccattcacgagcatagctttgtcgttcgcctggctggtagttttgtggatcaaacggcatccgggtatggaggcaagtaagatgcgcttttacccttgcctcgctttcatcacagttgagcgcttcatcgtccggtagataatgactttgcccgatgtagtcgatcagttcctgcaccagtaccgacgggaaacgttcactgttatcctgaatggaacgcccgatatagctgatatagagtttttgctgcgcggaaattaacgcttccaggaacaggtagcggtcgtcatcgcgacggctacggtcgccacgcttcggtttctggctcatcaggtcaaagcccaatggcgcaagctgacgtggataaacgccgtcgttcattcccagcaggcaaaccactttgaacggaattgaacgcattggcatcagagtacaaatgttaaccggtccggcgagaaaacgctggctgatacgttcttgatccagacgctgcgccagttcatcacgcaatagtgacagcggcaccgcgtcgccatactgcgcacctaaaccttcggcgataatcgcctgccattgttgttcgatcagcgtcatcgccgcttcggtttccgcatccggcaggaagaaggcgttgagcatatcgcgacaaaccggcaaccactcttctagcggacgctcctgtgccagcccgcgacgccagatgtttagctgcattagcagtgaagccagatgccccaccagttctgcaattaagccgctcgattcatcataaggtagaaccgattgccactcgccctgcgcgctctccatcgcgtagcccagcaacatacgcgtcaggccaaatcgccaggtgtgttgtccggtggcggggagttccagctcgcgaacgttgtcgtcatctatcccccaacgaatgccggattcgttgacccactggcgtaaataacgcagcccttcttcggtgatgtcaaaccgcgccgccagcaccggcacatccagtaatgccagcacgtcttccgacacaaagcggctgtctggcaacgataacaggctgataaacgcttccagtaccggatgcgactgccgcgcccgacggtcggaaatggcgtaaggcaggtaacgatccgcaggtgcgctaccaaacacagcctgaataaacggactgtagctgtcgatatcagccaccatcacgatgatgtcgcgcggagtaagtgtcgggtcttcttccagcatcgccagcaggcgatcgtgcaaaacttcaacttcacgctgcgggctatggcaaacgtggaaggtgatactgctatccagtggatcaagcgggcgtttgttatcgctacgggaaaactcttcgatgttcacaccagcaacggcacggttttccagttccagaatgtcagactgaatgttatgcagcaggttatctggcgtgacatcgacaaaggcgtccagctcctggctgctctccaggtcagaaaggagataaatgtagtcgcgcccaagcttaccccatgaagccagcagcgggttgccgacatcctgttcaccatcgctgttaaagagctgcccggcattttcgctatcacgaaatagcggcaattcgcgatcttcaaaactgtgtcgacgctgacgggtcagcagtttcgccagataagcaggatctttaatatcgccccagtaataacggcaggggttggtaaacaggagatggatttcaatatgtttacccagcgcctgtagcgcctggagataaacaggcggtaacgcggaaataccgcatataaagacgcgcgaaggtagccccggcgggcaggtcgtcgcggactccagcgtttcgataaagcgctgatagagattggcgcggtgccagcgcggttgcccgagttgatgggtatattccaccaacgccttccacaacggcgcttgccaggcctgtgcttctcccagcccttcaaccaaatgtcctgtttcccactgtgccagccagtccggacgatagaccagatactggtcaaacaggtccgccgcttttgaagaaagctggaacagttttcgcttgtcgctatcgtcagtcagataatgccgcaacagggtaaagtcttcgcgctccaacaattgcggcagcagagtcatcagtttccagctcatgctctgtttgttaaaggcgctctctttggggatttccggtaacacccggacgaacatatcccagataaagctcgctggcagcggaaaatcaatgtttgccgcaataccaaacttttgcgacagggtcatttgcagccactgcgccataccggtactttgcaccagaatcatctctggttcgaaaggatcgtccagccgttcgcgttcgacaataaactccatcaacgcttccagcacgtccagacgattggaatggtagacccttaacatagcggctcctgactactgacgattcgggcaatgcaggcgggtcatctcgccttctctgcccccgggtgaaactagcgtaacgctgatgctgacacatcccgcctgcgatgtctgcattcggttgacctgccagttggcaggtggcgaaatcgcgcgcagttgcgtttgctgccaaccatgccgccagagctgttggtactggtttctgctggcgagactgttcattaatgtttgctggatacccgataacgcagtgacaatcatcaccatcagcaccatcgcaaccattacctccggcaggctaaagccttgttgattcttcagggaagctgacataacgccctctctttcagcggacaaaaatcgctccagccgcgtggcgaaaaaacaatgtttccatcaatgacttcgcctgttcgccacaacgaaacgccttcataaccggcaaccaataaggcttcattatctgccagtaaacgcaaacaaacccgggcatcggttccagcgtactgcgagcactgaactgcgggctgcgtctgccaggagtgcattttcccccacgccagcgccgactgaacgatggcctggcggcgcaatgactgactttccatgctcacgcgagaggcaaaactgcgatcctgctgactcattccttgcaatagcaagctacccaaaaccagcagcatcagaaccagagccagtgacgaaacacctttttcgcggttcacaggttgaatcctgtcacgctatagctggcatccaccacggtttgcggttcagacttactggcagcacgcatattaaccgtcaacaccggcgagaagccgctgacatcctgacgtacgacctgaaaagtgtcgataatgatggcatccggattagtgactttatcccagcccttaccttcacaggatgtcgcaccgcgtagcgtttccagcacatgctccttcagacgaaatccaatctggtcagactcttttaccggttcgcgatcccagataccgttactgttcgcatcccactgcacaatgatacagtcatcctgtccgacaatttccagcccttcgccggtacagctgccatgacaataacccgccctctggagatgcttcgcgacggtaaatacccgcagccagatttcatcttccagcgccagcttacgggtgctcgttaaactttcacgctgtaacgcaggcagaaagcgtgcagcccccagcaacaatacgctactgatcgccatagcaatcaacacttccagcagagaaaaaccttgctcttttacaggcatccttctgtttctccttgctgacaaagccggagtcttccccacggcgaaaccaccagccaccactcgcccgttgagtttttgaagcgaatatgcccggcccatgcggtattgcgcaggccaaagaaagcaagcgaaggtgtcaggtcgctcatttcgacttcgggccagcgtggcacaaagaccaatggtgaactgccatgacaggtattggccccagcagcggaactcacaaggcaccataacgtcccctccctgataacgctgatactgtggtcgcggttatgccagttggcatcttcacgtaaatagagcaaatagtcccgcgcctggctggcggtttgccatagccgttgcgactgctgccagtattgccagccatagagtccacttgcgcttagcatgaccaaaatcagcatcgcgaccagcgtttcaatcagcgtataaccacgttgtgttttcatgccggcagtatggagcgaggagaaaaaaagacgagggccagtttctatttcttcggcgcatcttccggactatttacgccgttgcaggacgttgtaaaatttcgggaaggcgtctcgaagaatttaacggagggtaaaaaaaaccgacgcacactggcgtcggctctggcaggatgtttcgtaattagatagccaccggcgctttaatgcccggatgtggatcgtagccttcaatctcaaagtcttcgaaacggtagtcgaagatggattcgggtttacgtttgataatcaacttcggcagcggacgcggttcgcggcttaattgcagatgagtttgatccatatgattgctgtacaggtgcgtgtcgccccccgtccagacaaaatcgcccacttccagatcacactgctgcgccatcatatgcaccagtaacgcgtagctggcaatgttaaacggcaggccgaggaaaacgtcacaggagcgctgataaagctggcaagagagtttgccgtctgccacatagaactggaagaacgcatggcacggtgccagcgccattttatccagttcgcctacgttccacgctgaaacaataatgcggcgcgaatccgggtcgtttttcagctggttcagtaccgtagtgatctggtcaatatgacgaccatctggcgttggccaggcgcgccactgtttaccatacactggtccgaggtcgccgttttcatcggcccattcgtcccagatggtgacattgttttcgtgtagataagcaatgttagtgtcgccctgcagaaaccacagcagttcgtggatgatggaacgcaggtggcaacgtttagttgtcaccagcgggaatccatcctgcaggttaaaacgcatctgatgaccaaaaatggaaagcgttccggttccggtacggtcgtttttctgtgtgccttcgtcgagcactttttgcatcagttctaaatactgtttcatggttcctcaggaaacgtgttgctgtgggctgcgacgatatgcccagaccatcatgatcacacccgcgacaatcatcgggatggaaagaatttgccccatgctgatgtactgcacccaggcaccggtaaactgcgcgtcgggctggcggaaaaactcaacaatgatgcgaaacgcgccgtagccaatcaggaacaagccagagacagctcccattgggcgcggtttacgaatatacaggttgaggataataaacagcaccacaccttccagcagcagctcgtaaagctgtgatgggtggcgcggcagcacaccgtaagtgtcgaaaatggattgccactgcgggttggtttgcagcagcaaaatatcttctgtacgggagcctgggaacagcatggcaaacgggaagttcgggtcaacgcggccccacaattcaccgttaataaagttgcccagacgcccggcaccaagaccaaacggaatgagtggtgcgataaaatcagaaacctggaagaaggaacgtttagtacggcgggcaaagataatcatcaccacgataacgccaatcaggccgccgtggaaagacatgccgccgtcccagacacggaacagatacagcggatcggccataaactgcgggaaattgtagaacagaacataaccaatacgtcccccgaggaagacgccgaggaagcccgcatagagtaagttttcaacttcatttttggtccagccgctgcccggacgattcgcccgtcgtgttgccagccacattgcaaaaatgaaacccaccagatacatcaggccgtaccagtgaagcgccacgggtcctattgagaaaatgaccggatcaaactccggaaaatgcagatagctactggtcatctgtcaccacaagttcttgttatttcgctgaaagagaacagcgattgaaatgcgcgccgcaggtttcaggcgctccaaaggtgcgaataatagcacaaggggacctggctggttgccggataccgttaaaagatatgtatatgatccgcgctataaccctccgcgaatcagcccgcccatgccgcgacgctccataaaggctgcaacctgatggcgaacttcggtcgccagttgcgcttccagactacgctgcgcaagattttctgcttcggcataatcaatgcgccgcagcaggtattttacccgcgctacagaacgtccgttcatagacagatggcgatacccaagcccaatgaggattgccacgcacatgggatcgcccgccatttcaccgcacaaacggagatcgattccatgtatttccgcttcccgggcgatcatcgccagagctcgtaacattgcaggatgaagactgtcataaatgttcgccacccgggtattgttgcgatcaacggccagaatgtattgagtcagatcgttggtgccaacagagatgaaatcgacccgctttgccagatgcggcagcataaataccattgacggcacttccagcatgatgccgatacgtggtttgggaatttcgtaaccgatcatctcctcgacttcacgtccggcacgttcaatcaggcggcgtgcttcatcaacttcatcgaggcttgtgaccatcggcaacagaatattcaggttgcccgtagcggcattagcacgcagcatcgcccgcacctggatcaagaagatctccggctgatcgagcgtaatgcgaatcccacgccaacccaggcatggattctcttcgctgatcggcatgtaaggcagctgcttatctgctccgacatccagcgtacgcaaggtgacgggtttatcattgaacatttgcagcatcccctgatactgcgccacctgttcttcttccgacgggaaaccactttgcagcatgaatgggatttcagtgcgataaagaccgatgccatcaatacggctgcccagtttttcttcatgttccgggcttaaaccagcattgagcatgacttttatacgctcaccgctttttaactgcgcgggtaaattgacgtcatcttccgccagacggctaagctcaatctcttcactaattagccgctgatattcttgcagcagtaccggctccggatcgaccagcaattcaccgcgatagccatcaacgatcagcgtcctacgatgcagcaccgaaggctgaatatccgcgcccatcacggtagggatccccagcgcacgtaccatgatcgcagcatgggagttggctgcgccatctcgcacgacaacaccgactaagcgatcctggggcagctcagcaagagttgtcgctgacagttcatctgccaccagaatgaaacgttccggccaggcgttcggcccttgattagcgtcatcaagatgaaacagcaatcgctgacccagcgcacgtaaatcgccagcccgctctttgagatagttatcgcttagcgcggcaaactgttcggcaaatttttcaatgaccgtttttaccgcccactctgccaccgagcctttatcaacctcggcaaacaattcgcgacgcagccgggtgtccgaaagcaggtgcgagtaaagatcgaaaatagccgccgtttctttttgtgcaccggcggcaaagcgtttgctgtagcggcgaaactcgtttgccgcttcttccagcgccccggtcagtcgttcgcgttccagagccggatccagcgttgatgcctgatacacctgttccattaaaggtaacgtggcatcctgccagccttcggcaatcgccacaccaggtgctgccggtaatgcgcggattcgcgtctggcgatattgcccaaacagggcagtcaactgcgactgagaaagaatagctgccatctgggtggcaagcgtcaccaggaaggattcttcactttcgtcatactggcgcaactctcgttgctgtaccaccagtacaccaagcaactggcgacgttgaataattggtacgcctaaaaacgcgcggaaacgttcttcttttacggaggggatgtatttgaagctggggtgcttttgcgcatctgcaaggtttatcggttccgccagcctgccaaccaggccgacgatcccttcatcaaacgcgagcgttacagtgcgaccgcgtggttttttcagcccccgggtcgccatcaggtagtaacaacgtcgatcatgatcggccaggtagaccgaacagacctcggtatccatcgcaagacagatgtcggtaaccagaatatttaacgcctcattcaggcgtggtgcgctggctaccttttcgactatttcgcgcaggcgagtgagcataattggcgtgacttaacctcttttacgtcgataagcagatgcgttttgtggttttggcgtattttcctgcagtgacatcaccacactcgcgaactctttcattaccctacggtagacatcacgtttaaatgacaccacctgtctgaccggataccagtaacttacccatcgccagccgtcaaactctggtgtactgctggtttgcatattgatttctgcatcgccgctcaccagctgcaagagaaaccatttttgtttttggccgatacaaaccggcttcgtgtcccaacgcaccaaacgtttcggtaatttgtagcgcaaccagttacgcgttgaagcaaggattcgaacgtctttgcggcttaatcctacttcttcaaacaattcacggtacatcgcctgctctgcggattctccggggttgattccgccttgcggaaattgccaggagtgctgaccaaatcgccgggcccacattacctgcccctggcgattacaaatcacgatacctacgtttgggcggtagccatcgtcatcaatcaccggactacctcaaaataaagctttatatacgaatgattgtttcatactccaggaagacggtaaaccactctctgcagggcattacacactaataacaattgaataactcacagttatgtgcagagttataaacagaggaaggggtggatagccgtttttattcaccttttctgtggatagagttgtgaagaactacggaattactacgggaaaacccggagcattctgaataagcccgatatagacattttaaaatattcattattagtcaatgcattacatgtaatttgagtaatgaaaaagagtaattcgtgacccaggtcacacctctcatttacgggttggcgaaagatcaaccaatgccgtatttatccacagaatgtgccactaagttaagcactgaaccactaaaaactggagtttcgtcgcacgtcaaggctgtaaatggaaacagtagtggaggtttttcacagttatcccagctttctgtggataacatggtgtaagatcctgtttattttcagtgaccagatttggaaaacccgttgcagtgttgcgcaactcgattaccggcagcctaaaaagcaatataaatcagggaattgaacaacacatgtggaaaaagttacactgcgaatattcggcacataattgctgtttgttttttaatcaaggtatcatgacatgtcccaacctcgcccactgctctctcctcccgaaactgaagaacagttgttagcgcaagcacagcaactttctggttatacattgggagaactggcggcacttgccgggcttgttacgccagagaatttaaaacgcgataagggctggattggcgtgttactggagatctggctaggtgccagcgcagggagtaaacctgagcaagattttgccgctctgggcgtggaacttaaaactatccctgtggatagtcttggtcgtccgctggaaacaacattcgtttgtgttgccccgttaacgggtaatagcggggtgacctgggaaaccagccatgtgcgccacaagctcaaacgcgtactgtggataccggttgaaggcgagcgcagcatcccgctggcgcagcgtcgcgtaggatcaccgttgctgtggagcccgaatgaagaggaagaccgacagctacgcgaagactgggaagaattaatggatatgattgttctcggtcaggttgagcggatcaccgctcgtcacggggaatatttacagataagaccgaaagcagcgaatgcgaaagcgcttaccgaagccattggtgcccggggcgaacggattctgacgctgccacgcggcttttatttgaagaagaatttcaccagtgcactactggcccgtcattttctgatccagtagccatcgctttgacctgccgctttccgggcatataattaccgcttcatttttttggcagggctttttagatgttatttgcatggataaccgatcctaacgcctggcttgcgctcggtacgctgacgctgctggagatcgttcttgggatcgacaatattattttcctttctctggtggtggcaaagcttcccacagcacaacgtgctcatgcgcgccgtctggggttggcgggagccatggttatgcgtctggcgctgctggcatcaatcgcctgggttacgcgcctgacaaatccgctttttacaatattcagtcaggaaatttctgcccgtgatttgattctgcttctgggtggcttgttccttatctggaaagccagcaaggaaatccacgaatccattgaaggtgaagaagaagggctgaaaacacgcgtttcatcattcctcggcgctatcgtgcagattatgctgctggatattatctttagcctcgactcggtgattacggctgtgggtctgtcagatcacctgtttattatgatggcagccgtggtgattgccgtaggcgtgatgatgttcgccgcgcgctcgattggtgattttgtcgaacgccatccttcggtaaaaatgctggcgctctctttcctgattctggtgggctttaccctgattctggaaagtttcgacatccacgtaccgaaaggttacatctacttcgcgatgttcttctctattgcggttgaaagcctcaacttgattcgcaacaaaaagaatccgctctgatactccgtacgctctcctgcgggagggcgtactcactccttttaccctcacagtttaagattttcctgctttcaagatatataacgtcggtttataaacagactattatcataggtaggccaaatgaggataaccggatgaaaaaatgggcagtaataatttctgcagtcggactggcgtttgctgtttccgggtgttccagtgattacgtcatggcgaccaaagatggccgtatgattttgaccgatggaaaacctgaaattgatgatgataccgggctggtgagttatcacgatcagcaaggtaacgcgatgcaaattaaccgtgatgatgtttcgcaaattattgaacgttaacaaataaggtcagcatccggctggccttaagatttttctctttcccttttcccttccctctgccatttttatattccttatgtcgtgattataaaaaggaaacggctatgcaatatcaccgtataccccacagttcgctggaagtcagcacgctggggcttggcacgatgacgtttggtgaacagaacagcgaagccgacgcccacgcacaactcgactatgccgtcgctcagggcattaaccttatcgacgttgccgaaatgtacccagtacctccgcgccccgaaacgcaagggttaaccgaaacctacgtcggcaactggctggcgaaacatggcagccgcgaaaagttaattatcgcctccaaagtgagcggaccgtcgcgcaataatgacaagggcatccgcccggatcaggcgctggatcggaagaatatccgcgaagcgctgcatgacagcctcaagcgcctacagactgattacctcgatctttatcaggtgcactggccgcagcgcccgaccaactgcttcggcaaactcggttatagctggacggattctgcgcctgcggtttcgctgctggatacgctggacgcactggcagagtaccaacgcgcgggaaaaattcgttatatcggcgtgtcgaacgaaactgcatttggcgtaatgcgctacctgcatctggcggacaaacacgatctgccgcgtattgtcaccattcagaacccttacagtctgttaaaccgcagttttgaagtaggtctggcagaagtcagccagtatgaaggggtcgaactgctggcctattcgtgcctgggtttcggcacgctgaccgggaaatttctcaatggtgcaaaacccgctggcgcacgtaatacgctctttagtcggttcacccgctatagcggtgagcaaacgcaaaaagccgtcgcggcgtatgttgatatcgccagacgtcatggcctggaccctgctcagatggcgctcgcgtttgtacgccgtcaaccgtttgttgccagcactctgctgggcgcaaccacgatggatcagctgaaaactaacatcgaaagtttgcatctggagttaagcgaagacgtattagctgaaattgaagcggtgcatcaggtttatacttatccggcaccataagattaacgccggttaaaaccggcgttaaatattaatgacggcgctgccagatccacagcgccgttattgccagcgcaaacagcgcaccgaagccaatgccaatgggcacgaccgggatgcctatcattaccgccagcgagtaaatgcccagcatcaacaacatggcgctgttttcgccaaggttttgtactgcaatcgcattccccgccccgacgctttttttaccccgctcctgtagcaacgcattgagcggaacgacaaaaaagccccccatcacgccaatcagcatcaacaaggcataggctggcagcagctcgtgttgcagggaaaaaatcagtaccaccacgccaatcaaaatcccggctggcatacagcgtgacacggtttccagcgtaactaacttcgctgccgcacctgcgccaaccacgataccaatcgctaccatcgcgttgagataggtgggcgtagcgttatcggtaatgcccagcgccaccggtacccacagcaccaacaggaaacgcagcgtgacacccgctccccagaataaactggtgcccaccagcgaaaaacgcgtttcaccattgcgccatagcgaggtgcaggcattcaggaaactgcgggtcatgttgatgagattccaggactgccccggacgcgccgccgccagtttgggaatgtagatattggcaacgaccgcaccaccgtaggccagtgcgcatgcggccagggcgacgaggacatgccagtcagccagcacaccaccggctacggaaccgagcaaaatcgccgctatggtagaagcttccattaaaccgttagctttcactaacttactacccgtggttaattcgccgagaataccgtatttcgccggtgaataggctgcagcaccaacacccaccagcgtatagccgagaaacggattgataccaaagcagatactggctgcgcccagcagcttcaggccgttggcaaacatcatcacccggcctttggcgaagctatccgccacctgcccgacaaacggcgcaaaaagaatgtaagcacctacaaacaccatttgcaggatgggctggctccactccggatagaactgcgctttcagtaacgccagagtggcaaacagtagggcattatcgccaaacgcagagagaaactgcgccacgataaccgctttcatccccttcgaccacaacgaagtgttagtgtgcactgactcactcatcgtgttgttccgcttcgtctacccagcttttcaacgtgacaaagtcaggtttgccgctgccaagtaatggcatctgtttcagatagcgaatatcgcgcggtacagcaagctccggcacgccgtgctcgcgggcatactgttgcaacttatcgcgcgtcagttcgttatctgtggtgaaaagcaccagtgcctcgcctttgctggcatcgctcttaatcgcagtggcatggactttatctggcgaaacaccaagtgccagttgttccaccatttccagcgacaccatttcgcctgcaattttggcaaagcgttttgcgcggccctgaatctgcacaaagccctgctcgtcaaaacgcacaatatcgccagtgtcataccagccgcgctccatttcgccgcgaacattctcggcggtgggcacttccagtacacctggcttctccacccgcagatagccgttcattatgttcggccctttcagttgcaggcgtccgccctcttcgataccagggaccgacaacaggcgcgcatccattcctggtagaatacgccctaccgtaccgggtttcgccgccatcggtacgttgatagaaacgacaggcgcgcattcggtcacgccgtagccttcaaggatgcgcaggccaaatttatcctgccaaagctgtttggtactttcttgtaatttttctgcgcctgccaccacatagcgtagacgatagaagtcatacgggttggcgaaacgcgcgtagtgaccgaggaaagtcgaggtgccgaacaacacggtgcaactgcggtcatacaccaactccggcacaatgcggtaatgcagcgggcttggataaaggaacacttctgcacctgtaagcagtggcgtaaacaggcctaccgtcagcccaaaggagtgaaacagcggtaacgccgacataaagcgatcgttggtggtgaagtcggcaatcgttttaatctgctcgacattcgccagaatgcttttatggctatggacgacgccttttggatggccttcagaaccggaggtaaagaggatcagcgcctcttcttccggctgctgttttacctgcgccaggcgcggcatcagcaaatgagcgaagatccatactttgtcggcagtggtgacatctgcttttaaatcttccagatagacccagcgcacctgagtaagttgctccggcagatgccagagtttgcctttatcgagaaactggcgggaagtgaagatggttttgatttcagccgccgtaatagcactggtcagcccctttaccccagcagtgtagttcatcattgcgggaatgcggcgacgggcgatggccccaaaaatcactgccgcactgatgcctgcattgggcagcattaagccgatgcgttcgccttcaacactgtatttttcaaggatgcgtccaacaaacagcgttttcgtaagcaatttgcgataggagtctggggtaaaattgacgtcttcgacacatttcttcccggctccgaagcggtacattgcactcagtaaagattcgtacagcgtttcacgcgggcgcaccgccattcgcgcttccatcattatttgatgcagcatttcgccagcgattttgcgacggtcacgggcacgcggcgcatccggcatctccacctgcgttggtggcaaaatatgcagagtaatttgcgggaacaagcgacgtttaaccagacctttcaggcggctgaagtgcgtaagttccgccccttcaatacgcacaggaataaccgttgcaccagacttcgccgcgacaaaacccgcgccatcgtagattttcatcagcgagcctgtagtggtgatgcgtccttcagggaaaatcaccactggtcggccctgttccaccagacgtaccagatgtttaatagccataggttgcgtcgggtcgagaggaacaaagtcgataaatgatttcagccaacgcatataccactgttggcttattgaggtgtaaacggcaaacactggacgcacaggtaaaaacagtccaagcaaaatgccatcaataaaagagacgtgattaggcgtaattagaacgcgctcgcccttcagtgcctgggtgtcacccgtaacgcgaacgcgatacaaaacacggcacaaatttcgaaaaaagctaaaaagcattccaactccctttgctctgattcagtaaaagcgaatggagggagattacacgagataaagaacgcgagcgacagtaaattaggtgcgaaaaaaaacctgcgcatccgcgcaggttggtgcaagagacagggtacgaagagcgtaccgaataatctcaccaatcaatacctctgggatcttgattgtggtctgcacgacgactcttcgccagcgagaaaacgcaaaggaatgaagggaaatgcaacgaggtgtgtaaattgtcggttactgttacagattgatgaccggccaaaaaaaacctgcgcatctgcgcaggctggtgtaattcatgtgctcaacccgaagttgacttcacctatcaatacctctgggatcaccactttagcaacctgaagccaaacgccaccagcggtcaatcgcaacagcgtttcgcaaagtgtaaccaaaggtttgcaatctctttttttgtcttacttatttgcgtttggctcacattcccacgatgaaaacacgccaccccttgaaccaacgggcgttttccgtaacactgaaagaatgtaagcgtttacccactaaggtattttcatggcgaccataaaggatgtagcccgactggcaggcgtttcagtcgccaccgtttcccgcgtcattaataattcacctaaagccagcgaagcttcccggctggctgtgcatagtgcaatggagtctcttagctatcacccgaacgccaacgcccgtgcgctggcgcagcagaccactgaaacggtcggtctgatcgttggtgatgtttccgatccgtttttcggtgcaatggtgaaagcggtcgaacaggtggcttatcacaccggtaatttcttattgattggcaacggttaccacaacgaacaaaaagagcgtcaggctattgagcaactgatccgccatcgctgtgctgcgttggtcgtccatgccaaaatgatcccggatgccgatttagcctcattaatgaaacaaatgcccggtatggtgctgatcaaccgtatcctgcctggctttgaaaaccgttgtattgctcttgacgatcgttacggtgcctggctggcaacgcgtcatttaattcagcaaggtcatacccgcattggttatctgtgctctaaccactctatttctgacgccgaagatcgtctgcaagggtattacgatgcccttgctgaaagtggtattgcggccaatgaccggctggtgacatttggcgaaccagacgaaagcggcggcgaacaggcaatgaccgagcttttgggacgaggaagaaatttcactgcggtagcctgttataacgattcaatggcggcgggtgcgatgggcgttctcaatgataatggtattgatgtaccgggtgagatttcgttaattggctttgatgatgtgctggtgtcacgctatgtgcgtccgcgcctgaccaccgtgcgttacccaatcgtgacgatggcgacccaggctgccgaactggctttggcgctggcggataatcgccctctcccggaaatcactaatgtctttagtccgacgctggtacgtcgtcattcagtgtcaactccgtcgctggaggcaagtcatcatgcaaccagcgactaaccgcagttaaagcaattccagcgccagtaattcttcgatggtctggcgacggcgaatcaaccgcgcctgaccattatcaaacagaacctctggtaacagcggacggctattgtagttggatgacattgatgcgccatatgcccctgtatcatgcagtaccagataatcacctgccttcacttccggcaaggcgcgggtttcaacatttcccccttcctgctgggtaaagacatcgcccgattcacataacggtccggcgacgacggtttccaccgttggcgcgtgttccagagaacgaccatcagctgccagggcactgatatggtggtaactaccgtacattgccgggcgcatcagatcgttgaacccagcatcaaccagcacaaagtggcggctacccatttgtttgacgctccgcacctgagtaattaatacgccagactgcgctaccaggaagcgacccggttcaatttccagtttcacagggtggcccaaatggcgggcgatttgctcacgcgcggcattccacagaccataataatgttcggtatcaaccgcctcttcaccctgttgataaggaacagaaagcccaccgcccgcagaaatagcctgtaaatcctgaccgaattcgatgacctgacgcaccatagcaccacacacctgttccagatgggcataatcaacgccagaaccaatgtgcatgtgaatgccgaccagctgcagatgatgacgttgtatcacgtccagtgcggcgggcagatcggtgtaccagataccgtgcttgctgttttcgccaccggtattggttttttggctatgtccgtgaccaaaccccgggttaacgcgcagccatacccgatgccctggcgaaacctggcccagttggtcgagcatatcaacagaacccgcattcaccggaatttgcaattcactgacgcgttcaagcgtcgcctgatcgataacatctgccgtaaaaacaatatcatcggggtgcgtttgcggattgtaacccgccgccaacgcacgctctatttcgcctaacgagacggaatccactttcacgccctgctcacgcattaatcgcaaaatatgaatattggaacaggctttctgtgcaaagcgcaccacatcaaactgtttcagcgctgcaatctgccgacgaataatttgcgcatcgtagacccacaccgggcagccaaattcagcgggcaaacgcagcagattttcggcggtgagatcggtatcggtgctgaacagtgaatgtggcataacaaactccagatgagtgcttttttatgattacgccacatcataaaaagaataaaaaatatcgatttatgtcgagtctatgcaaaaatgatatggattaccggattgcgagagagcgctaatggccgccgttaacttacgtcatattgaaatttttcatgcggtaatgaccgccggaagcctgactgaggcagcacacctgctacacacctcacagccaaccgtcagccgcgaactggcgcgctttgagaaggtgatcgggctaaaattgtttgagcgcgtacgtggacgattacatcctaccgtgcaaggactgcgtctgtttgaagaagtgcaacgatcctggtacggactggatcgcattgtcagcgccgcagaaagtctgcgcgagtttcgccagggagaactgtctattgcctgcctgccggtcttttcgcaatcttttttaccgcagctcctgcaaccctttctggcacgttatcccgatgtcagcttaaatatcgtgccccaggaatcaccgctacttgaagagtggctctcggcccagcgtcatgatttaggactcactgagacactccatacgcctgcgggaacagaacgtaccgaattactctctttagatgaagtgtgtgtgttacctccgggtcatccgctggcggtaaaaaaggtattaacgccggatgattttcagggtgagaactacatcagcctttcccgtactgacagctatcgccagttgctggatcagctatttactgaacatcaggttaaacgacgcatgatcgtagaaacccacagcgccgcgtcagtctgcgcaatggtacgggcgggggtaggtgtttcggtggttaacccgctcaccgcactggattatgcggcaagcggtttagtggtgcggcggttcagtattgcggttccgttcaccgtcagcctgatccgccccctgcaccgcccgtcatcagcgctggtgcaggcgtttagtgagcatttacaagcggggttaccgaaactggtcacttctcttgacgcgattttgtcgtcagctacgacagcataaaagcgacagcatcctcggcatggatcgccgcggtatcaaacacaggcaaaacactgcgctcttctggcaccagtaaaccaatttctgtgcagccaaaaatgacgccctgtgcgccctgttctgcaaggcgagcaatcacttgcgcataataagcgcgtgacgcttcggtaaattgccccagacacagttcttcaaaaataatctgattaattttcgcccgttcatccgcttcaggaataagacaattgatggaaaattgttccgtcagccgcccgcgataaaaatcctgttccatggtgtaacgcgtacccagcagcgccacacgagtcattccggccccggtaattgcacgtccggtggcatccgcaatgtgtaagaaaggcagagtgcaacgtgactcaatggcatccgccactttatgcatcgtattggtacataacacaataccttctgcgcccgcccgctgtaagccaagcgccgcctcagccagaatgtccccggttttatcccattccccgcgacgctggcactcttctatttcatgaaaatcgacgctatgtagcagcacttgcgcagagtgaagcccaccaagccgctgtttaatgccttcatttatcagacgatagtaaggaatggtggattcccagctcattcctcccagcaaaccaattgttttcattcctctctcctgatgtgtgttaccgcaacaaggctgaataaggaacgagacaaacgcctcaacggccaggtgcccgatctctattaacgaaaaaagggccggatgtacagcacatccggcccgtgaaatcagacgccgatatttctcaacttctcgcctgccatcagtttgcgttcgatatgttccagcgtgacatttttggtttccggaatgagccagaaagtgatgcccacaaacgcaatgttcagcgcagtgtagagccagaacgtaccggcagcgccaatgctatcaagcagtgtcaggaaggtcgcgccgataatcatattcgacacccagtttgtcgtcgtcgaacaggtaataccgaaatcgcggcatttcagcggctgaatttcagagcacaggatccacaccactggcgcggcgctcatcgcataaccggcaatacacatcatcgtcatgccaacagagagccaggacaagccactggaagccgtaccgttatcaaactgcatcaggcaatagcccagcaccagagtgcctaacgccatcacgctgaaaccaattttcagagccggtttacgacctgctttatctaccgtaaagaccgcaatgaaggtcgcgaacataaaggtcagtcccacgaccagagtcgcaatcatctgttgttctgtggtcgtaaagcccgccattttgaagatacgcggcgcatagtacatgatgatgttcataccggtaaactgctgcatcgcctgcaacaacataccgagaaacacagcacgacggacgttacggttgatcttaaacagtgcccaaccgccttgttttaacttcaggctttcacgaatttcgttgagttcttctcgcgctttttccgacgtatcgcgcagcatacgcaacacttcttccgcctcaatatgacgccccttttccgccagccagcgcgggctatttggcaggaagaccaccagaataatcagcaggactgctggtaaagcaagaacccccaacattgcgcgccagttaccgctataactgaacgctgtatcggataaaaacgccagcacgatgccgagtgtgaccatcaactggtacatactgatcatcttaccgcgaacgttttcacttgccatttcagaaagatacagaggagcggtgtaagacgcgatcccgacagcaatgcccagcaccacacgagcggcgattaacatctctacgctggtcgcaaaagcggaccctatagaaccgagtacaaacaggatggcccccgccatcaggctgtatttacgacccaggcggaacgacagccaaccattaaacagcgcaccaattgctgcgccgagcatcatgctactaaccacccattcctgcaaacgactggtcagcacaaagtgatcggtaatgaacggcaacgctccggcgattacgccgatatcaagaccaaataacaatcctgcgaccgcagcagctaccgaaacaaacatattcatacgccgcgtatcccgcaaagaacgtggcgttaaagcagattccgtattgatagtaaccattttttcctgccagcagagagtaagacatagtgaaaaaatacgtgaacaactcacgcaggtgtcaggtcggaaacagcataaatatggattaaattgctgcgacatgtcgttatgtgatggatattccaattttcaaattaagttgaattattgagattattattaaccacctaattttacagcagataaaattcataaagttcattaattgataattaatatggattatttcataaccatgatatggattatgatgatctacaggtataaaaaaccctgccatgcggcagggtcataaaagtaagaagaatgaattaacgcgccagccaaccgccatccacggcaatggtataaccattcacataatctgaagcgctggaggcaaggaacactatcggccccatcaggtcactcggcagtccccaacgaccagctggaatgcggtcgagaatttccgcgctacgttgttcatctgcccgtagttgttgagtattgttggtcgccatgtaacccggagctatcgcattaacattaatgttgtgtttagcccattcgttcgccatcaatcgcgtcacacccatcacgccgctttttgatgcggtataagaaggcacacggatcccgccctggaaggagagcattgacgcgatattgataatcttgccgccattgccttgcgcgataaagtgtttcgccgctgcctgagacatgaagaatacgctcttgatattcaggttcatgacatcgtcccagtctttttcgctgaactcgagagcgtcttcgcggcgaatcaatccggcgttattcaccaggatatcaatatgaccaaattcagctaccgcgcgatccagcagtccaggaatgccatcaatctttcgcagatcggcggtcaggcttaaaaaacgacgccccagcgccgtgacctgctcgatggtttcagtcggttcaacgatgttaatgccaacaatgtcacagcccgcttgcgccagccccaacgccatcccctggcccagcccagtatcacaaccagtgacgaccgcaactttaccttcgagagaaaatgcacttaaaatcataacaataccttattcgtttatgcccacaactagcgcaaatctttaacggccacatggtccatatcatcaaagacctggttttcaccgaccatgccccagataaaggtataagctttggttccgacgccggaatgaatcgaccagctcggggagatcaccgcctgctcgttatgcatcacaatgtgacgcgtttcttgcggctgcccatcatgtggaaaacgcaggcgtcatcatccatattgaaatagaaataaacttccatccggcgctcgtgagtgtgacacggcatggtgttccacaagttacctggagccagctccgtcagccccatactcaattggcaggtttccagcacatccgggacaaaatatttgttaattgtgcgacggttactggtgaggttatcgcctaacgtgactggagatacttcgtccggtgtgacttttttggtgggatacgtcgtatgcgcgggtgcgcaattgtaataaaactttgccggagtggcggtatcaatactggcaaagacaacttcttttgcacctttacccacatacagggcgtcgcggtgaccgatttcatagcattggccatcgacagtaatcgtaccggcaccgccaatattgataacacctaactcgcgacgttcaaggaaatagcttacgccgagttgtttaccaacttccccgccaacggaaaccgttttagttatcggcataatgccgccaacaataattcggtcaatgtggctgtaaaccatggtgtactcatcggcgacaaatacctcttcaaccaaaaattcattgcgcagcccttgggtatccagcgtttttgcgtgcgcactgtggatgctctgtcttacgtccacatcaacctccgataatcagtgaagcgtgaaaatagaaaacgatagtgaaacactgtttcgttttctctataaagggatgatatgcccatgggctagggttttcaattaaaaataaaacaatgtttcatttttaagttaaggattaaaaaaagtgcagtgtcgatcacgaatatgtcatgagaatggaaaaatgagggagcccagaaaatgtatgtcgacttgccagccatcattattcaacagattaatgacggcagatatttatcggtaaggaggaaatgcagagctattcgtcacgttcaatggtcaatgccacaccctggcccccgccgatacaaagcgttgccagtcctttgcgggcattacgtttcaccatttcatgaaccagagaaaccaggattcggcaaccggaagcgcctatcgggtgaccaagtgcgatcgcaccaccattgacattgacccgacgctcatcccactcaagcatcttgccaaccgaaagcgcctgtgcagcaaacgcttcattagcctcgataagatcgacatcagccaactgccagcctacacgctccaggcaacggcgggtcgcatacaccggcgcaattcccatcaatgccggatctacaccaacgctggcaaatgcgcgaatgcgggccagcacgggtaaattcaacgctcgtgctttggcttcgctcatcatcattaccgcagctgcgccatcgtttatggatgatgcattacccgctgtcacagaaccgagactatcaaatgaaggatttaaacgggctaaaccttctgcactggcgtcagtgcgtggctgttcatcggtatcaacaaccaacgtctgaccgttactttgggtcattaccgggacgatctcatctttaaatcgtccggcgtcaatcgccgctcgcgctttttgttgcgagctaagtgcgtaagcatcctgcaattgacggctgatgccatattcgcgagccagattttcggcggtgacaccaatatgataatcattgaaggcatcccataacccatcatgcacaagactgtcaaccagctggctattgccaagctgtgcaccggtgcggctatcagtcagaacatgtggtgcgcggctcatgttttcctggccaccggcgatgacaatatcagcctcgccacactgtatcgcctgagtagccagatgcagtgctttaagtccggaaccgcagacgtcattaatcgtgattgcagaaacgctattaggcagaccacctttaatagccgattgccttgccggattctgccctgcccctgcagtcaacacctgaccaagaattacttcatccaccgcatatgcaggaacgccggtacgttctattaacgctttcacgaccagactaccaagttccacggcggaacgacccgctaacgcaccgcgaaagcagccgataggtgtccgtaacgccccgacaatcacaacgtctttcatcacaacctcgcaccaattaacagtgcaatagtaaatgattgttaattacagttatcttaattgtttaaaaaaagtgatttttatcacaaaggaaatatgcctgagcagtagtcagagtcataactggcacgtaaggtttgcaaccactaacccaccaatagaggggtagatagggcgttaatctcccatacttaacctggtttatggtaaattgccctccattttgtttaatttgtagatgatacgttcagataatgtctaatatttggtctaaagaagaaactctgtggagtttcgcgctctacggcacagccgttggtgcaggcacgctcttccttcctattcagttaggttcggcaggggctgtggtcctgtttattactgctctggtcgcctggcctttaacatattggccacataaagccttatgccagttcatcctctcatcgaaaacatcagcaggtgaagggataacgggcgcagtaacacactactatggcaagaagattggtaatctgattaccacgctgtacttcatcgccttttttgtcgtcgtgttgatatatgcagtggcaattaccaactcacttacggaacagctggcaaagcatatggttattgatcttcgcatccgtatgttggtgagtctgggtgttgtattaatcctgaatctcatttttctgatgggacgccatgcaaccattcgggtaatgggttttttggtattcccattgattgcctatttcttatttctttccatttaccttgtcggtagttggcaacctgatctattaacgacccaggtagagttcaatcagaatacccttcaccagatatggatatcgattcccgtgatggttttcgcctttagccatacgcccattatttctacgtttgccatagacagacgtgaaaaatatggcgaacacgctatggataaatgcaaaaaaattatgaaagtcgcttatctcatcatctgcataagtgtactgttctttgtctttagctgcctgctttctattccaccttcgtatattgaagcggctaaagaagaaggggtcaccattttatcggcgctttctatgctgccgaacgccccagcatggctgtcaatttccgggattattgtcgcagtagttgcgatgtcgaaatcattcctgggtacgtattttggcgttattgaaggtgccacggaggtcgtcaaaacaacactacagcaggttggtgtaaagaaaagtcgtgcatttaaccgcgcactatcaattatgttggtatcgctgatcaccttcattgtttgttgcattaacccgaacgcgatttcgatgatttacgcgatcagcggcccgctcattgccatgatacttttcatcatgcctacgttgtcaacgtatctgatcccggcgcttaaaccctggcgttccatcggaaatctgattacgctgatcgtgggtatcctgtgcgtatcggtaatgttctttagctgatatccattgtgaatggttcaaaattgctacaattttgaaccattccagttttcataatgttcattcgttattattccgcactatcacttccctcatcatatcctagtattatcagttagttaaacacacaaagagatctgaacatcttaaataagactatttaagatgcataacttagattcgcaagatatcttccggtcattcaaaaacaatttgcgatatagatattctcataccatgagatagttatctgaaccaccctcaaccaggtaagattaaatcagtgaaacataatcatatttaataacgagaaatgcattttaaaatgtcttaatcagaattatagcaaatacagattaatcgcaatttttcccagcaaaattacaaaatcatggtgtattgacatcatcaatcaccaatgaaattatgcaattatatacggatagggaggttcttaacatggggctttgtagtcgttataaaagtcttacatgcaatagttgctcaatgcattgccaaataatgccagaagagtcaccgcgtttgcagtactgcgcaaactcgtgtttttgtatgtggcccgaagaaagttcatattttaatcgtggtgtggtagaaggtatcttaacaaaaaaccacaatgcgagattaagcggatatatttttgtcgatttttcagtaagttttttacgtctattccttgaaaaggactggattgactatcttgcaagtactgacatggggattgttttagtcagcgaccgcaatatgcaatcgctagctaattactggcgaaaacacaactcagcaatatctgctgtcatatataatgatgatggtcttgatgttgccaatgaaaagatcagacaactatttattggtcgttatttatcatttaccagaggtaacacattaactcagatggaattcaccataatggggtatatggtttctggttataatccatatcagattgctgaagttctggatatggatatccgtagcatctacgcgtacaagcaacgaatcgaaaagagaatgggtgataaaataaacgaattatttattcgttcacattcggtccaacattgatactcaacgaccaggcagaatcatactctgtttatacgggcatttattgaaatgtccgtattttataaataggccgtcccctcaagagtaaacaccatagtatttaaaaccatcacacgaaaaattcagaagcattacgaaatatgaatttacaaacaatagtggcataaatgttaaccatgttaatttacgtaaagttttacgttgcaacattaaagcctcatttcaatcatcatgataaatataaaattaatatatatttatgccgtaaataccaatatacttagcaaactatgtgatctccatttcgattgatttagtgtttattgacgtatgtactggattattaacgataatatcgagttctggcctgagcaccgaaaattaatatcggtacataacgccgatcttaacgtcgttctgacaacgccagccagtcgatgtttatcacttctacttgaagcttttcctgatgtggttgcacaacaagattttttcaccagagtctgggaagaagaaggtatgcgtgtgcctactaacacgttatatcagaacatatccattatcagacgcggatttcgcgctgttggtgatactacccactcgctaattgcaaccgtgccgagaagaggattcaagatccataatgacattaacatacaaaatcatgtaataaactcgtcaacagacgcacatacacacaatgccccacctgccataaaagttaatgcgggatacaaagagagcattggtggcgcaaagaatttcaataacaaaatcctcaaacatataaaaagtcatctaattatgttgagcgcatttgtcataggcgcatattctgcatattggctatggaataataatcaaccgaagccatttttcaaggattacaagactgttgcggaaattaatggctgccattttaatgtaacagacgatacaattgatgggttgaaagagttcgataaatataaaacacggatactggattcggggattaactgtaaaaaacatccgtggttatacttccctcttgcaaaatcctcaccggggatgattgttatggcatgcaataaaaactataaccaacatgaagtggcagactgtttaaccctgtcttaccgtgaggttaatcgtgattgattataaaaaaaacttattatttattttagtttttatcagtggatttattctcttcactgtctattcttacactgcagaaaaaatgatatataacgaaacatgcactgcaaattgggtaatttttaatgaccagggacgagcaaatcttaccatcgactttatgtataacaaaaaaaataaaacaggaactgttgcgttgagtggaacctggcaacaaggtaacagagaaagtaaatcaatacggcgaaatattgaatacacatggattgaaaactatgacacagcccatttaacatcaaagaaagttaataagtttgagattatggatcaagttgatgatgatagacttgcacaacttattcctgatttttatgtctttccagaaaaaagtgtaagctataatatactaaagcaaggtaagcatgcttttattttgagcattggtaacagagcaataatgcattgtgcaaggtaaactaaaatagataacaaaaagatggaacctcgttaatcataaaacaataaaattaaatattctcgcagtatatggcagtctaaagcatcaaagttttgatcaacatctttcattttagacatctccttgcaatgtaaaatatcatgtatcaacaacatctggtgcaaatccatgagtcgaactcgacattcatcttagctcgattattattccttcgtacagtcgatgtaaacaatacagaaagaggattattaagaaccagtttactcagtgaatcaatagaggaaaggactaacgtttctttaaaagaattgatttcatcatctgttaaactaaactcatcattgacagatcgtgagatataactgtttttaactttactctttacgttgactttattgacagaattaacattcacatatcttgattttaatgtccatgatgttgtttgcgtgagaacattctcagcattaaggaatttttttaacggaatccttggtttctttttcgagtccgaatttacaatatcatgcatatagaccatttcatgaatctgcgaaaattcaatgtccattgtatacctcacatttttaccgtgactcgatgttactgttcaataatcaccttccatcaatactaaaattaatacccctaatgtgccgataacaaatatagtcattctacgtaacgtctccataaggtgatatttgacattatcagaagttgcgaattcggattttgctctaatcaaatgagagaaatgtaaaatgaagccacgaaatattaataatagcctaccactgcaaccattagttcctgatcaggagaacaaaaataagaaaaatgaagagaaatccgttaatccagttaaaatcacaatggggtctggtttaaattatattgaacaagaatctcttggaggaaaatatctaacacatgatttgtcaataaagatagcggatatttctgaagagataattcagcaagcaatattatctgctatgagcatatataaattttcgataacagatgatttaatgagtatggctgtaaatgaactcataaaactgaccaaaatagagaataatgtagacctgaataaattcactactatatgcacagacgttctatccccccgcgtcaccagacataataaagaaaaaaaacaaacgacattctacccttctcaaaaatcccctttttaattttcattgaaaaaatggcaattgatactatgaatccaggtcatacacattaaggcatttatgtaatgtcgtaattaagataactaataaggtgaatattagtaaaacaactaatgatgttattagtttgtagtgaacagtacttttaccaataatgaaaatataccataagcaatgcaagcttaaaactcataatttaaaaaagataaatgtaaaaatatcaatgagtcaatcaataataatttggcatcacgagacacatcacagaggaatattatgagcacagaaacaattgaaatattcaataatagtgatgaatgggcaaatcaactaaaacacgcattatcgaaaggagaaaatctggcattactacatggtttaactcctgatatccttgatagaatatatgcatatgcattcgactaccatgaaaagggtaatataacggacgcagaaatttattataaatttttgtgcatttatgcgttcgaaaatcatgagtatctaaaagattttgcatcagtatgtcagcccaaaaagaaatatcaacaagcatatgacctttacaaactaagttacaattactccccgtatgatgactattcagttatttatcgtatgggtcaatgtcagattggggctaaaaatatcgataacgcaatgcaatgtttctatcacattattaacaattgtgaggatgatagtgttaagagtaaagcgcaggcatatattgaactcttaaacgataattcagaagataatggctaagcattacaatcatttggttaaatttgctggttatagtgcagttaaccactataaccagcacctcttatgttttcttaaatcagcatcttaaaacagttaagagcatactataaatcattacttttcaatgcgttagagaacaatctactttataaaaattgaataaggctatttcagattacatcactgaattcctaagataaattagtgaacacaaccatagatatgtcgaatgtaatttcctgtagcattaatgacacataaatatgaatagccataatttctattgcttaagcaggatgcaagaaaccaattttttcatagaggttaactaatggacttagaaaataaattctcatatcattttcttgagggattaacgctcacggaagatggaattcttactcaaggaaatgagcaagtttatattccacagaaagagttaggtgtattaatagtattacttgaatccgctggtcatgttgtactgaaagatatgatcatcgaatcagtatggaaaaatattattgttagtgacgagtccctgacaagatgtatctattctttgcgctgcatttttgaaaaaattggctatgatcgttgcatagaaacaatctaccggaaaggttatcgtttcagcgggcaggttttcaaaactaaaattaatgaagataatacttcagactattccatagctatattccctttcactacttcattgaatacactggatccattaatacttaatcaggaattagtgcaaatcatttcaaataaaaaaatcgatggtctctatacctatccgatggctgcgacaaatttttgtaatgatcacatatctcaaaattcattcttgagcagattcaagccagattatttcgttacaggaagaataaaccagaataatgcagtgaacactttatacattgagttgatcgacgctaaaaaccttttcctcatcgccagtaatcatctccctgttgatgaactacataatacatcacaatttattatagataatatccttcaaacggtacataaaccagaacgatctgtaagattagctaagcaggaccaaggatataagaatcattatttatcagatgaaatgttagccggaaagaaagaactttacgacttcacccctgaaagcatttacagggccatgactatatttgatagattacaaaataaaagtgatatacagacgctaaaaacagaatgttattgccttctagcggaatgccatatgtctttggcacttcatggaaaaagtgaacttgaacttgctgctcaaaaagcattagagcttttagattatgtatcagacataaccactgtcgatggaaaaattttagctattatgggactgataactggtctgtctggacaagcaaaagtatctcatatcttatttgaacaggctaagatacactcaactgatatagcctctctctactactatagggcactagtccactttcataatgaaaaaattgaagaggcaaggatttgtatagacaaatcactacaactcgaacccagaagacgaaaagcagttgtgataaaagaatgtgtagatatgtatgtgcctaacccgctcaaaaacaacattaaactctactataaagaaactgagagtgaaagccatcgagttataattgacaacattttgaaattaaagcagctgacgagaatttgtatgcgataaatttttattgacgcaattttattatttagatgtatgcaacttgttatttaaacaacagagatgaaaatatctaagatattcaccttattgcaagatatttaaaatgctctagagttaaaagtatgatgtaaagaccattggcctggacaattaaaaaagggagctttatgactaatccaatcggtatcaataatttatctcaaagttcaaatatagcgaatgcaacgggtgatgaagtcgtatcattagataaacacatcaacaccagtgctactgatacagatcaaatacaagcatttatagtttcaacatggatggcgccttttcaaaatgatatgtattcagaagataatcctatctcaccttactataaaattgaatggtagacgattgaccaaataaatcataacgagatacttttataatagtatctcgttcctttcattcaatcctcacacatgaaaaaatatgcgctcaccaaaagttaaattcttaaccatcttcacgttttgtatatttattacaaaaatgtctttcgccagcaactcttgctctaatgaagcaggaacaatgttcagaatcgaaccaaatttaattaaagctatcgctcttgttgaaagcaatctaaaaaaggatagcataggcaagaacagagataagaataacaacataaagagtttagattattggttaatgcagataaaccagatgcatattcccctgttaaaaaaacgtggaataataaaagatgaacgagatttgttagataacccttgtctgaacattaaaataggaaccgagattttatataaccatttttcacgttgtggagtaacgtggcaatgcctggggacttataatgcgggttttgcaatggataaccaaaaaaagagacagcaatatgccccaaaatatatattgtatataccaggcttaatgaactagacaatcgtaaggcttcagcaaaatgagcctaaagcctcttttttttatatagtgcaaacacccatacgtaaagctgttttgatcaactcgataccactgtgaacatctaatttcttcatgatattgagtctatgagtttcgactgtttttctgcttaactgcaagaaattagcgatttctttgtttgctttaccatcagctatgagttgtaatatttctgactcacgatttgtaagttgattatcagaggaatacctggaagatattttttcacaatccatatgtacactatcaaaataagtgtaaccattactaatcgaatcaatagcacgatttagtttcgccgggtgactggttttccatacgcatcctttcgcacctgcttcaagcaattttattgaatcaatatacggcatctttgctacaaatgtaataatatgagcatctatcttatgcgatttaacccattttacgagttcggaccccatcattccacctgcaaattctcctaaaataaatatttaggctgtagatttgttacactccgctatagatttcttcagatctttatagcccccaacaacctcatataaatcaggataatgtccgagaaatccaattatcccatcaatcataaacggctgctgatctgaaactacaattttaatttttcccatatattcatcctgagtgtaaatgctttaacgcattcatttataatcatcccttccattattattataagcaaaatccaaagaatacattgatgaaataataatgaaatataattaaaaataaaatttttgcgtgaaaaacaccacaggcattaaaaaatcatgagatgattaaaatattacaattagattatattcaaatcattaaacttgagccagggagctataagtcctcagggcttgccaaaacagaattattcatatccaaagaatgtgtttcaaacattttttcaactaaataatgtctggcttgttcgcagatttcgttaaccttgtcaggagagaaacaatgattattaattaaatattgctcacaattatccacaaattcctgcggactaaattcagcaataaattgatcggtaaaaaacacaaaacgcttatcatcatgaaatgtaatatggacattccatattgatttgtcgacaaaatatgactctacttcaagatacttatctttgaatctggtaggtatatagagatttacaggacctgatattgccggtaatttttttctccaactttcaaaaattttgataaaaacatcaacttcctctgaggattttaacaaaatactcttaagatcgtttatcatgtttattcttttttttctagttctgagctcaacaagcttatcaagggtataaaattatccatcacatcaataatgccttttgtatagccatcataataaccttgaataaatttttcttctatctttacctcaatgctctgaattttagcgctggtttcaagaaggatactttctttaagagaaactatttatttcaatccatcagaaatttttcttttaatcacaacaccatttgcaggagattttatcaagctcatctctattttttttcgcataaaatgtaattctctctaaaagagttgatgcaagtggtaacggcaattgtatgtgatcaacaaaatcaggaaataataaattaaatcgttgctgcattgccaatggttgttgccttatatagggtgacaacgttgaaaaaccacatgtgatgatattgtgatagctagcgatgccgggtttgtatcgtgccttttcatttattttcaccggtatagctgataaataatcccttagcacagcaggaaccttataaaaaaatccgcgttctgcaaacctttctcgataaaagtgataaccactgaataaacagaacaatggaaataaattccaattgtttatgtagtaaataagtgaactattcagattaaaatgttcaactgaaagattgtactgcagaacaatcatttcattggtaatagatctaagcaccggattgttaataggtgtattattcaagcttactcgttgaggatgaatataactaattggatcatatataatctttcttagggcaagattcataacgctctcatatgtctacttaattttcaacctgactaaattagttagaatggccctatacttccataacagccagcaagtcgctacggatattaatgcaagtaagatagaaaccggcatagccttatcataagcaaaaacaggttcgctaatttcatatgttggtgcttgctcaataatgtctcttcgttttgacaatacaacagaaatattttcatattgtacgcttgcagagctattaacaataaatctcttgatatcatttatttttatttctgggttgatatctttttcatatactgcaagtacagaaatatgaattggtaaagcagttttaccactatcgccattatcaacatcgtaactaacatgtactctcgaagaaataatgccatccataattttgagagattgctctaaccgctgctcaatagcagaatatagccttgctttttccgctcgtggagatgaaacgagtgcatctgcagggaacatctgcgatatttgaatatcaggcttacccggtagattgtagatttttagccaatccaccgcagaagcaaaatccgttggttcgacaaatattgaaaatcctgttttgccttgatccttcttttcagcattaatattatgtctttgtaaaacagcaaggacatcattagcttgctgttgatcaagatggttcaataattcctgctgcttgcagccgcacaacagcaggataaacaataataatgatatatatttcatgagcgggtcaacgtctcaactgcagcgacaatctttcttgctaatgttccaccaatgaaacctcgacattataattaagcacatgatcctgcaagactaataatttttcaggagttaacccctctttatcagaccttaatgcttgtaacgcattttgctgccaattttcagtttgtacagcatagttggcaaaagcggagatcattttatcatccgggttgtcaagattgagaacccggtcatttaaatcaatcactttcgcttgctgtatttcatgagcagttgattactcagctctatcaataggtggcatattgcttactgacataataaaatccttatccagtttagcggaagttttgtatgattgctgaatcaagatctttatacgcttttacaacgttagattgcgcatttcgatataatgtatactcagctaatgcactttgatattcggcaagaaatttcgtgtcggagggattggttggctaaatcctccaacgctttttcaacttgctggttcagatcatcaacgccctgatcaaattgattgctgatatccataatataaccattccaatctgccataagtcctcctcaattattcctgaaatgtccagttgctaccttgagacttctcgaatcggttatctccgtagctaaatgaactattatttgtgtcctgatttttcaaattcacattaaatcttacatattgtttaccccattgtttataatattcgtcaacatagttattaattttatttaattcactgtcacttaacgtaccaatgatattgaaatacacattgttagctgttttatatttttcataagaaagacctatcgctgacaacgtttcaatagcctgactttccaatacattatcatctaataccgcaatacttatattgctggcatatggcatagtttgcagtaatcctttaataagattatcgattagttgctgtgtgatagcgttccgttgcttactcactgtcaatcttagattactggcatctaatagttgaagtttaaaatattgtaaatcagggaaattatcagcaagccatgaaaaaattcgtatcgattcatcatcaggatttatcacccgtactggctttcctggttgatttttttccagtgcttgtttgacccagactgcttcatccaaaatattggtattaatatagataacatgatctctaccatataaaatttcataattcctgtttttgtttacaagaattttatcgatatgtctcagctgcggatcattactggcattaacaatataaaaagcaatgaaaatgatagcaaaaagaaaaaaaagcattacatacttaaacagcttactgctaaagaaatgttgttttgtagaaataatgttattttcaataatgcctggcaatgaatactgccaaacttcatttttttcttttacagcaaatttgagacctaaaacttctatttgctgattcaatgttaacgttctatcttcaggttcttgtgctgttaattctctgaatgttactaccagatcagggtcggtagtaattattatctcaaaactacctgtaagctcgccataaggaacgactattgtgttttctggtaactcagaaaaagcatcacttcttcctaacgaaacatcattaccaatgataacaagtagacgcccattaagtatttcatactcgcatccattcaatggtccgctcaacaaacgaatggcataagattccaataattcttgtgataagaatttatcattattttccatgaataccacccgctaattccataagctctagtttagagtagtgtaacaagacggaaatatcatgaccaaattatgatgacacagaataaaaaaattataatttcgagaactattttaaatgcctctatgcataactttatttacaatttaaggtataaaccctattccctcaatgttaagcaaatataacaattacttttattttaacttttacacgtaatatttaccctaaatgattttagagtacaggttggcatatgcaagtcttttccagtgatgtctacttcactgtaggcactaatgcattattagcatcccaaaaagaatattacagcgatttagttgcgttggttgatcttgggcattcgttcgttgttattgatgagcatcaacatcgaaatctcaatccaaatacagaacctgtaaacatccttttaagcaacaatttcatcaggatcaataagaatattacattatctgatttaacgcatttcctgatttcgaatcttcatacacaaaatgtgtattccacacaagaaccacttacccatgatgagatagatatcctgcggttatgtgtttcttactcgttaaaacaaatagccattattaaaggaattgattataaaacaatatcatatcacaaaataagagccctaaataaacttaacataaaaggtactgttgagttgtttatagcactctgtgaatgggataaacattattttaaactccaatcttgcgtaagagaaagttgatatgtcattagtaggatataatagtaacatcataataaccatcgcgctgatatcgttgctctctgcatgcaccatagaaaattcattaaaggagaatcaaaataaaagaagtggcgaatcccaagcgatagtagatgcaagacagttctttagcgaacacccggaatatatatcttcagcagaactggagcaaaagctatatcgcgaatttgcacaggttactacagttccagcttataaagagatgagtatgtatcaattgcttgtcatttcacaagatcgtttaactcattaaataatgaatctacacggtttttgcgtgtagattcttataaatttctgactacgacagatgtttaatttttttaaattatcgtctttattctcgatttctttctcttcaccttcaatgaatttatcttctgaagagagctgttcatctggaacaggttgtccagcattctccacatcttcaagccacagcagaagacgtaatatttcatctatattttcgaagctaacataatcgtagcgacgatgggtagcataaatttttcgtgctaattttttatctgtgataattggtattccgatttcctttgcatatttccttacggctaaggctacctcattagtttctcttacagaaatcaatggaataggtgaaagatgtggcttaaagtatattcctattgcaatgtgagtagggttggcaatcatcaaacgactattactgacatcagacttcaattgctcagaaagaatttcctgatgcgctctctgcgtttagacttaatttctggatttccttcttgcttcttgtattctcttttaacttcttgtttatccattttcatatctttcataaataaaaaatattcagcgataaaatcaaaaattaagacaattatcatactgccgagacaatacagtatgagaaggaatagcatctctccccaatctgataataaagatatgatatctccatcaagagttttaaaaagcagtgatttatgattacttcaaaatactttgatcgccaatgcaaaaaaaaaaa

SEQ ID NO: 191 - DNA, 48449 bp, Escherichia coli
  modified_base (48257)..(48257): a, c, t, g, unknown or other
  modified_base (48444)..(48447): a, c, t, g, unknown or other
taaaataaaataatataaagaattgctttaacaaattcttttacggtttttaagccaaatatacgctttaagccatttactggattcaatgaatcaaacttaaatttaacagcttcagttgctaattgcattttactttgaaaccaggagacaagtattgttgtgaacatgcaaaccagcaaaaaaggaatgatcgttttcaaccaaccaacccccatagctttaaaatagtcccaaatatctggtttagcgttatgatcaaagatgtattcaagaatcgacataatgtgatgcacatcaaaaacatatccgagatataaagtacccacaagcattattacagagatggttaagtctctactttttagaatttgcccttttttagaagcatcctggagtttcttttgtgttggcttttcagttttattggccatgaaacactctatttctcaatgtatagttgcaattgttctgggaaaaaggataacggcattactcgttcagccagtattgggccaaaataaataattaatattaaaaatgccagcgcacttttgacagtcagtgaaatggcaaaagcatttagttgtgaagcataacgtgccagcaatcccaggacagcctcaccgcccagcataacggcaatcacggggcttgcgtaaacgatagtatgagtcattatgttattaatatatgagaataaaggctctaatttaggaaaattaaaattgcctgaaggccataaattataactttgccaaagagtttccagaataaagttcaatccaccgttagtaagataaaccgctgcagagaataggttaaataatcttgctaattccgaagtatcgacaccagtagcaggatccaaagtactacttaacgttgcaccacgttggttatcgataaaactacctatagcaaggaaaatccaaaacggggatgataataagcaagcaatgaacagccctatgataatttctctggcagcaaacaaagcgatatcgatttcatttaaggtcgataattcatagtggtaatgctgaaataatgcacatgataccactattattattggatgacggactactgttggtatattcccactggcgaaaaatggtaacaaatagaaagttggtgccaatcggcaaaaaccgagcgctgtagcagccagcagactatgcaactgatagagtatcgcctcctccatcctatcctctcgcgaatgctaaattcagcatttcgataccaaacgaatataatttttcaccataccatccgctcattaaaaaaaagcaaatacttacgcataataatttgacgccaaatggcaacgtctgttcttgtaactgtgttaccgtttgaaaaagccctaccaataaaccaacaaatgtcgcaactgcgataggtcctgcagacataactaaaatcagatacagcgccctattccctgcaaaaacaatatcgttcatattttttcctcagggattaatggataggtcaaaatattgtaaaatgagtccttttgataacattgtccaaccgtccatagcgacaaatagaattaattttatcggtgtagatatgattaccgggctcatcatcatcatacctaacgttaacagaacgctggatataaccagatccactacgacaaagggtaaatagatataaaaacctataataaatgcactttttatctcactcaatgcatatgcgggcagtaacgagaaaattgaaatattatcatcatcgattatctcttcattgtcttcagaactattcaccttctgaatcttttcaaaaagctaaccaactcaggttcagaatattttatcaaatatgatttataaccactcatgcctgtctcaacaaaattaacaaccgacgctacattattgaatgaaagattctcattctgactgttataatatatttccgtcccaaccggcatcattacaaacattgacaatagcaaagcaaccccattaagtgtcatatttgatggcacttgctgaagccccagcgcgtttcggacaataacaaaaacaatcgagaatttaataaaatatgtcccggatgctattataaacggcaatagtgtaaataatgttagtatagctatcagcgaaatggtatttgacattattatgccctgataaccaagaatgaatctctacgcccaatttatcatccacttcaacaagttcgccatagccagttagcgcgccatttacacgtatttctatatttttctcagattcaggaagcagagatattattctttttacacagagttcgtctatttcatatagattcattattttcttaccaagaacaaactcaatttttacaggcaagtcttcaaaactattaatcatctgatcgtcattttcatcataaatctcactctcgttttttttgatatcaaaatcatctgtttcaaaatcttcctcgtactcaaaatgatcagccatttttaactcctctggataaattaaatcacaaatttttgtattataaataaccgcataagccaaattatttgagattaataaaacatcaccaacttcaatatcaacaagacttctgtaacatgttttactaaatccaattacaaaatgaatggaccaatataatgattttttgtctaacactggagcgtttccgtattggcagactgtgactttatctaaccaaagattcaattcccctgttcatattcttattagtggttgagcagggctcaatactccatcaaatactttacctacgtgcaaacgattatattttagttcaggatgctttagatttaacggggaactggataaactgagccattcccctattaacctttccgtttctggcattaaagccatcccagcgagctcagatgaaattaagggaaatatttctccaagcaatacccatccagaccagctgccactctcttctgctatcggtaaccatttagcactaaattcgggcattaataatgcaacatcttcgccattttctttccaattttgaaaagtggtttcaaacgtatgagtgtttcgatttactttcctcagaccgaacattaactttcatccttctgatcgttttcgaatttgctttcattttcttgctcctcataaggctgatgtcgttgtccttgtcgttcatcttgctcagtcaatacccaacgttgtgctgtaactcattatgaaaactatttaattccctcatcattgataaggttggacatctctttcaacatgagagtcattgaagctttcgaccaatttagcggaatgatagggcttggcgcttcatgcaaagttcccgacttgtggatatagttatagctttcgggaagtgccatttcaggtacactcctgccatttgcaccaatcatattctcgcctgttatttgggccaatgatctattcataaattgcactgagtcattcaaatactcttcctttcttgattctttataaacaattgctgctgattttgcataccatgagtcaaaaaaccattctgcttctgttgatggaatgaagctcttttctcttttcgcatgtgaattttgatcggtatcggttttaatatcattgaaccaaaaatttgccgactgataattatccttctcgtatctttttataccatacggacctgctagttttttaactatttttagaacctgctcttttcttctggtgtttatctttgcaagatttgcaggataaataacattaagtaaagccgcatcggcttctctgtaatgtttatctttttccagataacctggggattctccccctaaatcaagctgtaacgttattctttcataacctttatctatgaggtggttcaacctcgttgttgaaagaggttcatccagttcattggctttagcttcgcgtagtaaatcagagacaaaaacagagtctttcttcgagagtaagttcgacaaacgttccagtccagaggtcaccagtgcaacggaagatgtgtttaatcgggcatcttcttcccatgctccggaatcttccataacatagaaattggctttatccagataagcaatcagcagcgcaaccgattttaatcggtcacctttttgccaatcttcagcgttaattgtatcagtgtcgattgcttgtataaggagatcaagataaagacctaacgcatcattttgtttatggttccacagctgcggcttgccttcttcctgcacatctgccatcacgggggagttgctgtcaaatcggatatgcacaacattcatttgcccgggaactccatccagtcgtttggggttgctaatgacgtcctgcatccgcttaatctggtcgggcgtagacatataatcccacagggtgagcagaaccttttttgcggctacactatttccctgatctgatactaatgccatatagccccataaactatccctcagccagacagcatcatagtgggtttgtgccgctgttttgtcatcttcgaaagtagaagcaagaataaacgttccccagggtttctccgtcaacgttaactttcgtgtgttttctgttaatgttagcaatccttgaatttcgtctttggtatagtggctctttatttcattttgtaatttggctgagtgaatcaaaagacgataattaggatacttatctggatttaacgataaataacttttatctgttgctgcccccgtggaattaagaatgttaaatacagattcactcgtcacttctgcccctgtcgcctggcatgtgccgcacgaaaatataccagcgagcagaagagttaatgcagatttccctttcataaaatattccatcaatcgtttgttaaaagcgtagataaccacttatttaacaactcgaaaataaggtgttttacctgggttgttacaaaaggattgcattgcgtaaacgctttttatttacaacaaaatggggaagtattacggcgattgcgaaaagtctgaagcgattgaattaagataatatagaaaatcagatacagcaaaaatggcagattgatcaggtgaagataaattggagcgggcgaagggaatcgaaccctcgtatagagcttgggaagctctcgttctaccattgaactacgcccgcttcgagatgcgtaaggcattataaaccttacgctctccttagcaagtgccgcgctgctgactgctgattaattcgccatcagcattttggcttgctgccctgcggcggcaagtaacgtagcggatcaattgccgttgcacggtaacgaatctggaaatgcaggcgaacagatgccgcatccgtgctccccatagtggcgattttttgcccagccttcacgctttgcccattatttaccagcatcgtgtcattatgggcgtaagccgtaatgtaatcttcactgtgtttaatcatgatgagattaccgtagccacgcagctggttgcccacatacaccacctttcctgcacccgcggcgtaaataggtgtaccccgtggagctgagatatcaatccctttattgccgccatctgctgtcgaatacggcatgataactttccctgtcgttggccataaccaacaacgttgccctactggcggccaggaagatttcggtaccgctgatgacggtgtaaccgatgcggttttggtcgttgatttggcggttgatttacgtgtactactgctacttttcgccccacccagttttagtttctgaccaacttcaatggtgtaagggggggaaatgccgttcagtcgcgccagttcttttacgctggttcccgtggtgcgcgaaatacgatatagcgtatccccccgtttcacggtgtaaacggagccggaatacgttcctgtatcggatgatttgctacccgaacagcccgccaaaagcagtccaaccgataacaacatcacgatacccagagattttttattcaggcgtcccgcactcaaaatctttcctcgcttaaaaaacaagacgccttatcatagcagccagcctcttgatacccaatctcttgcttctggaaaaacgtggtaatagagaaagaggttaatttcatttggcaaagggaagtatcatcagcaaaatattcgctgtagaggtatcgaacttcctgactttttaccctatttcccatcctgatgcgtaataatcccaatttatcacattgattttatcgccactcatattgatacgtatcactgcccctattcagagtcctgtttcgtatcatatctgtgtttttttaacgtcatcacacttcctacctcccctaacgcttatcgtcgtttctggcgtaaatcttgcctgcttagactaaatctttgccataagaaccaaatgttcaaatcgaggggatttctatggaagcgcgggaagcaaccgctacgggtgaatcatgcatgcgcgtcgatgccattgctaaggtcaccgggcgggcacgatatactgacgattatgttatggcgggcatgtgttatgcgaaatatgtacgtagccctatcgcacatggttatgccgtaagtattaatgatgaacaagccagaagtttgccgggcgtactggcgatttttacctgggaagatgtgcctgatattccatttgctactgctgggcatgcctggacacttgacgaaaacaagcgcgataccgccgatcgcgcactgctaactcgccatgttcgtcatcatggtgacgccgttgccatcgtcgtggcccgcgatgaactcacggcagaaaaagcggcgcaattggtcagcattgagtggcaagaattacccgttatcaccacgccagaagcggcgctggcagaagacgctgcaccaatccataacggtggcaatttactgaaacaaagcacgatgtcgacgggtaatgtccaacaaacaatcgatgccgccgactaccaggtacaggggcactatcagacccccgttattcaacattgtcacatggaaagcgtaacatcgctggcgtggatggaggatgactcgcgaattaccatcgtttccagcacccagatcccgcacattgttcgccgcgtggttggtcaggcgctggatattccctggtcatgcgtacgagtcatcaaaccgtttgtcggtggcggttttggtaataaacaggatgtactggaagagccaatggcggcattcctgaccagcaagcttggcggcattccggtgaaagtttcccttagccgtgaagagtgtttcctcgcaacccgtacccgccacgcttttaccattgacgggcaaatgggcgtgaaccgcgacggaacattgaaaggttatagtctggatgttctgtctaacaccggcgcttatgcatctcacgggcactccatcgcttctgcgggggggaataaagtcgcttacctttatcctcgttgtgcctacgcttacagttcaaagacctgctataccaacctcccctcggctggtgcgatgcgtggttatggcgcgccacaagtcgtatttgccgttgagtctatgcttgatgacgccgcgacagcgttaggtattgatcctgttgaaattcgtttacgcaacgccgcccgcgaaggagatgctaatccgctcacgggcaaacgtatttacagcgcagggttgccggagtgtcttgaaaaaggccggaaaatctttgaatgggaaaaacgccgtgcagaatgccagaaccagcaaggcaatttgcgccgcggcgttggcgtcgcctgttttagctacacctctaacacctggcctgtcggcgtagaaatagcaggcgcgcgccttctgatgaatcaggatggaaccatcaacgtgcaaagcggcgcgacggaaatcggtcagggtgccgacaccgtcttctcgcaaatggtggcagaaaccgtgggggttccggtcagcgacgttcgcgttatttcaactcaagataccgacgttacgccgttcgatcccggcgcatttgcctcacgccagagctatgttgccgcgcctgcgctgcgcagtgcggcactattattaaaagagaaaatcatcgctcacgccgcagtcatgctacatcagtcagcgatgaatctgaccctgataaaaggccatatcgtgctggttgaacgaccggaagagccgttaatgtcgttaaaagatttggcgatggacgctttctaccaccctgaacgcggcgggcagctctctgctgaaagctccatcaaaaccaccactaacccaccggcgtttggctgtacctttgttgatctgacggtcgatattgcgctgtgcaaagtcaccatcaaccgcatcctcaacgttcatgattcagggcatattcttaatccactgctggcagaaggtcaggtacacggcggaatgggaatgggcattggctgggcgctatttgaagagatgatcatcgatgctaaaagcggcgtggtccgtaaccccaatctgctggattacaaaatgccgaccatgccggatctgccacaactggaaagcgcgttcgtcgaaatcaatgagccgcaatccgcatacggacataagtcactgggtgagccaccaataattcctgttgccgctgctattcgtaacgcggtgaagatggctaccggtgttgcaatcaatacactgccgctgacgccaaaacggttatatgaagagttccatctggcaggattgatttgaggataacatcatgtttgattttgcttcttaccatcgcgcagcaacccttgccgatgccatcaacctgctggctgacaacccgcaggccaaactgctcgccggtggcactgacgtactgattcagctccaccatcacaatgaccgttatcgccatattgttgatattcataatctggcggagctgcggggaattacgctggcggaagatggctcgctacgtatcggctctgcaacgacatttacccagctaatagaagatcctataactcaacgtcatctcccggcgttatgtgctgcggccacgtccattgctggaccgcagatccgtaacgtcgctacctacggtggaaatatttgcaacggtgccaccagcgcagattctgccacgccaacgctaatttatgacgcgaaactggagatccactccccgcgcggtgttcgtttcgtcccgattaatggctttcacaccgggccgggcaaagtgtctcttgagcatgacgaaatcctcgtcgcctttcattttccgccacagccgaaagaacacgcgggcagcgcgcattttaaatatgccatgcgcgacgcgatggatatttcaacgattggctgcgccgcacattgccgactggataacggcaatttcagcgaattacgcctggcatttggtgttgccgcgccaacgccgattcgctgccaacatgccgaacagactgcacaaaatgcgccattaaacctgcaaacgctggaagctatcagcgaatctgtcctgcaagatgtcgccccgcgttcttcatggcgggccagtaaagagtttcgtctgcatctcatccagacgatgaccaaaaaagtgattagcgaagccgtcgccgcggcggggggaaaattgcaatgaatcacagcgaaacaattaccatcgaatgcaccattaacgggatgccttttcagcttcacgccgcaccaggcacgccgctctcggaattactccgcgaacaaggactgctaagtgtcaaacaagggtgctgcgtgggtgaatgtggtgcctgtacggtgttggtcgacggcacagcaatagacagttgcttataccttgccgcctgggctgaaggaaaagagatccgcacgctggaaggtgaagcgaaaggcggaaaactttctcatgttcagcaggcttatgcgaaatccggcgcagtgcagtgcgggttttgtacgcctggcctgattatggctaccacggcaatgctggcgaaaccacgcgagaagccattaaccattacggaaattcgtcgcggactggcgggaaatctttgtcgctgcacggggtatcagatgattgtaaatacagttcaggattgcgagaaaacgaagtaaaaggatatccggcctgaattcaggccggattcactgaggttatgtgtttaacaactcatatttcttaatcttgcgatagagcgtagcaatgccgatgcccagttcatcagcaacttgcttcttgctgttatgacgtgaaagcgcctcgcggatcatttgcttttccatctcctccagcgccgtgccgcccgcatcatcgagtgacaggtgcgcctcactgacctctgttacatcactttgctccgttgtgccattattcagcagatttggcggcaatagcgtgctgtcgataacttcacctgaaggaactacgttaaccagatattccatcaaattgcttaactcgcgcaggtttccgggccaacgatgcttacgcaatatttcgacgacatcgggagcaatgccaggataaaccgatcccagacgacgggtatgcagatgtaaaaagtaatgcaccaatagttcaatatcttcctgacgttcacgcagcggtggcagagttatcgggataacattaagtcggtagaagagatcttcgcggaatttaccttcggcaatgaactgggccaaattctgattagttgcagaaatgatgcgaatgtcgacttgtattgggctactggcaccaatcggcagaatttcacgcgcctcaatagcgcgcagtaatttagcctgcaacattaatggcatatcacctatttcatcgagaaacagcgtgcccgtattcgccgcctgaatcaaccctgttttaccgttggcagaagcgccagtaaatgcgcctttaacataaccgaacagttcgctttccagaagctgctccggaatcgcggcacagttgatagcaataaagggtttattccgtcttccgctcaacttatggattgctcgggcgacgacttctttacccgtgccgctttcaccaaccaccataacgctggatgggctgggtgcaatacggctaatgagtcgttttaattgccgcataacacggcactcgccaaccaattgttcaatatgtggttcatcaggtgcatttgctacagaaaaactggtatgcgattggtgaaatgccattaaaaataattgtcggccctgaatgttatgcaattgaccaatgattaattcacttttatcgtcccacgaaacaatatgctgcatatgtccatgagtaaaattactctcaaatgttaatggtctgaaacggataggtttcccaataatattattttgtacaacaccaagtgtttttaaggcagtctgattaacaaactgaacccgactttcatcatcaacaactaatacgccctgatccatattatcgatcatggtcgcgaatattttactgatgttatctcctggcccctgatcctccagaagtttcgaaacaaaaatggtggatatatggcgaacataatcagaaaattcgcgtaaattatcactgatatgctcttgttgctcgtgggtaacggcaatcaaacttatcaccccaacacaacgatcctgtaaaatgacaggcgtacccagaaatgctttttcacggcaattttctttactatcgcaaccttcgcaaaggggatcgaagcgagactgtgtcacaactttttcagttttcgtttccaggacgtggcggagcaggcgtgagttgccgctcaactggcgaccaagaaacttcccatacgcgcccgttccggcgacgcgacacaagttttcatcaacgatctcaacctcaagctgcaaaacgctggcaagcattctggcaaaacgctgaattgtcggttgaatttgcatcaatactgactgcgtagtagcaagctccatagctttaccttccagacttacttaaaagtcgatcattgaagacgttgatggttcacagatcatgatgatattaactcaggcgaaattggctttgataaaaacataagatttttatcattttctaatgaaattatggaagagatatcacatttctatatcaatatgagaattacggcggtgagtttatcaaactgaagagagatagcctgcccctttatcttatttctgatacttagcagcaaataaataacgcgataaaaaaagccaaacgttttcgtattttacaaacaaccggaagctggcatcaatttgtgatcaaccccacacattatccgtcaaattagtcttttgcagccccgtggataattctggcacacttattgttagtcccaggtatagctgtgaaaacaccaatcactttggcaagtcacagtgaaataaaccactttgcctgtcattccactaccgggactttatgatgaaaactgttaatgagctgattaaggatatcaattcgctgacctctcaccttcacgagaaagattttttgttaacgtgggaacagacgccagatgaactgaaacaagtactggacgttgccgcagcattaaaagcactgcgtgctgaaaacatctcaaccaaagtctttaatagtggattaggtatttccgtattccgcgacaactccacccgtacccgcttctcttatgcttccgcgcttaacctgctcggccttgcacaacaagatctcgacgaaggcaaatcacaaatcgctcacggcgaaaccgtgcgtgaaaccgccaatatgatctccttctgcgccgacgctattggtattcgcgacgatatgtatctgggcgcaggcaacgcctatatgcgtgaagttggcgctgcacttgatgacggttacaagcagggtgtactgccacagcgtccggctttagtgaacctgcaatgcgatattgaccacccgactcagtcaatggctgacctcgcgtggttacgtgaacactttggttcactggaaaacctgaaaggtaaaaaaatcgccatgacctgggcctactctccaagctatggcaaaccgctctctgtaccacaaggcatcatcggtctgatgactcgcttcggtatggatgtcaccctggcccatccggaaggctacgacctgatcccggatgtggttgaagtggcgaaaaacaatgctaaagcatctggcggtagcttccgtcaggtcaccagcatggaagaagcgttcaaagatgcagacatcgtttatccgaagtcatgggcaccttacaaagtgatggaacagcgtaccgaattgctgcgcgctaacgatcacgaaggcttaaaagcactggaaaaacagtgtctggcacagaacgcgcaacacaaagactggcattgtactgaagagatgatggaactgacccgtgatggcgaagccctgtacatgcactgcctgccagctgatatcagcggcgtatcctgtaaagaaggtgaagtgactgaaggcgtattcgaaaaataccgtatcgcaacctacaaagaagccagctggaagccttatatcatcgccgcgatgatcctgtcccgtaaatacgccaaaccaggtgcactgctcgagcaactgctgaaagaagcgcaagaacgcgtgaaataacccctcgggccgatcagctggtcggccctctatttccagaggccaaaaggataggatatgtccgttttctcattgaagattgatatcgccgataacaaatttttcaacggcgaaacatcaccgctcttttcgcaaagccaggccaaactggcgcgccagttccaccagaaaatagctggttatcgcccaacaccgctttgtgcgctggacgatctcgcaaacctttttggtgtgaagaaaattctcgtcaaagacgaatcaaaacgattcggtctgaacgccttcaaaatgcttggcggtgcgtacgccatcgctcaattattgtgtgaaaaatatcatcttgatatcgaaacgctgtcatttgagcacctgaaaaatgccatcggcgaaaaaatgactttcgcgaccaccaccgacggcaaccacgggcgcggtgtggcgtgggcagcacagcaactcggacagaatgcggtgatttacatgccgaaaggttctgctcaggaacgcgttgacgccattctgaacctcggtgccgagtgcatcgtcacggatatgaactatgacgataccgttcgcctgaccatgcaacacgcgcagcagcacggctgggaagtggtacaggacacggcatgggaaggttacaccaaaatcccaacctggatcatgcaaggctacgcaaccctggcagatgaagccgtcgagcaaatgcgtgaaatgggcgtaaccccgacgcacgttctgctgcaagccggtgtcggagcaatggccggtggtgtgctgggttatctggtcgacgtctacagcccgcaaaatctgcacagcattattgttgaacctgacaaagctgactgtatttatcgctccggcgtcaaaggcgacatcgtcaacgttggcggtgatatggccaccatcatggcgggcctggcctgtggcgaacctaacccgctgggctgggaaatcctacgtaactgcgccacccaattcatctcctgccaggacagcgttgccgcattaggtatgcgcgtgctgggtaatccgtacggcaacgacccgcgcatcatctccggtgaatccggcgctgtcggtttgggcgttctcgcagcggttcattatcacccgcaacgtcaaagcctgatggaaaaactggcgctgaacaaagatgccgtggtgctggttatcagcactgaaggcgacaccgacgtgaagcactaccgcgaagttgtctgggaaggcaaacacgctgtagcaccttaatcaccctattggaactactccctgcaaaacggggagtaaaaaatctggagaaaaataatggctaagaatattccattcaaactgattcttgaaaaagcaaaagattaccaggcggacatgactcgcttcctgcgcgacatggttgctattcccagtgaaagctgcgacgaaaaacgcgtagtacatcgtattaaagaagagatggaaaaagtcggcttcgataaagttgaaatcgacccgatgggcaacgttctcggttatatcggccacggcccgcgtctggtggcaatggacgctcatatcgataccgtcggcattggcaacatcaaaaactgggacttcgatccgtacgaaggcatggaaactgatgagctaatcggtggtcgcggtacttccgaccaggaaggcggcatggcatctatggtttatgccggtaaaatcattaaagacctcggtctggaagatgaatataccctgctggttaccggtactgtgcaggaagaagactgcgacggtctgtgctggcagtacattattgaacagtccggcattcgcccggaatttgtggtcagtaccgaaccaaccgactgccagatataccgtggtcagcgcggtcgtatggaaattcgtattgatgttcagggtgttagctgccacggttctgcgccagaacgcggtgacaacgccattttcaaaatgggtccgattcttggcgaattacaagaactctcccaacgtctgggttatgacgaattcctcggcaaaggcaccctcaccgtttctgaaatcttcttcacatccccaagccgttgcgctgtagcagatagctgcgccgtctctattgaccgccgtctgacctggggcgaaacctgggaaggcgcgctggacgaaatccgcgccctgcctgcagtacagaaagctaacgcggttgtttctatgtacaactacgaccgtccgtcctggactggcctggtttacccaaccgaatgctacttcccgacctggaaagtggaagaagatcacttcaccgttaaagcactggtgaatgcctacgaagggctgtttggcaaagcgccggttgttgataagtggaccttctcaactaacggcgtatctatcatgggccgtcacggcattccggtgatcggctttggcccgggtaaagaacctgaagcgcatgcacctaacgaaaaaacctggaaatctcacctggtgacctgtgctgcgatgtacgctgcaatcccgttaagctggctggcaaccgaataattactcttcacttattcccctccggttcgccggagggtttttggagtttgctatgcgcgtattgatcaaaaacggcactgtcgttaacgcagatggacaagccaaacaggatttgctgattgaaagcgggattgttcgccagttgggcaacaatatttcgccgcagctcccgtatgaagaaattgatgccactggctgttacgttttccctggcggcgtggatgtccatacgcatttcaatattgatgtcggcatcgcgcgcagttgtgatgatttttttaccggtacccgcgcagctgcgtgtggcggtacaacaaccattattgaccatatgggatttggcccaaacgggtgtcggttacgccatcaactggaggtttatcgtggctatgccgcccataaggcggtcatcgactacagctttcatggtgtgatccagcacattaatcacgccatcctcgacgaaatccctatgatggtcgaggaagggctgagcagttttaaactctatttaacctatcaatacaaactcaacgatgacgaggttttgcaggcattacgccgtctgcatgaatccggcgcgctgaccaccgtgcacccggaaaatgatgcggctatcgccagcaagcgggcggagtttatcgccgcagggttaaccgcgccgcgctatcacgccttgagtcgccctctggaatgcgaagcggaagccatcgcccgcatgattaacctggcacaaattgccggtaacgccccgctctatatcgtgcacctgtctaacggcttaggtctggattatctgcgtcttgcccgtgcgaatcaccagccagtctgggttgaaacctgcccacaatatctcctgttggacgaacgcagttacgatacagaagatggcatgaagttcattcttagcccaccgctgcgtaacatacgcgagcaggacaaactgtggtgtggcatcagcgatggtgcgattgacgtggtggcgaccgatcactgcacgttctcaatggctcaacgcctgcaaatttctaaaggcgatttcagtcgctgcccaaatggcttacccggcgtggaaaaccgcatgcagttactgttttccagtggcgtgatgacgggacgtataacaccggaacgctttgttgaattaaccagcgcaatgcccgccaggctgtttggcctgtggccacaaaaaggattattagcgcccggttccgatggcgacgtggtgattatcgacccacgtcagagccaacaaattcagcatcgccatctccacgacaacgccgactactcgccatgggagggttttacctgtcagggcgcgattgtcagaaccttatcccgtggtgaaacgattttctgtgacggcacctttacaggcaaagccgggcgaggtcgtttcctgcgacgcaaaccgtttgtccctcccgtgctctaaccactgccagggatctatacacaatcaagaatgatgagtgaggaaaaatgagtaagaaaattgttctcgccctgggcgggaatgcgctgggcgatgatctggccgggcaaatgaaagcggtaaaaattacttctcaggcaattgttgatttaattgcccagggacatgaggtcatcgtcactcacggtaacgggccgcaggtgggcatgattaaccaggcctttgaagctgctgcaaaaactgaagcgcactcgccaatgctgccgatgtctgtctgcgttgccttaagccagggttatattggttacgatctacaaaacgccttaagagaagaactgctttctcggggcattaataaaccggtagcaacgctggttactcaggtcgaagtcgacgctaacgatccggcattcctcaacccgaccaagccgatcggttcgttctttaccgagcaagaagcagagcaactgacaaaacagggttacactctgaaagaagatgctggtcgcggctatcgccgtgttgttgcctcgccaaaaccggttgatattattgaaaaagaaacggttaaagctctggtagatgcaggccaggtggtgatcaccgttggcggtggtggtattcctgttattcgtgaaggtaaccatctgcgtggtgccagcgcggttatcgataaagactgggccagcgcccgtttagcagaaatgattgatgccgatatgctgatcattctgactgcggtagaaaaagtggccattaacttcggtaaagagaatgaacagtggctcgatcgcctgtcattaagtgatgctgaacgctttatcgaagaaggtcattttgcgaaaggttctatgctgcctaaagtggaagctgccgcctcgtttgctcgctctcgcgcaggtcgtgaagcactgattaccgtattgagcaaagcgaaagaggggattgaaggcaaaaccggaacggtgatttgtcagtaattttaaggccgggtgggtaataccatccggccattttcatttaagccacttccagcacttcttttgtcgctttcacgccctgatgcatcaacatcattaacgcctcaagtacgccgccgccaatcgcccgggctttatcagaaacgctggtgaaatcagccgtttcaccacgaggatcgatatcaccaattttaaaaccaccgaccactgccaggccgtcgttcaacaagccacgcaccatccccgtcaacggtgctttaatttcatgctcaccaatccaggcaatcacatcgccctctttcaccagatcgcctaatttcacgttggatcgcataatgcctgcagcaggagcacggatcacccgtcgggtggtatgccccataatattgccaggaacaccggtattctcctgcgcacaaccagagtaaatcacctgaccgagccagtgcccgcgatttgtttcaattaccgcatgacaatccttccctgcagtaaagcccggcccaagcgcgattgttactggtgccatatctgcccgcgttcccaaattctgtttcgccagaatagcgtccaccacgcaaagcggtttcagttcatcaagcaatgaacaggcgggatctgccatcacagggatgaatccgcgttcggtaagtttcatcgcttccgcagagctggttgccaggcgagcagtaacgccttcgaccgtcatttcgccatcgaacacggcctgggcaaacgccacggtacaacgaatcactgtcggtttttccacttccagcatgatcactttaaaacccgcatgatacagacgtagcgccacaccactggcgatatctcccgcaccgcgaatcaccaccagctggtgtccggaaggatgagaaggtttcatcatcagcccacccggcgcgttatttttcacctgtaatatttctgccagcacgctgatggcgatctcctgcggcgtttccgcacctatgttgtaaccaacgggcgcatgtaaacgggcaatatgttcttcagccacgcctttctcacgcaattgacgcaggaaaagctgaaccttgcggcgacttgccagcaaccccaaccatgcaatgggctgttcaatgagtttgtcgagggcttcacgatcctgattattcgtggcaatcaggacaaaattatcagggcgaatatccagtgcttccactgctgcaccaaacgactcagcatggagaagcgtggttgatggagggaatagttcaggattgaggctttcgcgataaatatcggcaacggcaatatcaaatcctaatagcgccgcactctgggctatcgcccggttgacatgccccgcgccaatcaacaccagacgtggacgcataccatggacgctgataaatactgacattgcacctccacaatctgacccgacagcatccgcaccgttacgagccatacgtccatggaataatcgcggcttacgttcctgcaatgcctgaagtgactcttcaatcaccttccgctcaaccattccgccaccaattgtaccgacgatagaaccatcggcgcgcactaacatttgtgcagaatggcggggagtcgagcctcggctatcaacaatttgcgccatcgcaaacggacaattttgctcttcgagttttgcagcctctgtgaaaatattcataccaacctcaatggatatcctttcagtaacccggaatacccgggccgctaattcacaaatctgcgcgcgattgcaggatgttcttgtatatcgcccagccagattgcctctacgtcgtgttgttgcagcggttgaaggagctcgctttgtgcaatcgcattctcacattgagaaaaacggttaatgaaccagactcgccgacaaccttgcggtacgtttttaaacgccccctgagggtggcgaaccagcgcaacgagatcgctcagttgcaaggttgcatcaggtgttaacccggtaatatcagcaaactgcgaccagcgatggacattttctgtgctcactttcgcgcccaaagtatgtcctcccatcacagcaatcacgcagcaactgcttttgggtatgcaaggttcgtgctcatcaggcgcttttaacggcattccacgcgagccatctgcttcaatgagaattacgtcacactctggtcgttgcaccagtgcatcaatcgcttctggcgtaaatccctgcacttttccctggttcgctttccagctgtgaaaacaaaatgaaatgggggatgtaagagacgcatgaggaagcatggcgggatcacgacagaaaaccacgggccagtgagacgttggcataaacatatgtgtcgtcgtcgtgattaacacacgcctgccgctagcctggagcagttctgccagccaaaaaagcaagctggttttccccccagcaccaacaacagaaatcacagtgggacgtttctgcgcacctaaatcaatgactaatgccgatgggtcaactatacttttcacgagtctttatgacctctctgggataaattatccccaacttaatccatcaggaagtaacgcaattatcaggcgttattagcccctataaataatggaaccactatgtcagccatcgactgtataattaccgctgccggattatcatcaagaatggggcaatggaaaatgatgttaccctggcaacaggggacaattcttgatacaagtatcaaaaatgcgttgcagttttgtagccgaattattttagtcaccggctatcgtggtaatgaactgcacgaacgttatgcgaaccagagcaatatcactattatccacaacccagattatgcgcagggtttactaacatcagtaaaggccgcagtacccgcagtgcaaacagaacattgttttctcacccacggtgacatgccaaccctcaccatcgatatttttagaaaaatctggtcgttacgaaatgatggcgcaatactgccactccataatggcatccccggccatccgattttagtgtcaaaaccatgcttgatgcaggcaatccaacgacccaatgtcaccaatatgcgtcaggcactccttatgggagctcattattccgtcgagatagaaaatgcagaaataattttagatattgatactccggacgactttattacagcgcaaaaaaggtatactaaaatttagaaaatgtagttaaacgattgcgttcaaatatttaatctctccagcactctttatcataatgataaggaatcactgattttgagaaaagagaaaaagtgataaatgggctgacaataataattttcaggagtgattttaattctcatttggcacctgtgagttcattcacaaaaagcctttaagtttcgagccgcctcacatttttttatatttcccgccaaacctggcaagagtggtgcgattgttgctctatccccctaaaccaccggatttctcaacaccggtcactcaatgatatctgtataagctaaggagagggttatgggggatattatgcgtcccattccgtttgaggaacttttgacgcgcatatttgatgaataccaacaacaacgctcaatctttggtattcccgagcaacagttttactcacctgtaaaaggtaaaactgttagcgtcttcggtgaaacctgtgccactcccgtcggccctgccgctggcccgcacacgcagctcgcgcaaaatattgtcacttcctggctgactggcggacgcttcatcgaactaaaaaccgtccaaattcttgaccgcctggagctggaaaagccctgtatcgatgccgaagacgagtgctttaacaccgaatggtctaccgaatttaccctgcttaaagcctgggatgaatacctcaaagcctggtttgccctgcaccttctcgaagcgatgttccagccttctgattccggtaaatcgttcatctttaatatgagcgtcggttacaacctcgaaggtattaagcaaccgccaatgcaacagttcatcgacaatatgatggacgcatctgaccatccgaaattcgcgcaatatcgcgatacgctgaataaattactccaggatgacgcatttttagcccgccacggattgcaggaaaaacgcgaaagcttgcaagccttacccgctcgcatccccaccagtatggtgcagggcgtcaccctctccaccatgcacggctgtcctccgcatgaaatcgaagccatttgccgctacatgctggaagaaaaagggctcaacacctttgtgaaacttaacccgaccttactgggatacgcgcgtgttcgtgagatcctcgatgtctgcggtttcggttacataggcttaaaagaagagtcatttgatcacgacctcaagctgacgcaagcactggaaatgctggaacgcctgatggcactggcaaaagaaaaatcactcggctttggcgtaaaactgactaacactctcggcaccatcaacaataaaggcgcactgcctggtgaagagatgtatatgtcaggccgtgcgctgttcccgctctccatcaatgttgcagcagttctctctcgcgcctttgacggcaaactgcccatttcttattccggtggtgccagtcagctgactatccgcgatatttttgatacaggtattcgccctattactatggcaaccgacctgctgaaacctggcggctatttgcgcttaagtgcctgcatgcgcgagctggaaggctccgacgcctggggacttgaccatgttgacgtcgaacgactgaacagactggcagcagatgcgttaaccatggaatacacccagaaacactggaagccagaagagcgtattgaagtggcagaagacctgccgctgaccgattgctacgttgccccctgtgttactgcctgcgctatcaagcaagatattccggaatacatccgtctgcttggcgaacaccgctatgccgacgcgctggaactcatctaccaacgcaacgctctgcccgccattaccggtcatatttgcgatcaccagtgccaatacaactgtacccgcctggattacgacagtgcgctgaatatccgcgaactgaaaaaagtcgcgctggaaaaaggttgggatgaatataagcaacgctggcacaaaccagccggttctggttcacgccatccggttgccgtgattggtgcaggtccggcgggtctggcagcaggttacttccttgccagagcgggccatccggttacgctgtttgaacgcgaagccaatgcgggcggcgtggtgaaaaatatcattcctcagttccgtattccggctgagttaattcagcacgatatcgattttgttgccgatcacggcgtgaaatttgagtatggctgctcacccgatttgaccgttgaacagttaaaaaatcagggcttccactatgttctgattgccaccggcactgataaaaatagcggtgtgaaactggcgggcgacaaccaaaatgtctggaaatcactccccttcctgcgtgaatacaacaagggtacagcgctcaagctgggcaaacatgtggtcgttgtcggggcgggtaacaccgcaatggactgcgctcgtgcggcgttacgcgttccaggcgtagaaaaagcaacgatcgtttaccgtcgttcactgcaagagatgcccgcatggcgcgaagagtatgaagaagcgttgcacgacggcgtggagttccgtttcctgaataatccggaatgtttagatgctgatggcaccttaaccttgcgcgttatgtcgcttggcgaacccgatgagaaaggtcgtcgccgtccggttgaaaccaacgaaacagtaacactgcatgtagacagcctgatcaccgccatcggtgaacagcaggatactgaagccctgaatgcgatgggcgtaccgctggacaaaaacggctggccagacgtcgaccataatggcgaaactcgtctgactgacgtctttatgatcggcgacgtacagcgcggaccatcctccattgtcgctgctgtcggaaccgcgcgtcgggcgaccgatgccatccttagtcgggaaaatatccgttcccaccagaacaataaatactggaacaacgtcaatccggcggaaatctatcaacgtaaaggcgatatctctatcacgctggtgaacagtgacgatcgtgatgcgtttgtcgcccaggaagccgctcgctgcctcgaatgtaactacgtttgcagcaagtgtgtggatgtctgcccgaaccgcgccaacgtctccattgcggtcccaggcttccagaaccgtttccagacgctgcacctcgacgcttactgtaacgaatgcggcaactgcgctcagttctgtccgtggaacggtaaaccgtacaaagacaaaatcaccgtcttcagcctgtcgcaagactttgataacagcagcaacccaggcttcctggtggaagattgtcgggtacgcgtacgtctgaataaccaaagctgggtgctgaacatcgacagcgaaggccagttcgacaacgtaccaccggagctgaacgatatgtgccgcatcatcagccatgtccaccagcatcatcattatctgctgggccgcgtggaggtgtaatcatgttgattctgaagaatgtcaccgcagtacagttacacccggcgaaagtgcaggaaggcgttgatatcgccatcgaaaatgatgtgattgtcgctatcggcgatgccctgacgcaacgctaccccgatgccagctacaaagagatgcatggtcggattgtgatgccgggaattgtctgctcgcacaaccatttttactcggggctttcccgcggaattatggcaaacatcgccccctgcccggatttcatctcaacgctgaaaaatctctggtggcggctcgatcgcgcccttgatgaagagtcgctctattacagcgggctgatttgttccctggaagcgattaagagcggatgtacatcggttatcgatcaccatgcctctccggcgtatatcggcgggtcgctctccacattgcgcgacgcatttttaaaagttggcctgcgcgcgatgacctgttttgaaactactgaccgtaacaacggcatcaaagagttgcaggaaggtgtagaagaaaacatccgcttcgcccgtcagattgatgaggcgaagaaagcagcaaccgagccgtatctggtggaagcacatatcggtgctcacgcgccgtttaccgtgccagatgccggtctggagatgctacgtgaagccgtgaaagccacaggccgtggtttgcatattcacgctgcggaagacctttacgacgtttcctacagtcaccactggtacggcaaagacctgctggcacgactggcgcaattcgatctcatcgatagcaaaacgctggtcgctcatgggctgtacttgtcgaaagatgacatcgccctactcaatcagcgcgatgcgttcctggtgcataacgcccgttcaaacatgaacaaccatgtcggctacaaccatcaccttagcgacatccgcaatctggcgttgggaacggacggcattggttcggacatgtttgaagagatgaaatttgccttctttaaacatcgcgatgcgggtggtccgctgtggcctgacagttttgccaaagccctgactaacggtaacgaactgatgagccgcaactttggcgcgaaatttggacttctggaagccggttacaaagctgatttaaccatttgcgattacaactcaccgacgccgctgctggcagacaatatcgccgggcatatcgctttcggtatgggctcaggcagcgttcacagcgtgatggtcaatggtgtgatggtctatgaagaccgtcagtttaacttcgattgcgattccatttatgcacaagccagaaaagccgctgccagtatgtggcgtcggatggatgcgctggcataaatgacagatgccctcttcccgcagggaagagggttaaataaggaaagaagatgattgaacaatttttcaggcccgactctgtcgaacaggcgctggaactgaagcgccgctaccaggatgaagccgtctggttcgccgggggcagcaaactcaatgctacaccaacccgtaccgataaaaagattgccatttccttacaggatctggaactggactgggttgactgggataacggtgcactgcggattggcgcaatgtctcgcttgcagccactgcgtgatgcgcgatttattcctgcagcgctgcgtgaagccctcggttttgtttactcacgccatgttcgtaatcagtcgaccattggtggtgaaatcgccgcccgccaggaagagtcggtgctgcttcccgtcctgttggcactggatgctgaactggtttttggcaacggcgaaacgctgtcaatcgaggactacctggcctgcccatgcgatcgcctgctaaccgaaattatcattaaagatccgtatcgcacctgtgcgacccgcaaaattagccgttctcaggcaggtttaaccgtcgtgacggcagccgttgcaatgacagaccacgacggtatgcgaattgcgctggatggcgtcgccagtaaagcactgcgtctgcatgatgtcgaaaaacaaaatctggaaggcaatgcacttgaacaggctgtcgccaacgccattttcccgcaggaagatttgcggggcagcgtggcctataaacgctatatcacgggagttctggtagccgacctgtatgccgactgccaacaggctggggaggaagccgtatgatcatccactttactttaaatggcgcgcctcaggagctaaccgttaatccaggcgaaaacgtgcaaaagctgttgtttaacatgggaatgcactctgtacgcaacagtgatgatggcttcgggtttgccggttctgacgcaataatctttaacggtaatatcgttaacgcgtccttgcttattgccgcacagttagagaaggcagatattcgtaccgcagaatctttgggcaaatggaacgagttaagtctggttcaacaggcaatggttgatgttggcgtggtgcagtctggttataacgatccagctgcagctctgattatcaccgatcttctcgatcgcatcgccgcacctacccgcgaagagatcgacgacgcgctttctggtttgttcagccgcgatgcaggctggcaacaatactatcaggtcattgaactggcggttgcacgtaaaaataatccgcaggccaccattgatatcgctccgactttccgtgacgaccttgaagtcattggcaagcattatcctaaaactgatgccgcgaaaatggtgcaggcgaaaccctgctatgttgaagaccgcgtaacggctgacgcctgcgtcattaaaatgttacgtagcccacacgctcacgcactgattactcatctggatgtcagcaaagctgaagccttaccgggcgtcgttcacgttattactcacctgaattgcccggatatctactataccccgggtggtcagagcgcaccggaaccgtcaccgcttgaccgccgtatgttcggcaagaaaatgcgtcacgtcggcgatcgtgttgctgcggtcgtcgcagaaagtgaagaaattgcgctcgaagcattgaagctcatcgacgttgaatatgaagtgcttaagccggtaatgtcgatcgacgaagcaatggcggaagatgcgcctgtcgtgcacgatgaaccggtggtgtatgttgctggtgcgccagatactctggaagacgataacagccatgcagcccagcgcggcgagcatatgatcatcaacttcccgatcggttctcgccctcgcaaaaatatcgccgccagtattcatggtcatattggcgatatggacaaaggctttgccgatgccgatgtgatcattgagcgaacctataactcaacgcaggcacagcagtgcccgactgaaacacatatctgctttacccggatggacggcgatcgtctggttatccacgcctccacccaggtaccatggcacttacgccgccaggtcgcgcgcctcgtgggcatgaaacagcataaagttcatgtcattaaagagcgagttggcggcggttttggttccaaacaggacatcctgctggaagaagtgtgcgcctgggcaacctgcgtgaccgggcgtccggtactgttccgctacacccgtgaagaagagtttattgctaacacctctcgtcacgtcgcgaaagtcaccgtcaaactgggagcgaaaaaagatggtcgcctgacggcagtgaagatggatttccgcgccaacactggcccttacggcaaccactcactcaccgtaccgtgtaacggaccggcgctgtcgctgccgttatatccgtgcgataacgtcgatttccaggtcaccacctactacagcaacatttgcccaaatggtgcttatcagggttatggcgcaccgaaaggtaacttcgctatcaccatggcattagcggaactggctgaacagttacagatcgaccaactggaaattatcgaacgtaaccgggtacacgaagggcaagagctgaaaattctcggtgcaatcggtgaaggtaaagcgccgacctccgttccttccgccgccagctgtgcactagaagagatcctgcgtcagggtcgcgagatgatccaatggtcgtcaccgaaaccgcaaaatggtgactggcacatcggtcgcggcgtcgccattatcatgcagaaatcgggtatcccggatatcgatcaggctaactgcatgatcaaactggaatcggacggcacctttatcgttcattctggcggtgcggatattggtactggtctggatactgtagtgacgaaactggcagcagaagtgctgcactgcccaccgcaggacgtgcatgttatctccggtgataccgatcatgcgttgtttgataaaggcgcatatgcctcgtccggtacttgcttctcaggtaacgcggcgcgtttggcagcggaaaatctgcgggagaaaattctgttccacggcgcgcaaatgttgggtgaggcagtggcagatgttcaactggcaacgccgggcgtcgtgcgcggcaagaaaggcgaagtcagcttcggggatattgctcataaaggcgaaaccggcaccggctttggttcactggtgggaactggcagttatatcacgcctgatttcgccttcccgtatggcgcaaacttcgctgaagttgccgtcaacacgcgtacgggtgaaatccgcctggataaattctacgccttgctggactgcggtacaccggtcaacccggaattagcattgggacaaatctacggtgctaccctgcgagctatcggccacagtatgagcgaagagatcatttatgacgccgaaggtcacccgttaacgcgtgatttacgcagttacggcgcaccgaaaattggtgacattccgcgtgatttccgcgctgtgctggtgccgagcgacgataaagtcggcccgttcggggcgaaatcgatctcggaaatcggtgtaaatggcgcagctccggcgattgctaccgcaattcacgatgcatgcggcatctggttacgcgaatggcatttcacaccggagaaaatactcactgcgctggaaaaaatataaataataaatggccgcttcggcggcctgtttctctgtttggacgatgactaaatagtgactgcgaaaatgagataagccgttctcaaggcgtcctgcgccccaaattcgtgggaatttattttactaattcagatgatcaaatttactttaaaaggagtgaagggatgtctgatataaacaatgcaggttctgaccttatatttgaactggaggatcgccctccctttcatcaggctctcgttggtgccattacccatctgttggcaattttcgttccgatggtaacccccgcgttaatcgtgggggcggccttacagctttccgctgaaacaactgcctatcttgtttctatggcgatgatcgcctctggtattggtacctggttacaagtaaaccgctacggcatcgtcggttctggcctactctcaattcagtcagtcaatttttcatttgttacggtcatgattgcgctgggcagcagcatgaaaagcgacggttttcacgaagagttaatcatgtcgtcgcttctcggcgtctccttcgttggcgcatttctggttgtcggatcttcatttatcttgccctatttacgtcgggttattacgcctaccgtcagcggtattgtggtactgatgatcggcttaagcctgattaaagtcggcattatcgattttggtggaggatttgcagccaaaagcagcggtacgttcggcaattacgaacatctcggcgttggtttattggttttaattgtggtgatcggctttaactgctgtcgcagtccgttgctacgcatgggagggatcgccattgggctatgtgtcggctatatcgcatcgttatgcctgggcatggtggatttcagcagtatgcgcaatttgccgttaatcaccatcccgcatccgttcaaatacggctttagttttagcttccatcagttcctggtggttggcacgatttatctgcttagcgtgctggaagcagtcggcgatatcaccgccacggcaatggtttcccgccgacccattcagggagaagagtatcagtcccgactgaaaggcggcgtgctggcagacggtctggtttctgttatcgcctccgctgtcgggtcattacccttaaccacgtttgcgcaaaataatggggttattcagatgactggcgtcgcttcacgttatgtcgggcgaaccatcgcggtaatgctggttatcctcggtttgtttccgatgattggcggcttcttcacgaccattccctcggcagttctgggaggcgcaatgacgttgatgttttccatgattgccatcgctgggattcgcataatcatcaccaacggtttaaagcgccgagaaacacttattgtcgccacttctttaggtttaggacttggcgtctcctacgatcccgaaatttttaaaatattgccagcctctatttatgtactagttgaaaaccctatttgtgctggcgggttaactgcgattttattaaatattatcctccctggtggctaccgacaggaaaacgttctgcctggtattacctcagcggaagagatggattaacagtaaaggagtcaatgatgtcaggagaacacacgttgaaagcggtacgaggcagttttattgatgtcacccgtacggtcgataacccggaagagattgcctctgcgctgcggtttattgaggatggtttattactcattaaacagggaaaagtggaatggtttggcgaatgggaagacggaaagcatcaaattcctgacactattcgcgtgcgcgactatcgcggcaaactgatagtaccgggctttgtcgatacacatatccattatccgcaaagtgaaatggtgggggcctatggtgaacaattgctggagtggttgaataaacacaccttccctactgaacgtcgttatgaggatttagagtacgcccgcgaaatgtcggcattcttcatcaagcagcttttacgtaacggaaccaccacggcgctggtgtttggcactgttcatccgcaatctgttgatgcgctgtttgaagccgccagtcatatcaatatgcgtatgattgccggtaaggtgatgatggaccgcaacgcaccggattatctgctcgacactgccgaaagcagctatcaccaaagcaaagaactgattgaacgctggcacaaaaatggtcgtctgctatatgcgattacgccacgcttcgccccgacctcatctcctgaacagatggcgatggcgcaacgcctgaaagaagaatatccggatacgtgggtacatacccatctctgtgaaaacaaagatgaaattgcctgggtgaaatcgctttatcctgaccatgatggttatctggatgtttaccatcagtacggcctgaccggtaaaaactgtgtctttgctcactgcgtccatctcgaagaaaaagagtgggatcgtctcagcgaaaccaaatccagcattgctttctgtccgacctccaacctttacctcggcagcggcttattcaacttgaaaaaagcatggcagaagaaagttaaagtgggcatgggaacggatatcggtgccggaaccactttcaacatgctgcaaacgctgaacgaagcctacaaagtattgcaattacaaggctatcgcctctcggcatatgaagcgttttacctggccacgctcggcggagcgaaatctctgggccttgacgatttgattggcaactttttacctggcaaagaggctgatttcgtggtgatggaacccaccgccactccgctacagcagctgcgctatgacaactctgtttctttagtcgacaaattgttcgtgatgatgacgttgggcgatgaccgttcgatctaccgcacctacgttgatggtcgtctggtgtacgaacgcaactaataataaaactttaacatcctcgtgaggacatcattatgtctggagacatcctacaaacaccggacgcaccaaagccacagggcgcgctggataattattttaaaattaccgctcgtggcagtaccgttcgtcaggaagtactggctggcttaacgacctttctggccatggtttattccgttatcgtcgttccgggaatgctgggcaaagcaggttttcctcccgcagctgtgtttgttgccacctgtctggtcgcgggcttcggctcgttgctgatggggttgtgggccaatttgccaatggcgattggttgtgcgatttccttgacggcatttaccgcattcagtttggtactcgggcaacaaattagcgttcctgtcgcactgggcgcggtctttctgatgggcgtcatcttcaccgctatttccgtaaccggtgtgcgtacctggatcttacgtaatttaccgatgggtatcgctcacggtacaggtatcggtatcggcctgtttctgctgctgattgctgctaacggtgtgggtatggttatcaaaaacccgattgaaggcttgccagtggcgctcggtgcgtttacctccttcccggtgatgatgagcttgctggggctggcggtcatcttcggtctggagaagtgccgcgtacccggcgggatcttgttggtgattatcgcaatttcgattatcggcttaatctttgacccagcggtgaaataccacggtctggtggcgatgccaagtctgactggcgaagatggtaagtctctgattttcagcctcgatattatgggcgcactccagccaaccgtacttccgagtgtactggcattggtgatgaccgcagtgttcgacgccactggcaccatccgtgccgtcgccggtcaggcgaatttgttggataaagacaaccagatcatcaatggcggcaaagccctgaccagtgactcagtaagttcaatattctccggtctggtgggcgcagcgcccgcagcggtttatatcgaatcagcggcaggaaccgccgccgggggtaaaacagggttgaccgcaaccgtagtgggggcgttattcctgctgattctgttcttatcaccgctgtcatttttgatccctggttacgccactgcacccgctctgatgtacgtgggtttgctgatgttaagtaacgtctcgaagctggatttcaacgattttattgacgcaatggctggcctggtgtgtgccgtgttcatcgttctgacttgtaatatcgttaccggtattatgctgggctttgtgacactggtcgtaggccgtgtctttgctcgcgaatggcaaaagttgaatattggtacggtgatcattactgccgcactggtcgcattttacgcgggtggttgggcaatctaatagattctccgcgcctttcagcgcggagatttctttcacagaggattctcaccgctggcaacaatacgctgctggcggactcgcctgagttctctttcagtaagcaactgcagcgcctgtgtcgggcaagattcaacacaggctggcccctcttcccgctgttcacagagatcgcatttcacaatttgttgtcgggtatcccccggcaacgactgaatggtgatcattccaaacgggcacgcactgacgcaactctgacagccaatacaacgggcagaattggtctgcaccacctgctcgcccatcgtcagcgcccccacggggcaagcgccaacacaaggggcgttttcacactgatggcacatcaccggcgcactgatgctgtccagtcgctgtaccttcagccggggtaaaaagacatcggcattcaactcctgttctgaagggtgagcgaccacacaggctacttcacaagtacggcagccaatacagtcagccggattaacgataattaacgatttcatcacgatgccttcgtatcaaacagagttaacatatcgcgcgccgcctgccttcctgcggccattgcagtgacaaccagatccgcgccatgaactgcatcaccaccagcaaagacttttttcagatgcgtctgggtaggtaaatacccgacgtcaccggtttgaatcaggccccatttatcgagtttaattccgctgccctgcaaccacggcatggcatgcgcctggaaaccaaaggccataatcagaacatcggcgggcaattcaaactctgaacccgctaccggacgaggacgacggcgaccatccggccccggctcacccatggcggtacgaatcaggcccaccgcagttaaacgcccatcttcgtcacaagcgatatattgcggttgaacattgaactgaaactcgacaccttcctcgcgcgcattaaccacctctttgcgcgagcccggcatactgacttcatcacgacgatacgcgcaggtcacgctggcggcattgaggcggatggaagtccgcaaacaatccattgtcgtatcgccaccgcccaataccacgactcgcttaccttccacgtccgtcagcggatactcttcagactccggcaatcccatgagctggcgggtatgggcagtcaggaacggtagagcctgaatgacaccgggcgcatcttcatgcggcagatctgctcgcatcatcccgtaagtccccacgccgatgaaaactgcatcatattcagaagttaaatcgctaaaggtaatatcgcggccaatttcacagttaagatgaaagtcgattcccattgcggtgaatatctctcgccgctggcttaataccgttttatcgagtttgaaaggaggaatgccaaaagtcagcataccgccaatttctggatggcgatcaaagacatcaacctgaactcccgcgcgcgccagaatatcagcacaccctaaccctgctggcccagcgccaatcaccgccacttttcgctacggggaacaactttgctgacatcgggacgccagcccatcgccagcgcggtatcggtgatgtagcgttccagattaccgatagagactgcgcccgagtgatctttcaaagtacatgcgccttcacaaagacggtcctgtggacataccctgccgcaaatttctggtaaggaactggtctggtggcaaagttctgccgcttcaataatctttccttcctgtaccagacggatgtaatccggaatagcgttatgcagcgggcaatgccagttgcagttagctttttcggcacaataaacacagcggtcactctcataagtcgcttgcagtggatccagcccgcaatatatttcgccaaagtgggttttccgttcactcgctgaaattttatctgcgcctttacgcgagttaacggggagcaacgctgcactgcgagatggctgagcgtctgatgacgcttttcctgctgccgttttgcgctggcgagccacctttatccactgtaaccctttatcgtccatcagtcgtaacgcctgtgttgggcagacttcaatacaggcttgcgtgccggaactgcgctggttacaaaggtcgcatttctgcgcaatcgtatcgaccatctcaacgacgccaaaggggcaagcgattgcgcatcttttacagccaatacatttttgctcgtccagttgtacgctatcggactggaaagtcagagcattaaccggacaagccgtaacgcaaggggcattgttgcagtgatggcaggccaccggattcgcagcctggcctttccctacaacgtggatacgcggtcgaaagtcactgtgactcagcggccagttttcttgattgtgtgccaccgcacaggcaatttcacaagcatgacagcctatacattccgcagcttcagcagcgataaacttattcatttgcatccctttcatttaatgagttatgtcttctcaaatttcgcgatgcaataaacgggcatatattaggtagcatgaccgttttaattataattttgcgactgagttcaaattattgcccctcaatctatgccgctttcattatttcaacattgccgatcaaaagagcgctatccagataaaaacgattaaatgcgagagtgcgacatgccagaatgattaatgaaatatcaatatgagaaaattacagataattccattgtcaggttctcttctcattttcgtggtttaaccacgattatgtgattgcctccgcaattcctgtctctaactccccttcctcgcaaaaactggcactccacgagcatgtgtttagacagtttcattaacgtaaacggttgctttttactctggcgggcgaaaggagaaacactgatgagcgccatagattcccaacttccctcatcttctgggcaagaccgcccaactgatgaggttgaccgcatattatcaccaggaaagctgatcatactcggtctgcaacacgtccttgtcatgtacgcaggtgcagtcgctgttcctcttatgattggtgaccgactgggcctctcaaaagaagctattgcgatgctcattagctcggatctcttttgctgcgggatcgtcacattattgcaatgtatcggtatcggccgctttatggggatccgcctgccggtgattatgtcggtgacctttgctgctgtaacaccaatgatagccattgggatgaacccggatatcggcctgctggggatatttggtgccactatcgccgcgggttttatcaccacattattagcgccacttatcggtcgcttgatgcctttattcccgccactggttaccggtgtggttattacttctattgggcttagcatcattcaggtgggtattgactgggccgccggaggtaaagggaatccgcaatatggtaatcccgtttatttaggtatctcctttgctgtcttaatttttatcttgctcattactcgctatgcgaaaggatttatgtccaacgtcgccgtattactggggattgtatttggctttttactttcgtggatgatgaatgaagtcaatttatccgggctacatgatgcttcatggtttgcgattgtcacgccgatgtcatttggtatgccgattttcgatcccgtttccattctgaccatgactgccgtgttaatcatcgtgtttatcgagtcgatggggatgttcctggcactgggtgaaatagtcggtcgtaaactctcttcacacgatattattcgcgggctgcgtgtcgatggcgtagggacaatgataggcggaacgtttaacagcttcccccacacgtcattttcacaaaacgttggcctggttagcgtgacgcgcgttcatagccgctgggtgtgtatttcttcgggaattatattaatcctgtttggcatggtgccaaaaatggcggtgctggtcgcctccattccgcaatttgtgctgggcggtgctgggctggtgatgttcggcatggtactggcgacagggattcgaattctgtcgcgctgtaactacaccaccaaccgttacaacctctatattgtggcgatcagtctcggcgttggcatgactccgacgctctctcacgatttcttttctaagttaccggccgtactgcaaccgttgctgcatagcggcattatgctcgcaacccttagcgccgttgtgctgaatgtcttctttaatggctatcagcataatgctgacctggtgaaggaatccgtctctgataaagatttaaaagtcaggacagtacgtatgtggcttctgatgcgcaagctgaagaaaaatgagcatggagaataatatgaattttttaatgcgcgctatattcagtctgctgttgctttttactctctctattcctgtcatttctgactgtgttgcaatggccattgaaagtcgcttcaaatatatgatgctacttttttaaatggtttttacctgtcggcatccgctcaaaacgggcggttgtcgataaacgctcacttggttaatcatttcactcttcaattatctataatgatgagtgatcagaattacatgtgagaaattatgcaaacggaacacgtcattttattgaatgcacagggagttcccactggtacgctggaaaagtatgccgcacacacggcagacacccgcttacatctcgcgttctccagttggctgtttaatgccaaaggacaattattagttacccgccgcgcactgagcaaaaaagcgtggcctggcgtgtggactaactcggtttgtgggcacccacaactgggagaaagcaacgaagacgcggtgatccgccgttgccgttatgagcttggcgtggaaattacgcctcctgaatctatctatcctgactttcgctatcgcgccaccgatccgaatggcattgtggaaaatgaagtgtgtccggtatttgccgcacgcaccatcagtgcgttacagatcaacgatgatgaagtgatggattatcaatggtgtgatttagcagatgtattacacggtattgatgccacaccgtgggcgttcagtccgtggatggtgatgcaggcagccaatagtgaagcaagaaaattgttgtctgctttcgcgcagcacaattaaaaaaccccgacatttgccggggttgtgagcataacgtaatgcttattttaccggacgcatcgccgggaacagaataacgtcgcggatggtatggctgttggtgaacagcattaccatacggtcgatgccaatccccagacctgctgtcggcggtaagccatgttccagtgcggtaacgtaatcttcatcgtagaacatcgcttcgtcgtcacctgcgtctttcgcggcaacctgatccaggaagcgttgcgcctgatcttccgcgtcattcagctcgctaaagccgttaccgatttcacgaccaccgatgaagaactcaaagcggtctgtgatttccgggttaatgtcgttacgacgcgccagcggagaaacttctgccggatattcagtaatgaaggtcggctgaatcagatgtgcttctgccacttcttcgaagatctcggtaacgatacggcccagaccccagctcttctcaacgtggataccgatagattcagcaatcgctttcgcagagtcgaagttatccagatccgccatgtcggtttccgggcgatatttcttgatcgcttcacgcatggtcagtttttcgaacggtttaccgaagtccagcgtcacgtcgccgtaggtcacttccgtcttaccgagaatatcctgtgccagagtacggaacagcgattcggtcagctcgatcagatctttgtaatctgcgtaagccatgtagagttccatcatggtgaactctgggttatgacgtacggaaataccttcgttacggaagttacggttgatttcgaatacacgctcgaagccaccgaccaccagacgcttgaggtacagttccggcgcgatacgcaggtacatgtcgagatccagcgcgttatggtgggtgataaacggacgcgcagcggcaccgcctgggatcacctgcatcatcggcgtttcaacttccataaagccgcggttcaccatgaactggcgaataccagagaggatctgcgagcgtactttaaaggtgttacgggattcatcgttagagatgagatccagataacgctgacgatagcgcgcttcctgatcctgcaagccgtggaatttatccggcagcggacgcagtgctttggtcagcagacgcagctcggtacagtggatagacagttcgccggttttggttttgaacagtttacctttcgcgccgaggatgtcgccgaggtcccattttttgaactgctcgttgtaaacgccttccggcagatcgtcacgggcaacgtacagctgaatgcggccacccacatcctgcagggtaacgaaagacgctttacccataatacggcgggtcatcatgcggccagcaacggcgacttcgatgttcagcgcttccagttcttcgttctctttaccgtcgaattctgcgtgcaattggtcagaggtatgatcgcgacggaaatcgttcgggaaggcaatcccctgctcgcgcaggttcgccagcttctcacgacgcgttttcagttcattgttaagatcgactaccgcgtcagcgccctgtgcgtgttgttcagacatgttggttcctcataaccctgctttcaaacttgcttcgataaattgatccaggctgccgtccagcacggcctgcgtgttgcgggtttctaccccggtacgcagatctttaatgcgggagtcatcaaggacataagaacgaatctggctgccccagccgatgtcggatttgttatcttccatcgcctgtttctcggcatttttcttctgcatctccagttcataaagcttcgctttcatctgcttcatggcctggtctttgttcttgtgctgggaacggtcgttctggcattgggtcacgatcccggttgggatgtgggtaatacgcaccgcagattcggtacggttaacgtgctgaccgcccgcgccggacgcgcgataaacgtcaatgcgcagatccgccgggttgatttcgatatcaatatcatcatcaacttccgggtaaacaaacgcagagctgaacgatgtgtggcgacgaccgccggagtcaaacgggcttttacgcaccaggcggtgaacgccagtttctgtacgcagccagccgtaagcgtaatcgccggagattttgatcgtcacggatttaatacccgccacttcaccttccgactcttcgatgatttcagttttgaaaccacgcgattcagcccagcgcagatacatacgctcaagcatgctcgcccagtcctgtgcttccgtaccgccagaccccgcctgaatatcgaggtagcagtcggcgctgtcatattcgccagagaacatacggcggaactcaagctgcgccagtttttcttccagggcgtcgagttcagcaacggcttcgttaaaggtttcttcgtcgtcagcttctacagccagttccagcagaccagaaacatcttccagcccctgtttcatttggtcgagggtgtcgacaacggcttcgagggaggaacgctctttacccagcgcctgtgcgcgttcgggttcgttccagacatccggctgttccagctcggcgtttacttcttccagacgctctttcttggcgtcgtagtcaaagataccccctaagaacgtcggagcgttccgtgaggtcctgaatgcgattatttaccggattaatttcaaacatggtctgatttcttttattgagctagtcaaaatgcggtgataagagcgggattgtacccaatccacgctctttttatagagaagatgacgctaaattggccagatattgtcgatgataatttgcaggctgcggttgccgcgaaactcgttgatatcgagcttataagccagttgcacttcacgcacgccgttatccggccagagggcggtatcgacattaaaagcaataccatccagcagtggaccgccgccgaccggttcgaccatcaccttcaaatgacgttcgcccaccagccgctgttgcagcagacggaaatgaccgtcaaacagcggctccgggaacatctgcccccacgggccagcatcgcgcagcaactgcgccacttccatggtcatttcggccgggcttaacggaccgtctgacaccacttcgccttgcaatagcgaagggtccagccactctgtaaccagttcgccaaaccgttgttgaaagagttcgaatttatcctcttccagcgacaaacccgccgccatcgcatgaccgccaaacttcagtatcatgccagggtagagtgtgtctaatcgctccagtgcatcacgcatatgcagcccctgaatggagcgacctgaacctttcagcgtaccatcacctgctggcgcaaaggcgataaccggacggtgaaaacgctctttgatgcgcgaagccagaataccgacaacgccctgatgccattcggggtgatacattgccagcccgccgggtagcgtgtcgcgacttcgctccagtttctcgcacagggtcagggcttcaacttgcattccttgttcgatctcttttcgcgtctggtttagcgcatcgagttcatttgccagcacgcgcgcttcgccgatgttgtcgcacagcaacagcgccacaccgacggacatatcgtccagtcgcccggcagcattgagacgtggccccagcgcaaaacctaaatcgctggcggcgagtttttgcgcatcgcgatttgccacttccagcagcgctttaatccccggacggcactttccggcacggatgcgactcatcccctgccaggtcagaatgcgattattagcgtccagcggcacgacgtccgccactgttcccagcgcgaccagatccagcagttctgccaggttaggaattgcgatgccacgctcatcaaaccagccctgatcgcgcaaaaaggtgcgcagcgccagcatcagataaaacgccacacccacgcctgccagtgatttcgacgggaaattacagtcgcgcaagttagggttaatgatcgcttccgccgcgggtaatgtttcgcctggcaaatggtgatcggtaacaataaccggaatgcccaacgagcgagcgtgtacaacccccgcatgggaggaaataccgttatccaccgtgacaattaactgcgcgccacgggcatgggcctgatcgaccacttccgggcttaagccgtaaccgtcttcgaaacggtttggtaccaggtagtcgatattgctgcaaccaagcgagcgcatcgccagcacgcttagagccgtgctggtcgcgccgtcggcgtcgaaatcaccgaccacaataatccgcgttccttcgcgaaaagcgttgtaaaggatctcaacggccttttcgacaccgctcagttgctgccagggcaacatacctttaacactgcgttccagttcttgcgcactgcgcacgccccggctggcgtataaacggcgcagcaagggaggcaattcagcgggcaagtctgccgtttcatcgacttcacggcgacgaagttgtatctgttgtttcacgcgaattatttaccgctggtcattttttggtgttcgtcgaggaattctttcatctctttcggcggctggtaacccggaacaagtgtgccattgctcagcacaactgccggagtaccgctaacgccaagctggacgccaagtgcgtaatggtcggcaatatccacgtcgcagctggctggtgcggcgcttttacctgccatcacatcatcaaacgctttgtttttatctttcgcacaccagatagctttcatttctttctctgcatcgctgtccagcccctggcgcgggaaagcaagataacgcacggtgatccccagcgcgttatagtctgccatttgctcatgcagtttgtggcagtaaccacaggtaatatcagtaaacacggtgatgacgtgtttttcctgcggcgctttataaacgatcatctctttttcaagcgcattcaactgctttaacagcatcttattggtgacattgaccggagccgtgccgctaacgtcatacattggcccctgaatgatatgtttaccatcatcggtgatgtacaacacgccgctgttagtcagaactgtcttcatgccagctacgggcgcgggctgaatatcgctgcttttgatgcccattttggctaacgtttgttgaattgccgcgtcatcagcctgagcaaaacctgaaaacgccgctaacaaagtaaacaacataaaacctttcttcataaatcttcccgttcttttcagacatcacgcccgcgggtgatgctgttgatgaagttgccgcagacgctcggtagcgacatgcgtataaatttgcgtggtggagaggtcgctgtggcccagtagcatctgcaccacgcgtaaatccgcaccatgatttaataaatgggtggcaaaagcgtgacgcaatacatgcggtgacagcttttcgctgtcgatacccgccagcacagcataatgtttaatgcggtgccagaaggtctgtcgcgtcatctgctgcgcacgctggctgggaaacaacacgtcaattgacacaccattcagcagccacggacgcccatgttccagataggtttccagccagtaaaccgcctcttcacctaacggtaccaggcgctctttgttgcctttaccaatgacccgcactacgccctgacgcaggctgatatcactcattgtcagtccgaccagttcagagacacgcagcccggtagcatacaacacttcaagcatggctttatcgcgtagctccagtggctgatcaattaatggtgcctgtaataaacgttcgacctgcgcttcgcttaaatcttttggcaaacgctggggcaatttcggtgaagcgagatgcgcactgggatcgtcttcacgaaacttttcgcgataaagatactggaacaatcggcgcactgcactcagcaaacgcgctgagctggtggctttatacccgccctccagccgttctgccagtaatgcctgcaaatcgtcactttgcgccgtcgccagcgtcaacccgcggtgatgcaaccactccaccatcattgacagatcgcgacggtaagcgttcaacgtattttcagccagatttttttccagccacagagcatcaagaaactgctcgatgcgtgccagatcctgtttcacttgcgccccttatggtcactcatttgatccattatgccttattgtgccgtgactaaagcgattctgatacactagctgcaaaagccacagcagaatcgagaagcttacgttatgaatatgggtcttttttacggttccagcacctgttacaccgaaatggcggcagaaaaaatccgcgatattatcggcccagaactggtgaccttacataacctcaaggacgactccccgaaattaatggagcagtacgatgtgctcattctgggtatcccgacctgggattttggtgaaatccaggaagactgggaagccgtctgggatcagctcgacgacctgaaccttgaaggtaaaattgttgcgctgtatgggcttggcgatcaactgggatacggcgagtggttcctcgatgcgctcggtatgctgcatgacaaactctcgaccaaaggcgtgaagttcgtcggctactggccaacggaaggatatgaatttaccagcccgaaaccggtgattgctgacgggcaactgttcgtgggtctggcgctggatgaaactaaccagtatgaccttagcgacgagcgtattcagagctggtgcgagcaaatcctcaacgaaatggcagagcattacgcctgatctcactgacggcttagcgcatatgctttgccgtcatctttatctttgcgtctcttgttgcaacaaaatccgccgtaaatcccgccattcggcttcgtccatgctgtcggctgccagccataaatgttgccgtttaccgccatcagaacgtaaacgcagcatcatgccgctcttaatcatccacggtgctttgacgatgcaccactcctgcccttgccaacgcaaacgcccgtccatcaacaagcgaatttccccctggcgagcattaatacgccgctggctgcgaacgcaatcaaacaccaccagcgaaagtaacaccatccataacggggtgtaactgagtggccagggcatgagtaaaataacagcggcaaccagcccatgaatcagcaaggaaagccactgtgcgcgccaggagacgcgcaaatcagattgccacaggaccacgttcccggttccgtgtctggatgagtcggaccatcatttccagttctgcatcggccggtttaccgtgattcatcagccagttaaacaggtccggatcgtcacattccagcagacgaataaagatgcgtttttcgtcatcgcttaagctgtcgtactcatgttcgaaaaacggcatgattgaaatatcgagttcgcgcataccacggcggcatgcccaatgaatgcgggctttgttgttaatgtccatcttcttcctgtctcacgaaaatccagtacccggctattgtaacgtgtttttcgccttcttttacgggaatatcagtaaacaccatcgcgatcgcgaaattaattcacaacaattcaatggcttcatttttttggaagtcgcctcgcagaaggcacagatcgcgtagtgaaagcacttgcattgcctcatagctcttttaccattagtcattaatacgccgttaagcaactcaggactctattatggcttttacaccttttcctccccgtcagcctacggcttctgcccgtttaccgctgacgctgatgacgcttgatgactgggcgcttgccaccattactggcgcggacagcgaaaaatatatgcagggtcaggtgacagcagatgtcagccagatggcagaagatcagcacctgctcgccgcccattgcgacgccaaaggtaaaatgtggagcaatttacgtctgttccgcgacggcgatggctttgcatggattgaacggcgcagcgtgcgtgaaccgcagctgactgaactgaaaaaatatgcggtattctctaaagtgaccatcgcgccagacgacgagcgtgtgctgcttggtgttgccggttttcaggcgcgcgccgcgctggcaaatctctttagtgaactgccttcgaaagaaaaacaggtagttaaagaaggcgcgaccactttgctatggtttgaacacccggcagaacgtttcctgatcgtaaccgatgaagctactgctaatatgctgaccgataaactgcgcggtgaagcggaactgaacaatagccaacagtggctggcattaaacattgaagcgggtttcccggtgattgatgccgccaacagcgggcagtttatcccacaggcgaccaacctccaggcgctgggcggcatcagctttaaaaaaggctgctataccggacaagagatggtggcgcgagcaaaattccgtggtgccaataaacgtgcgctctggttgctggcaggtagcgccagccgactgccggaagctggtgaagacttagagctgaaaatgggcgagaactggcgtcgtaccggtacggtgctggctgcggtaaaactggaagatggtcaggtcgtggtacaggtcgtcatgaataacgatatggaaccggatagcatcttccgcgtacgcgacgatgcgaatacactgcatatcgagccgctgccgtattcgctcgaagagtaaatctctttatcgcatcaggcatttatcgcctgatgcgacgctggcgcgtcttatcagyccwtstayaawccntccagtgcaggagaaaatcggccagttttctctgcctgcagtccgcatgccgtatcgggccttgggttctaacctgttgcgtagatttatgcagcggactgcctttctcccaaagtgataaaccggacagtatcatggaccggttttcccggtaatccgtatttgcaaggttggtttcactatggannnnga

SEQ ID NO: 192 - DNA, 435 bp, Escherichia coli
attatatcggtatcgacaccgctaaagagaaactggatgtcgatgtgttgcgtcctgatggtcgtcatcgcaccaaaaaattcgctaacaccactaaagggcacgatgagctggtgagctggctgaaaggtcacaagattgaccatgcgcatatctgcatcgaagcgaccggcacctatatggaacctgtcgctgagtgcctttacgatgctggctacatagtgtcagtcattaatcctgcgctgggtaaagctttcgctcagagtgaaggactgcgtaacaagactgataccgtggatgcgcgcatgctggcagagttctgtcgtcagaagcgccctgcagcctgggaagcgcctcacccgcttgaacgcgcgttgcgtgccctggtagtccgccaccaggcgctgacagatatgcacacgcaggaactgaatc

SEQ ID NO: 193 - DNA, 98232 bp, Escherichia coli
  modified_base (98201)..(98201): a, c, t, g, unknown or other
  modified_base (98205)..(98206): a, c, t, g, unknown or other
  modified_base (98210)..(98210): a, c, t, g, unknown or other
  modified_base (98219)..(98219): a, c, t, g, unknown or other
gagcattgatgctcaccttctgtggcttgaagcagagctgaagcgtcttgagaagcagataaaagacctgacagacgatgatccggatatgaaacaccgcaggaaactgctggaaagcatcccgggtatcggagagaaaacatctgcggtattgctggcttatatcggtctgaaggaccgcttcgcccatgccagacagttcgccgcttttgcgggtctgacaccacggcgttatgaatcaggtagcagtgtgagaggggcgagccggatgagtaaggccggacatgtgtcgcttcgcagggcgttgtatatgcccgcaatggtagccaccagtaagactgagtggggacgggcgttccgcgaccgtctggcggctaatggcaagaaaggaaaggtgattctcggcgcgatgatgcgcaagctggcacaggtggcgtatggagtgctgaagtcaggcgtgccgttcgatgcgtcacggcataatccggtagcggcgtaaaaatcgcggaagggatgaaaaaaacagcgcctgacggcgctgtgtctggcatgcctgcaatccgggaaaccgsgcctgatgcgacgctggcgcgtcttatcagtatctacaaaggcatacccattacgcctgcccaatatacaaatagatcgccagaaagtggcacacactaccgccgagcacgaagccgtgccagatggcatggttgtatggaatgcgtttgcagacgtagaaaatcaccccgagcgaataaaccacgccgcctaccgccagtaaggtaacgctgcccgccgcgagcttaactgccatttcataaattaccaccagcgacagccagcccatcgccagataggtcaccagagataaaattttgaatcggtgcgcgatggtcagtttaaacagaatacccagcaatgccaggctccagataacaatcatcaacccgcgcgctaacggagaatccagccccaccagcaaaaacggcgtgtaggttccggcaatcaacaggtaaatagcgcaatggtcaaatttcttcagccacatttttgcccgttgatgaggaatggcgtgatagagcgtcgaagcgaggaacagcaggatcatactgccgccatagaggctgtaactggttatcgctgtggcgctggcattgagatccaccgcctgaaccagtagcaacaccagcccaacgataccaaacaccaacccaatgccgtgactgacgctgttggcaatttcctctgccagcgaatatccctgcttaatgaggggcttctgaaccataacttactccggagaaacgtacacgcacatgtatacctctccagcgtaactgagaatagttccagtgaacacctgttagctaaaataaattctgatttgagactaatctcctaaaaatcatgaaattaaatgcgaaatttcaactaacaggcgtgagttcaatttaaagacatttaaattcaatcacataaaactgtgtctgaccgggatagatgtcggcaatgacctttatcagttcagtcagggtcatattttcctgctctgcatgttttccgtcagcgtatccagcgttacggttgaggttgcggtgacttcaatcgtgcaaaaataaccgtcatcttcaaaacgcccgacacgaagcacatcacccgttttgaagtgcgattcagactcgtcgcggatggtgatggttttacgcccagccagaatgtcatcctggaaacgttgaaaaaaagtgatgtcgtttggctgcatggtactatttcctgtaagaattgactcatctggagcctatgatagtgaaaaaactcaccttaccgaaagatttcttatggggcggcgcagttgccgctcatcaggtcgaaggcggctggaacaaaggcggcaaagggccgagcatttgtgacgttctgaccggtggcgcacacggcgtgccgcgcgaaatcaccaaagaagtcttgccaggcaaatactatccaaaccatgaagccgttgatttttatggtcactacaaggaagacatcaagctatttgccgaaatgggcttcaaatgttttcggacttccatcgcctggacgcgtatttttccaaaaggtgatgaagctcagccaaacgaagaagggctgaagttctacgatggtatgttcgatgaactgctgaaatacaacatcgaaccggtgatcaccctctcccactttgaaatgccgctgcatctggtgcagcaatacggtagctggaccaaccgtaaagtggttgatttctttgtccgtttcgcggaagtggtgtttgaacgctataagcataaagtcaaatactggatgaccttcaacgaaattaacaaccagcgtaactggcgtgcaccgctgttcggttactgctgctccggcgtggtttataccgagcatgagaacccggaagagacgatgtatcaggtgctgcatcaccagtttgtcgccagcgccctggcggtgaaagctgcgcgtcgcattaacccggagatgaaagtcggctgtatgctggcgatggtgccgctctatccctactgctgtaacccggacgatgtgatgttcgctcaggagtcgatgcgcgaacgctacgtctttaccgatgtgcagctacgcggctattacccgtcctatgtgttgaacgagtgggagcgtcgcggatttaacatcaaaatggaagacggcgatctcgatgtactgcgtgaaggcacctgcgattatcttggtttcagctattacatgaccaacgcagtgaaggccgaaggcggcaccggcgatgcgatctctggttttgaaggcagcgtaccgaacccgtatgttaaagcgtctgactggggctggcagattgatccagtaggtctgcgctatgccctttgcgaactgtatgagcgttatcagaggccgctgtttattgtcgaaaacggttttggcgcttacgacaaagtggaagaagatggcagcatcaacgacgactaccgcattgactacctgcgcgcccatattgaagagatgaaaaaagcagtgacttacgatggtgtggatctgatgggctacacaccgtggggctgcatcgactgcgtgtcattcactaccgggcagtacagcaaacgctatggctttatctatgtgaataaacatgacgacggtactggcgatatgtcgcgttcacgtaagaagagctttaactggtacaaagaggtgattgccagcaacggcgagaagctttaagtcgatgaagtaccggatgcaatacttgttgcatccggtcagacaacttccctgttttatttcccgcccgccaaatcgataaaacttcccgtgacgtaagaggctttatcacttagtagccagacaatggcctgcgcgacctcttctgcctgtccaccacgctgcatggggatgttcgacttaacgcgatcgacgcgtccaggctcgccgccgctggcgtgcatttcggtataaataaaccctggccgcacgcagttaacgcggatcccctgcgcggcgacttccagcgatagtccggtggttaacgtatcaatcgcccctttcgatgccgcgtaatcaacatattcccctggcgaacccaaccgtgaggccaccgaagagacattgacgatagcgccgccactgccaccatttttaagcgccatgcgttttaccgcctcgcggcagcagagaaaatatcccgtcacgttggtggaaagtactcggttgattcgctctgcggtaaggttttcaacggtgcactgggtaaacaagatcccggcgttattgaccagcgctgctagcggttcatcgtgctgatcgattgctgtaaacatcgcaacgacctggttttcgtcgctgatatccgcctggagcacgaatgctttgccaccggcttgcgttattaagttcatcacttcctgcgccgcgtggaggttttgctgataattaaccgccaccgtatacccttcttgcgccaacagtaatgcagttgcccgcccgatgccgcgactgccaccggtcacaagtgctatagccatttgtttttccgagaaaaattcattcgttgacgtatctttgagattgctaacaaactggctcaatcttcaatgttggcacgcttttccccctcgcctttcagggagagggccggggtgagggtaaatattcgcgccagtgccggcctgttcccctcaccctctccccaaaggggcgaggggactgtctgagcacttttgtactttgtcatctgactaaaaaggcgccgaagcgcctttagaaaatagtcgaatcagtgaattactggtattcgctaatcggtacgcaggagcagaacaggttacggtcgccgtaaacatcatccagacgtttcaccgtcggccagtatttgtctgccacacctgccgggaatactgcaacctcacggctgtacggatgcgcccactcggcgaccagttcgttctgaatgtgcggcgcgttcaccagcgggttatcttccagcggccagacaccggctttaacctggtcgatttctgcgcggatagccagcatcgcgtcgataaagcgatccagttccactttgctttcagattcagtcggttcaaccatcagcgtacccgccaccgggaacgacatggtcggcgcgtggaaaccgtagtcgatcaggcgcttggcaatatccagctcgctgatgccggtttcttctttcagcgggcgaatatcgagaatacattcgtgcgccacgcgaccgtcgcgaccggtatacagcaccgggaaggcatcctgcaggcggctggcaatatagttggcgttgaggattgccacctggcttgcttttttcagcccttctgcgcccatcatgcggatgtacatccagctgattggcaggatagaggcgctaccgaacggtgccgcagaaactgcgccctgacgggttaacatgccttcgatttgcaccacgctatgacccggtacaaacggtgccagatgcgctttcacaccgatcggtcccatacccggaccaccaccgccgtgcggaatgcagaaagttttatgcaggttgaggtgcgaaacgtccgcgccaataaagcccggcgaggtgatgccaacctgggcgttcatgttcgcgccatcaaggtaaacctgaccgccgaactgatgcacgacttcacacacttcacggatcgtttcttcatacacgccgtgggtagaaggataagtcaccatgatacaggagaggttatcgcccgcctgttccgctttcgcgcgcagatcagtcagatcgatgttgccgtttttatcacacgccacaaccaccacctgcattcctgccatatgtgcagaagcggggttagttccgtgcgcagaagccgggatcaggcagatatcgcgatgcccttcgttgcggctttcatgataatgacgaatcgccagcaggcccgcgtattcgccctgtgcgccggagttcggctgcatacaaacggcgtcgtaaccggtcagtttcaccagccagtcagccagctgcgcaatcatctgctgataaccttcagcctgttccggcggacaaaacgggtgcagttcggcaaattccggccaggtgattgggatcatctcggcggcggcgttcagtttcatggtgcaggaacccagcgggatcatcgcctgattcagcgccagatctttacgctccagcgagtgcatatagcgcatcatttcggtttcgctgtggtagcgattaaacaccggatgggtgaggatttcgtcgtcgcgcagcatcgcaggctggatagagcggctgtcgtgagccacgtctttgtccagcgtgtcgatgtccaggccgtggttatcgcccagcagcacgttgaaaagctgcattacgttttcacgcgtggttgtttcatcaagggtgatcccaaccgcgttcagaatatcgctacgcaggttgatttcagccgcttcggcacgcgtcagtacgcccgctttgtcggccacttccacacacaaggtgtcgaaatagtgcgcatggcgcagtttcagacctttttgttgcaggcccgccgccaggatatcggtcagacggtgaatgcggttagcgatacgtttcaggccaatcgggccgtgataaacggcatacaggctggcgatgtttgccagcagcacctgggaagtacaaatgttggagttcgctttctcacggcgaatatgttgctcgcgagtctgcatcgccatgcgcagcgcggtattgccagctgcatctttcgatacaccgataatacggcccggcattgagcgtttgtattcatctttcgccgcaaagaaggccgcgtgtgggccaccgtagcccatcggcacgccgaagcgttgcgccgaaccaaaaacaatatccgcgccctgtttacccggcgcagttaacagcaccagcgccataatatcggcggcgacactgaccacaattttgcgtgatttcagttcgctaataagcgcggtgtagtcgtggatttcaccggttgtgccaacctgctgtaacagcacgccgaagacgtcctgatggtcgagcactttttgcgcgtcatcgacaatcacttcaaaaccaaaggtttcggcacgagtacggaccacatccagcgtttgcggatgcacatcggaagccacgaagaagcggttggcatttttcagtttgctgacgcgtttcgccatcgccattgcttcggcggcagcggtggcctcgtccagaagagaagcagaggccatatccagtccagtcaaatccagcgttacctgctggaagttgagcagtgcttcaaggcggccctgggagacttcaggttgatacggagtgtacgcggtataccagcccggattttccagcatgttacgcaggataaccggcggtagctgcacggcggtgtaacccatgccgatgtaagacgtgaagcgtttattgcgactggcaatagccttgagttctgccagtgcggcgtattcggtcgccggtgcgccaacctgcggcggggtcgcaagctgaatatctttcggcacaatctggccggtcagcgcgtttaacgattgtgcaccaacggcattcagcatttcttgctgttgcgcggcgtccggtccgatatggcgttcaataaaagcgccgctgttttcaagctggcttaacgtctgtgtcatgagcgatggttcctgaaacgtgcagtgaattgtgaacctctctccttacgaagagagtgagggtgaggcataaattttcctcaccctgatcctctcccgcagaagaggaataaagccgttactcgtcttctaacaatgcttcgtatgcggtcgcatccagcagtgattccagttcgctttcatcgctggctttgattttaaagatccagccacctgcatacggttcgctgttcaccagttccggggaatcgctcagtgcgtcgtttaccgccacgatttcaccgcttactggcgcataaatgtctgacgccgcttttactgattcggcaaccgcgcagtcatcgcccgcgctaaccgttgcgcccacttccggcaggtcaacaaacaccatatcgcctaacagctcctgggcatgttcggttataccaacggtgtaagtgccgtcggcttctttacgcagccattcgtgttctttgctgtatttcagttctgctggtacgttgctcatcaatcaatctccaaaaaagtaaatcacgcgacggctttaccgttacgcacaaaaacaggtttcgtcactttaaccggcatttcacggttgcgaatttgcacaatcgccgtttcgccaataccttccggcacgcgtgccagcgcaatgctgtaacccagcgtcggggagaaagtcccgctggtgataatgccttcatgctggttgccctgcgcatcggtaaaacgtaccggcagttcattacgcagcacgcctttttcggtcatcaccagaccaaccagtttttctgtgccatgctcacgctgcacttccagggcttcacgaccgatgaagtcacgatctgccggttcccaggcgatagtccagcccatgttggcggctaaaggagaaatagtttcgtccatctcctgaccataaagattcatgcccgcttccagacgcagcgtgtcacgcgcgcccagaccgcatggcttaacgcccgcttccaccagcgcacgccagaaatcggccgctttttcattgggcagcgcaatttcatagcccgcttcaccggtataaccagtggtggcaataaacagatcgcccgcctgcacgccaaagaacggtttcatcccttccaccgcctgacgctgagcatcattaaacagtgtggcagcttttgcctgcgcattcggcccttgtacggcgatcatggaaaggtcatcacgaacggtaatttcgatgccgaaaggttcagcgtgttgggtaatccaggagaggtctttttcgcgagtggcggagttaacaacgaggcggaagaaatcttcagtaaagtagtagacgatgaggtcatctatcacaccgccagaggcattcaacatccccgagtaaagggctttgccgcttttggtgagcttcgccacatcgttcgccagcagataacgcagaaactcccgggtgcggctgccgcgaagatcgacgatggtcatatgtgacacatcaaacattccggcatcggtacgtaccgcatgatgttcgtcgatttgcgaaccgtaatgcagcggcatcatccagccgtggaaatccaccatgcgagcgccgcaaagcgtgtgttgttcgtacaaaggagtctgttgtgccatcttgtcctcattgaataagcggggctgacaactttttcatggtgaaattatcaccacgaaacccagcatcggagccactcccggtccccaacgcaatcgttctcttttgcctgaacttaccaccgaaacagactgttaaccataaggtaaaattgatcatcacattagcttatggttaaaaaacgccaaaatcgcaacagaataaaaaaccaaaaaatacacaagtttttatataaagatgatgtgatgagaaagttaatttgaataaggcaatattaagagctgaaaaaatgtcaaaaaacactaaatcaaaaattcgtgacattagaaaatataatgcgaaaacggaggtgaaattagtttatttcaaatgaggaaaatctcccggcgaaaaaaccgggagatgaaagtgtgatgggtatcaaataaacagcagaagagaaatttttaacgcagccattcaggcaaatcgtttaatcccattgcctggcggataagttgtggtttaacgccaggaagcgtgtcggccagtttcaaaccaatatcacgcagcagttttttcgccggattggtaccggaaaacagatcgcggaatccctgcataccagccagcatcagcgccgcactgtgcttgcggctacgctcataccggcgcaggtaaatgtactgcccgatgtctttcccctgacgatgcaaccgtttcagttcagcaatcagctctgcagcatccataaagccgagatttactccctgccccgccagcgggtgaatggtatgcgcggcgtcgcccaccagcaccagacggtgcgcggcaaactggcgcgcataacgccccgtcagtgggaacacctgacgcgcgctctcaaccttgcataagcccaggcgattatcaaaagcgatatttaacgcgcgattaaattcatcttcacttgcctgctgcatccgctgcgcttcctctggcgacagtgaccagacaattgagcaaagatgcggatcgctaagcggtaaaaaggccagaatgccttcgccatggaaaacctgccgcgccaccgcatcatgcggttcttccgtgcgaatggtcgctaccagcgcgtgatgctgataatcccagaaagtcagcggaatatctgctttgttgcgcaaccaggaattagcaccgtccgcgccaatcaccagacgcgccgttaacatgctgccatctttcagcgtcaggaaggtttcgttttctccccaggcgacctgctgtaattctgcgggggccaacagagtgatatctgacgactgctgcgctttgttccacagcgcgtagtgaatcactgagttttcaacgatatgcccaagatggctatagcccatgctttgatcgtcaaacgaaatgtgaccaaaactgtctttgtcccacacttccataccgtgataacaactggccctacgagagagaatgtcttgccagacgccaagacgggtgagtaatttttcgctggcggcattgatagccgaaacgcgcagttgtggtggtgcatccgccgccagaggttccggtacgcgctgctccagtacggcaacgcgtaagccgctcccctgtaagccgcaggcaaccgccagccccaccatgccgccaccaacaatggctacatcaacactttgcattgtttattccttaaaaccgccttcaacgcgccacccaaccgagggtgcgctgcgccagcacatcgcgtgccggggtgaataattccatcgtcatcagtccgatgttgcgcccgacaaccagcggtgcccaacggttggcaaaaagatgtaccaggctgtccgtgacgccgatggttgcttcgcgatcgctctgtcgacgctgctgatagcggcacaatatgccgtaatcaccgatgtcttctccgcgctcatgcgcctgagtcagggtttccgcaaggctcatgacatctcgcataccgaggttaaacccttgcccggcaatcgggtgcagagtttgcgccgcattgcccaccagcacggtacgatgggtaatagctctggcggcgcgggttaacgccagcggataagcactgcgtttaccggcgtgggtaatttttccaagtcgccagccaaaggccgactggagttcacggcaaaacttctcgtcgctccacgacagcacctcttcgcgccgttccagtggatgacaccagaccagcgaacagcgtccgtcagacatcggcaacatcgccagcgggccatgttgcgtgaagcgttcaaaagcgcggccttcgtgcgcaacggaagtcgcaacgttggcaatcacggccagttgttcgtaaggctcctgctgccagtcaacgccgcacgcggtggctaacgctgaatgggtgccatcagctgctaccagcacgcggcccgtcagcgtctcgccactctccagcgtcacttcaacgtgactctgagtacgggcaacgttagccacgcgatcagggcaatgcagcgttacgccaggtgctttacgcagcaatgcaaacagccgttgcccgacattgtgcaattcgacaacctgtcccagcgccgccagttggtaatcttctgcggcgagggtgacaaatccagcgtgaccacgatcgctgacatgcacggtagtgatggcggttgcgtaatccgccagagattgccagacgccgatgcgcgccagttgctgacaggtccccgcagccagcgcaatagctcgtccatcaaagcccggatgagcatgtgactctggcgcggtcgcttcaatcaaatgtaccggcagcgccccgtgacttaaccgggaaatagccagcgccagcgtcgcgcccgccatgccgccaccgacgatgattacgctcattgctttctcgcagctgccatcaacgcttcgatttcttccggctttttcaccacgctggcggtgaggttttcgttgccggtttcggtaatcacaatgtcgtcttcaatacgaatgccgataccgcgatattgttctggcacatccgcatccggcgcgatatacagaccaggctctacggtcagtaccatccccggttccagaatgcgcgagcgatcctgaccataaacgccaacgtcatggacatccagtcctaaccagtggctaaggccatgcataaagaaaggacgatgggcgttctgagcgatcagttcatcaacatcacctttcaggatgccgagttttaccaggccgctaaccatgatgcgcaccacttcaccagtgacttccagaatggaagttcccggacgatacaggcgcaggctggtttcgagagactccagcacaatgtcgtagatttcacgctgggcctgggtgaatttgccgttgaccgggaaggtgcgggtaatatcgcccgcgtaacctttgtattcacaacccgcgtcaatcaacaccaggtcaccgtcgcgcagttcactctcgttttcggtgtagtgcagaatgcagccgttttcaccgctgccgacaatggtgttataggacggatagcgcgcaccgtggcggttaaattcgtggtgaatttcgccttccagatggtactcgaacattcccggacggcatttttccatcgcccgtgtatgtgccatggcggtgatttctcccgcgcggcggagtacggcaatctcttctggcgatttgaacaggcgcatttcatgaacaacaggacgccagtcgatcatcgttgccggtgcggtgagattttgccgcgaacctttacgcagtttttccagcgcactgttcacgatttcatcagcatatgcatattcgccctgggcatggtaaaccacatccaggccgttaagtagttgataaagttgctgattgatttcgctgaatgccagtgcgcggtcaacgcccagtttctctggcgcggcatcctggcctaagcgacggccaaaccagatctccgccgtcaggtcgcgaacgcggttaaacagaacgctgtggttatgagtgtcatcgcttttaatcagcaccagcaccgcttccggttcgttaaagccggtgaagtaccagaagtcactgttctgacgataggggtattcgctgtcggcgctacgtgttacttctggtgcagcaaaaatcagcgcggcgctgccgggttgcatttgctccaccagggcctgacggcgacgctgaaactcttgccgggatatctcactcataacactctccttacgttttttgtttttagtgtagagtcggtttttgtacttctggcgcggtcggttgcggatgagtaaaggtgtcgtggcataacagcgcggcaacacgaacgtattcgatgatctcttcaagcgacatttcaagctcttcctgatcttcgtcttcgtcgtaacccagttgcgcaatgttacgcagatcgtcgatagcttcaccggtttcgccggtcactttatccagcttcggttgcgtaacgccaagaccaagcaggaagtgattgacccaacctgccaatgcatcagcccgatcgaaaacgctgacatcatcgccatcaggcagataaagctgaaaaaggaagccgtcatcctgcagggcatcgctggtggcagagtgcattttacgcagtgcctgtgccagctcatgaccgaaagccatgccttcgttcgtcaggtcgtgaagtagcggtagccatgagctgtcatcgttaccgccacatatcatcccactgattaaaccatgcatctcagcaggggtcagacccgtcccttgttggttcagatactggttcatttcgttgtaaccaggcatttcgttctgtatagacataagcattcgtcgtcaaagggaggaatattcatgatatgctaccactttgggccctggtggaccagaaaagggcttgtctcttctcatcagggtagctatagtgtcgccccttcgcagaccatgggtctaaagacgaaggcagcgcagtcaatcagcaggaaggtggcatgtctgcacaacccgtcgatatccaaatttttggccgttcactgcgtgtgaactgcccgcctgaccaaagggatgcgttgaatcaggcagcggacgatctgaaccaacggttgcaagatctgaaagaacgcactagagtcacaaatactgaacagttggtcttcattgccgcattgaatatcagctatgagttagcgcaagaaaaagcgaagactcgtgactacgcggcaagtatggaacagcgtattcggatgctgcagcagaccatagaacaagcgttacttgaacaaggtcgcatcaccgaaaaaactaaccaaaactttgaatgacacttttcggtttactgtggtagagtaaccgtgaagacaaaatttctctgagatgttcgcaagcgggccagtcccctgagccgatatttcataccacaagaatgtggcgctccgcggttggtgagcatgctcggtccgtccgagaagccttaaaactgcgacgacacattcaccttgaaccaagggttcaagggttacagcctgcggcggcatctcggagattcccttcttatctggcaccagccatgacgcaactaccagaactcccactgacattatcccgacaagaaatccgcaaaatgattcggcaacgtcgtcgtgcgttaacgccggaacaacagcaggaaatgggtcaacaagccgctacccggatgatgacttatcccccggtggtgatggcgcatacggtcgctgtattcctctcttttgatggtgaactcgacacccagccgctaatagaacaactctggcgcgccggtaagcgcgtatatcttccagttttgcatccctttagtgccggtaatttgctgttcctgaattaccatccgcaaagcgaactggtgatgaacaggttgaagatccatgagccaaaactggatgtgcgtgacgtgctacccctttcccgattagacgtgctgatcacaccgctggtcgcctttgatgagtacggtcagcgcctgggaatgggcggtggtttttatgatcggaccttacaaaactggcagcactataaaacgcaaccggtgggttatgcgcatgattgtcagttggtggaaaaactccccgttgaagagtgggatatccctcttcctgcggtggttacaccgtcgaaagtctgggagtggtaagggcgatacacctgcatcgccctgattgacatcgttgattctttaacctaatttagtgagtaagggtaagggaggattgctcctcccctgtgactgactgttaataagctgggaaacttatgagtaacagtacaatcagtatgatggcaagtcgcatcataacccttctccttcaagccctcgcttcggtgagggctttaccgttacagccccatgctgcccagctatcgtaagctctctttaaataaccacaacgcattgatctacctttaaatcttttcttcgagcgtgctcgaaaaaccccatgcaaaacagagataatttttgggaaaaaggatctattacggcagtaaacgtgggcgatgaagtggctatcaaaaagttcggttcagggcgatgcaccccgcatcgccctgattgacatcgttgattctttgacctaatttagtgagtaagggtaagggaggatgactcctcccctgagactgactgttaataagctccgaaacttatcagtaacagtacaatcagtatgatgacaagtcgcatcataacccttctcctttaagccctcgcttcggtgagggctttaccgttacagccccatgctgtcccgccatcgtaaatccccattaaataaacacaacgcattgatctgactttgatttattttctggagcagactcgcaaagtagaatgcgcaacgcggcaacggtgtggagaagggataaaaaaacgggcaagtcagtgacctgcccgttaattttcagagaaggggaattagtacagcagacgggcgcgaatggtacccggaatagctttcattgcctgcagcgctttttcggcaacgtcttcgtcagcttcaatatcaataactacataacccatctgggcggaagtttgtagatattgcgcggcgatgttgacgccctgctcggcgaagattttgttcagcgcagttagcacgcccggacggttttcgtggatgtgcatcagacgacgaccaccatgcagtggcagcgagacttccgggaagttcaccgcagagagcgttgagccattgtcagaatacttgatcaatttacccgcaacttccaggccgatattctcctgcgcttcctgagtcgaaccgccaatgtgtggcgtcagaaggacgttgtcgaattcacacagcggagaggtaaatggatcgctattggtcgccggttccgtcgggaatacgtcgattgccgcccccgccagatgtttgctcgccagcgcatcacacagcgccggaatatccaccacagtaccgcgcgaagcattaatcagcagcgagccgggcttcattagtgaaatttctttcgcgcccatcatatttttggtggacggattctctggtacatgcagactcaccacatcgctcatattcagcaggtcagaaagatgctgtacctgagtggcgttgcccagcggcagtttattttcaatatcataaaagtaaacatacattcccagcgattcagccagaatgcccaattgcgtaccaatatgaccgtagccgatgatacccagctttttgccgcgcgcttcaaaagaacccgccgccagtttgttccacacgccacggtgcgctttagcattggcttccggcacgccgcgcaatagcagcagcagttcgccaatcaccagctccgcaacagagcgcgtatttgagaacggtgcgttaaataccgggatcccgcgctttgccgccgcatccagatcaacctggtttgttccgatacagaaacagccaatagcgaccagtttttctgcggcgttgatcacgtcttcagtcagatgggtacgggatcgcaggccgatgaagtgggcatcgcggatggattcttttaattgttcatcatccagcgcgcctttgtgaaattcgatgttggtgtaaccagctgcacgaaggctttccagcgccttttggtgcacgccttctaccagcagaaacttaatcttgtctttctccagcgatacctttgccatttacccaatcctgtcttttgaaatgttgtgtgcggatttgcgtccgcctttcaacatatcaaaaaataatattgcggcaatatgaacgtttgcgtcgcgatgttgaggaaatatcacgcaaaggtaattcttggatgaatatgctggtttagaagatttatttagagcaatcgacaatagccaggtaaaaacgtgacacatgtcaccaaatttaatgaagagaatttttttaacgggggaggttcccccgtcagatcatttcacaatggttttgacaccgtcaggtgtgccaatcagcgcaacgtccgcgccacggttagcaaacaagccaacagtcaccacgccaggaatcgcatttatggcgttttccatcgctatcgggtcaaggatttccatgccgtggacgtcgaggatcacgttgccattatcggtcaccacgccctgacggtattccggacgaccgcccagtttcaccagctggcgcgccactgcactacgtgccatcgggataacttctactggcagcgggaatttacccagaatatcaacctgcttggaagcgtctgcaatacagataaatttttctgcaaccgaagcaatgattttttcacgggtcagcgccgcgccgccgcctttgatcatttgcatgtggccgttgatttcatctgcgccatcaacgtagatgccaaggctgtcgacttcgttgagatcaaaaacgtgaatgccgaggcttttcagtttttcagtggaagcatctgaactggaaacggccccttcaatctggcctttcattgtaccgagcgcgtcaataaagtgtgcggcggtggaacctgtacctacaccaacaatggtgccgggctgaacatactgaagtgccgcccatcctactgctttttcaattcatcctgcgtcatgatcgtttcgcctgtggtatgaaatttcacacgcattatatacaaaaaaagcgattcagaccccgttggcaagccgcgtggttaactcatccataaaatatcgcgcaatggcgggcatcccctttcgccccgcaaataaagcatacaacggtctgggtatgccgctccacggtgcgaacagaggcaataacgccacgccattcaacataaccagggcgcgaagtcgctaagcgaaatgcaatagcgcaaatccctgatcttttaagctgcgcgtttaaccattgatacaaatgttacccgccgacggctgcggtatatgcaacctgacacaaaattgtgtcatagtgcaggaaaaagcatttaccaggagcagacaacagcaatgaaacgcccggactacagaacattacaggcactggatgcggtgatacgtgaacgaggatttgagcgcgcggcacaaaagctgtgcattacacaatcagccgtctcacagcgcattaagcaactggaaaatatgttcgggcagccgctgttggtgcgtaccgttccgccgcgcccgacggaacaagggcaaaaactgctggcactgctgcgccaggtggagttgctggaagaagagtggctgggcgatgaacaaaccggttcgactccgctgctgctttcactggcggtcaacgccgacagtctggcgacgtggttgcttccggcactggctcctgtgttggctgattcgcctatccgcctcaacttgcaggtagaagatgaaacccgtactcaggaacgtctgcgccgcggcgaagtggtcggcgcggtgagtattcaacatcaggcgctgccgagttgccttgtcgataagctcggtgcgcttgactatctgttcgtcagctcaaaaccgtttgccgaaaaatatttccctaacggcgtaacgcgttcggcattattgaaagcacctgtggtcgcctttgaccatcttgacgatatgcaccaggcctttttgcagcaaaacttcgatctgcctccaggcagcgtgccctgccatatcgttaattcttcagaagcgttcgtgcaacttgctcgccagggcaccacctgctgtatgatcccgcacctgcaaatcgagaaagaactagccagcggtgaactgattgacttaacgccagggctatttcaacgccggatgctctactggcaccgctttgctcctgaaagccgcatgatgcgtaaagtcactgatgcgttgctcgattatggtcacaaagtccttcgtcaggattaatccatcaaataatgcctgatagcacatatcaggcgttatcctcacttctttttgtattccttgaatcacatcacaaaatagacaaatctcaggcggcaaaaaacgacgtctgaatgcattttttttgctggcgacaaacccacgtaaaaagctcaccgtaagcgcaaataccctcattttgattgcgttttacggagcaaataatgtctaacgagcaggagtggcaacagcttgccaacaaggaattgagccgtcgggagaaaactgtcgactcgctggttcagcaaaccgcggaagggatcgccatcaagccgctgtataccgaagccgatctcgataatctggaggtgacaggtacccttcctggtttgccgccctacgttcgtggcccgcgtgccactatgtataccgcccaaccgtggaccatccgtcagtatgctggtttttcaacagcaaaagagtccaacgctttttatcgccgtaacctggccgccgggcaaaaaggtctttccgttgcgtttgaccttgccacccaccgtggctacgactccgataacccacgcgtggcgggtgacgtcggcaaagcgggcgtcgctatcgacaccgtggaagatatgaaagtcctgttcgaccagatcccgctggataaaatgtcggtttcgatgaccatgaatggcgcagtgctaccagtactggcgttttatatcgtcgccgcagaagagcaaggtgttacacctgataaactgaccggcaccattcagaacgatatcctcaaagagtacctctgccgcaacacctatatttacccaccaaaaccgtcaatgcgcattatcgccgacatcatcgcctggtgttccggcaacatgccgcgatttaataccatcagtatcagcggttaccacatgggggaagcgggtgccaactgcgtgtagcaggtagcatttacgctcgctgatgggattgagtacatcaaagcagcaatctctgccggactgaaaattgatgacttcgctcctcgcctgtcgttcttcttcggtatcggcatggatctgtttatgaacgtcgccatgttgcgtgcggcacgttatttatggagcgaagcggtcagtggatttggcgcacaggatccgaaatcactggcgctgcgtacccactgccagacctcaggctggagcctgactgaacaggatccgtataacaacgttatccgcaccaccattgaagcactggctgcgacgctgggcggtactcagtcactgcataccaacgcctttgacgaagcgcttggtttgcctaccgatttctcagcacgcattgcccgcaacacccagatcatcatccaggaagaatcagaactctgccgcaccgtcgatccactggccggatcctattacattgagtcgctgaccgatcaaatcgtcaaacaagccagagctattatccaacagatcgacgaagccggtggcatggcgaaagcgatcgaagcaggtctgccaaaacgaatgatcgaagaggcctcagcgcgcgaacagtcgctgatcgaccagggcaagcgtgtcatcgttggtgtcaacaagtacaaactggatcacgaagacgaaaccgatgtacttgagatcgacaacgtgatggtgcgtaacgagcaaattgcttcgctggaacgcattcgcgccacccgtgatgatgccgccgtaaccgccgcgttgaacgccctgactcacgccgcacagcataacgaaaacctgctggctgccgctgttaatgccgctcgcgttcgcgccaccctgggtgaaatttccgatgcgctggaagtcgctttcgaccgttatctggtgccaagccagtgtgttaccggcgtgattgcgcaaagctatcatcagtctgagaaatcggcctccgagttcgatgccattgttgcgcaaacggagcagttccttgccgacaatggtcgtcgcccgcgcattctgatcgctaagatgggccaggatggacacgatcgcggcgcgaaagtgatcgccagcgcctattccgatctcggtttcgacgtagatttaagcccgatgttctctacacctgaagagatcgcccgcctggccgtagaaaacgacgttcacgtagtgggcgcatcctcactggctgccggtcataaaacgctgatcccggaactggtcgaagcgctgaaaaaatggggacgcgaagatatctgcgtggtcgcgggtggcgtcattccgccgcaggattacgccttcctgcaagagcgcggcgtggcggcgatttatggtccaggtacacctatgctcgacagtgtgcgcgacgtactgaatctgataagccagcatcatgattaatgaagccacgctggcagaaagtattcgccgcttacgtcagggtgagcgtgccacactcgcccaggccatgacgctggtggaaagccgtcacccgcgtcatcaggcactaagtacgcagctgcttgatgccattatgccgtactgcggtaacaccctgcgactgggcgttaccggcacccccggcgcggggaaaagtacctttcttgaggcctttggcatgttgttgattcgagagggattaaaggtcgcggttattgcggtcgatcccagcagcccggtcactggcggtagcattctcggggataaaacccgcatgaatgacctggcgcgtgccgaagcggcgtttattcgcccggtaccatcctccggtcatctgggcggtgccagtcagcgagcgcgggaattaatgctgttatgcgaagcagcgggttatgacgtagtgattgtcgaaacggttggcgtcgggcagtcggaaacagaagtcgcccgcatggtggactgttttatctcgttgcaaattgccggtggcggcgatgatctgcagggcattaaaaaagggctgatggaagtggctgatctgatcgttatcaacaaagacgatggcgataaccataccaatgtcgccattgcccggcatatgtacgagagtgccctgcatattctgcgacgtaaatacgacgaatggcagccacgggttctgacttgtagcgcactggaaaaacgtggaatcgatgagatctggcacgccatcatcgacttcaaaaccgcgctaactgccagtggtcgtttacaacaagtgcggcaacaacaatcggtggaatggctgcgtaagcagaccgaagaagaagtactgaatcacctgttcgcgaatgaagatttcgatcgctattaccgccagacgcttttagcggtcaaaaacaatacgctctcaccgcgcaccggcctgcggcagctcagtgaatttatccagacgcaatattttgattaaaggaatttttatgtcttatcagtatgttaacgttgtcactatcaacaaagtggcggtcattgagtttaactatggccgcaaacttaatgccttaagtaaagtctttattgatgatcttatgcaggcattaagcgatctcaaccggccggaaattcgctgtatcattttgcgcgcgccgagtggatccaaagtcttctccgcaggccacgatattcacgaactgccgtctggcggtcgcgatccgctctcctatgatgatccattgcgtcaaatcacccgcatgatccaaaaattcccgaaaccgatcatttcgatggtggaaggtagtgtttggggtggcgcatttgaaatgatcatgagttccgatctgattatcgccgccagtacctcaaccttctcaatgacgcctgtaaacctcggcgtcccgtataacctggtcggcattcacaacctgacccgcgacgcgggcttccacattgtcaaagaactgatttttaccgcttcgccaatcaccgcccagcgcgcgttggctgtcggcatcctcaaccatgttgtggaagtggaagaactggaagatttcaccttacaaatggcgcaccacatctctgagaaagcgccgttagccattgctgttatcaaagaagagctgcgtgtactgggcgaagcgcacaccatgaactccgatgaatttgaacgtattcaggggatgcgacgcgcggtttatgacagcgaagattaccaggaaggaatgaacgctttcctcgaaaaacgtaaacctaatttcgttggtcattaatccctgcgaacgaaggagtaaaaatggaaactcagtggacaaggatgaccgccgatgaagcggcagaaattatccagcataacgacatggtggcatttagcggctttaccccggcgggttcgccgaaagccctacccaccgcgattgcccgcagagctaacgaacagcatgaggccaaaaagccgtatcaaattcgcctgctgacgggggcgtcaatcagcgccgccgctgacgatgtactttctgacgccgatgctgtttcctggcgtgcgccatatcaaacatcgtccggtttacgtaaaaagatcaatcagggcgcggtgagtttcgttgacctgcatttgagcgaagtggcgcaaatggtcaattacggtttcttcggcgacattgatgttgccgtcattgaagcatcggcactggcaccggatggtcgagtctggttaaccagcgggatcggtaatgcgccgacctggctgctgcgagcgaagaaagtgatcattgaactcaataactatcacgatccgcgcgttgcagaactggcggatattgtgatccctggcgcgccaccgcggcgcaatagcgtgtcgatcttccatgcaatggatcgcgtcggtacccgctatgtgcaaatcgatccgaaaaagattgtcgccgtcgtggaaaccaacttgcccgacgccggtaatatgctggataagcaaaatcccatgtgccagcagattgccgataacgtggtcacgttcttattgcaggaaatggcgcatgggcgtattccgccggaatttctgccgctgcaaagtggcgtgggcaatatcaataatgcggtaatggcgcgtctgggggaaaacccggaaattcctccgtttatgatgtattcggaagtgctacaggaatcggtggtgcatttactggaaaccggcaaaatcagcggggccagcgcctccagcctgacaatctcggccgattccctgcgcaagatttacgacaatatggattactttgccagccgcattgtgttgcgtccgcaggagatttccaataacccgaaaatcatccgtcgtctgggcgtcatcgctctgaacgtcggcctggagtttgatatttacgggcatgccaactcaacgcacgtagccggggtcgatctgatgaacggcatcggcggcagcggtgattttgaacgcaacgcgtatctgtcgatctttatggccccgtcgattgctaaagaaggcaagatctcaaccgtcgtgccaatgtgcagccatgttgatcacagcgaacacagcgtcaaagtgatcatcaccgaacaagggatcgccgatctgcgcggtctttccccgcttcaacgcgcccgcactatcattgataattgtgcacatcctatgtatcgggattatctgcatcgctatctggaaaatgcgcctggcggacatattcaccacgatcttagccacgtcttcgacttacaccgtaatttaattgcaaccggctcgatgctgggttaatgactcgtcccgtcacgatcttcagcaatatgctgaagcatcgtggcggtataacgatgatttctgattgaataaagatattcctgcatatacatcggcctgtgcggcgcatcaaaatatttcagcgttgccggattcaccagtcgccaggcaaaatgcgggatcaccgtcagaaaatgtccgcgctccacggcgctgattttggccataaaactgtagggacgataaataatggttggattgatcccacaaggtcgcatattcgcatcaatcattgcttcgaagttagcccggttttgaaagcgcatttgtagccagggcagctcctgaagcagctcttgctcttgacgctcttcataacggcgagaaacgagaaagcccaatcgcagcggtggtaattcactgatagtcaggttttccagttcctgaactcgtgcagatacatgctgtggggagataataaaatctaactgacggtcaaaaagattatcgataacgccgttttcgctgaactcaactggctgggcggtcacgccttcatacttatctccgagactaatcaactgatcgaaaataattgtcggataagtattatctatgccaatcacaatttctcgtgaacgacgccctgagttatggatttcattatcaatcgcagaaagtcgttgataaaccgggaacagtttttgatacagttcctgaccggctttattgaggctgatattattatctttgcgggtaaatagcgtatagccaatttgttcttccagcgcggcaatgcttttaccaaatggcgaagccgtcatatggattttttctgccgcccgggcaatattattggtttgcgctaataaaatgaaattgcgcatctttttcgaaataaaaatgtccatccccctccccgcatccttgtccgcttaaccgtttcagtcagcctatccttgatgaaaccgcgagcaaagataggtgattacgtcatggttttacagaaaattacagaaaaaggaggcaatatcgggtaaaggcattagcccgacgaatacgtcgggctacaagtattattgtgctgcaggtgttttagcgggttgttgatccacaggttctaactggaagaccacatcgacctgatcatcaaactgaatagcggcctgctcgtaagtttcctgggcagacaccggcgcggcatcggctttcatcatccgcaccattgggctgggctgatagttggaaacatggtagcgcacgctatataccggccccagtttacgatgaaagccgttcgccagttcctgcgcctgatgaatcgcgttatcaatcgctgccttacgcgctttgtctttataggcatccggctgcgccacgcccagcgacacagaacgaatttcgttaagacccgccttcagcgcgccatccagcaaggaattcagtttgtctaactgacggagcgtgacttccaccgttctcacagcgcggtagcctttcaggatacttttaccatcctgataatcataatctggctgggtgcgtaagttcgctgagctgatatcttttttcgcgatctgattgagttcaaggaaggaaatgtattgtgcgacgcgctcatctgcctgtttcttggcagtagcggcatccttcgcggccacgttaacttcaatcgcaagagtggcaatgtctggcaccgcatccacgcttgccgtaccggaggtgacaatatgcggtccatccggcaattcgttagcctgcgctgccatcccgctaatacccattaatgccgccagggcgataactttgaacttcacgttagtctctccgtgttaattgacttgcccaaaattcaggacctctggaggcaagcttagcgcctctgttttatttttccatcagatagcgcctaactgaacaaggcttgtgcatgagcaataccgtctctcgccagctgcaaggctataaaccacatgacacatcccactaccagattgataatgcgctgtgattttgccgtgcgcaggcgcggtgccagccaggctgcgagaatagccagaccaaagaaccacaggaaagaggcgctaattgtcccgagcgcaaaccaacgttttggttcgacgtcaagctgcccgccaaggctgcccagtacaacaaaagtatccaggtaaacatgcggattcagccaggtcactgccaacatggtggcgataattttccatctgccttgcttcaggacttcggcactggctaactcaatattactgctcattgcggttttaaaagcgcccaaaaccataccacagcaagaaggctacgccgccccaggtgaccagcgccagcaaccacggcgactgcatcaataacgcgctgccaccaaaaatcccggcgcaaatcaggaccaaatcgctgatagcacaaagtaaggcaatcataatgtggtactgacgacgaatgccctgattcatcacaaaagcattttgtggaccgagcggtaggatcatagctgcgccaagcgcaagaccttgaaagtaataagaaaacacgttggatattccgaattaagtatctgatgcagagactatatcgcgggattgttattagcggaaattgataatattaattggcaatcagaaaactaataagagagaggccagagagtattatctggcctcagcgttgattacgcagctttgtcttctttcacccgcttaaagttcacatccatttgcgggtacgggaagctgataccggcggcatcaaattcacgtttaatacgctccagcacatcccagtacacgttttgcagatcgccgctgttgctccagacgcggaccacgaaattaatcgacgatgcaccaagttcgttcaggcgcacagtcatttcgcgatctttcaaaatgcgatcttcagactggataatattggtcaggatctgcttaacctgatcgatatcggaatcatacgccacgccaataataaattcgttacggcgaactggctcgcgggagaagttaataatatttccggcaataattttaccgttcggaataacgataattttaccgtctgcagtacgcatggtggtggagaaaatctgcacactcagcacagtaccggctacgccgccgaggtcaacatattctccggcacggaacgggcggaacatgacaagtaacacgccagcggccaggttagaaagtgacccctgcaaagccagaccaacagctaagcctgcggcaccgagtacagcaatgactgacgctgtttgtacacccacgcgtcccagggcagcgattagcgtaaaggcgataataccgtaacggactaatgcagaaagaaaatcagcaacagtggcatcgattttacgggagatcatcaggcgattcaccgcgttggaaatcatccgcgcgataatcaaaccaacgatgatgatcgcgagtgccgccacgatgtttactgcataacttagcagcagcgcctggttagctaccagccagcttcccgcgccgtttatgctatcgacaacattcaaatcttccattcaatattccttttcaactgactcaaaatggagaaatacactccgccgccttatgacgggcagtctgacaagggtaaacaataaagcataattttgccaaatagatcacagatttctcatctgaatcaccttgcttttggcgaaaaaatccccgcagagcggggctcagacagatatcaatgtgcgctttgtcatgccggatgcggcgtgaacgccttatccggcctacaaaaacctgcaaattcaatatattgcaggatacgtgtaggcctgataagcgtagcgcatcaggcaattttgcttttggcgaaaaaaagacccgcagagcgggccttgagataagcagaaaggaatatcttacagaacgtcgatcgcgttcagttcctggaatgctttttccagacgagcgatcatcgaagtctgaccggcacgcagccatacgcgcggatcgtagtatttcttgttcggctgatcttcacctttcgggttacccagctgaccctgcagataagcttcgttcgctttgtagtagttcagaacgccttcccaggttgcccattgggtatcggtatcgatgttcatttttactacgccgtagcttacggagtctttgatttcctgagcagtagaaccggaaccaccgtggaatacgaagttcaggctgttgtgcggcaggttgtgtttcttggaaacatattcctgagaatcacgcaggatggtcggagtcagaaccacgttacccggcttgtaaacaccgtgtacgttaccgaaggacgctgcgatggtgaaacgcgggctgattttgctcagttcggtgtatgcgtaatcaacgtcttccggctgggtgtacagtgcagaagcgtccatgtggctgttgtccacgccgtcttcttcaccaccggtgcaacccagttcgatttccagagtcatgccgattttggacatacgctccaggtatttagagcagatttcgatgttctcttgcagagattcttcagacaggtcgatcatgtgagaagagaacagcggcttgccggtagctgcgaagtgtttttcacccgcgtccagcagaccgtcgatccacggcagcagtttcttcgcgcagtggtcagtgtgcaggataaccggaacaccataatgttcagccatctggtgaacgtgatgcgcaccagagatcgcgcccaggatagcagcaccctgcggaacgtcagatttcacgcctttaccagcgataaaggaagcaccaccgttggagaactgaacgataaccggcgctttaactttagcagcagtttccagtacggcgttgatggagtcagtaccgacgcagtttactgctggcagtgcgaagttgttttcttttgctacctggaaaactttctgtacgtcatcaccagtgattacgccaggttttacgaaatcaaaaatcttagacatgtctcttgtcctgtatcgtcgggccttatactcatcatacttcaagttgcatgtgctgcgtctgcgttcgctcaccccagtcacttacttatgtaagctcctggggattcactctcttgtcgccttcctgcaactcgaattatttagagtatgaaaaaatgcgtgctctaaaagcgcgctgaaacaagggcaggtttccctgccctgtgattttttacttcttagcgcgctcttcgagcatcgctactgcaggcagtactttaccttccacgaattcgaggaatgcgccgccgccagtggagatgtaggagattttgtcagcaatgccgaacaggtcgattgctgccagagtgtcgccgccgccagcgatggagaacgcttcgctgtctgcgatagcgttagccacgatttcagtacctttgcggaagttcgggaattcgaacacgccaaccggaccgttccacagaatggttttcgcattcttcaggatttcagccagttcctgagcggaagcatcaccgatatccaggatctgctcgtcagctttcacatcgttaacagatttcagggtagccggtgcagtttcagagaactcggttgctacgcgaacatcagacggaaccgggatgttgcaggtggtcagcagacgtttagcttcgtcaaccaggtcagcttcgtacagggatttacccacatcgtggccttgtgccgcgataaaggtgttagcgataccaccaccaacaatcagctggtcagcgattttagacagggagtccagaacggtcagtttggtagatactttagaaccaccaacgatagccaccatcgggcgagcaggttctttcagtgctttacccagcgcgtccagttcagctgccagcagcgggcctgcgcacgcaacgtcagcgaatttaccgataccgtgagtagaagcctgcgcgcggtgagcagtaccgaatgcgtccattacgaacacgtcacacagtgcagcgtattttttggacagggtttcgtcgtctttcttctcgcctttgttgaagcgaacgttttccagaacaaccagttcaccttcagcaacgtcaacgccgtcgaggtaatctttaaccagacgaaccgggttagacagtttgtctttcaggtagttaacaaccggcagcagagagaattcttcgttgtactcgccttcggtaggacgacccaggtgggaagttaccatcacttttgcgccttgtttcagggccagttcgatggtcggcagagaagcacggatacgcgcgtcgctggttactttcccgtcttttactggtacgttcagatccgcacggataaatacacgtttcccagcaagatccagatcggtcatcttaattacagacatggtgaatcctctcgttgattctaaaagttttgcagacgctgcttgcgtcttacctgaaagcaacagtagccatagctaacgtcgtgtcgagcattcggttagcaaagccccattcgttatcgcaccagaccaacgttttgatcaggtgtgcgccactgacccgggtttgggtgccatcgacaatggcactgtgcggatcgtggttaaaatctacagagaccaacggcaattccgtatagtcaactataccatgaaatgcaccttgtgctgctttttgcagcaacaggttgacttcattggcttttacaggtttcttcaccgtcacgcttaaatcgattgccgtcacatttatggttggcacacgtaccgcaatcgcttcaaagcgatcgttaaattgcggaaaaaatcgtgtgataccggcggccagtttagtatcgaccggaatgatcgactggctggctgcccgggtgcgacgcaggtcaggatggtatgcatcaataacctgttgatcgtgcatggcggagtgaattgtggtcacagtgccggactcaataccgtacgcatcatctaacaatttgatgacgggaattatgcaattcgtggtacaggaagcgttagaaacgatgcggtgttccgcacgaagttgatcctgattgacgccgtaaacaacggtcgcgtcgagatcgttactgccaggatgtgaaaagagcacttttttggccccggcggcaatatgcgcttcgccatgctcgcgggagccatatacgccggtgcagtcgaggactacatcaacgccaagttcacgccaggggagcgattgcagtgaacgttcatgcaatacgcggatggcgtcatcaccaacaaaaagttgatcgcgttcctgtcgcacttcccatgcaaaacggccatggctggtgtcatatttcaacaaatgcgccatgcccgcagcatccgccagttcgttgattgccaccacggtaatttccgcccggcgtccggattcatacaaagcacgaaccacattacgcccgatgcgaccgaagccatttatcgctacgcgtacggtcatagatctcctgcaaggttttccctgagcaaatttgccagacagagtaatccagcaaatcgtccggggaaaccttacctgtcgcaaactgcgactgattggttaattgtcgaacatttaatcgactgaaacgcttcagctaggataagcgaaacgtggaataaaaggaatgattgtccagtcaaagaaagcaattatctgacttacgtcacgttttcagccccgcccctgtggaatttattccactttgcagaatcacgaataagcgtagcaaaatcttttcgttgtgccgtcacaaaccctgacttatatcagaatatgactgatgcagcgtcgatattatccgcaatacgtccgagtttcggagtactccaatgatgacattgccctacccatattcttcctccgcacgcttttacgcactgcgcctcctccccgggcaggaagttttttcccagctacacgcttttgcacagcagcatcaacttcatgccgcctggattgcaggctgtaccggtagcctgactgacgtcgccttgcgctatgccgggcaagaaggcaccacgctcctgaacggtacattcgaagtgatctcactaaacggcacgctggaacagagtggtgagcatcttcatctctgcgtttccgatccacacggcacgatgcttggcggtcatatgatgcccggctgtaccgtgcggaccacgcttgaactagtgatcggtagccttgaggaactggcgtttagccgccaaccttgcgcgctttctggttacgacgagttgcatatttcccccgttaaataactactttcaaagaggttttcttatggcgcgtagccacttttccagtcaggcactggtgttgatcgttatatctatcgccatcaatatgatcggcgggcaactggccagcatggtcaaattacctatatttctcgactccatcggcacacttattagcgcggtactgcttggtccggtgatcggaatgctgaccggcttactgaccaatttactctggggattgctgaccgacccgatcgccgccgcatttgcacccgtcgcgatggtcatcggcctggtcgccggttggctggcgcgagcgggttggtttcgcaccctgccaaaagtcgttgtcagcggcgtgattattacgcttgcggtaacggtcgtcgctgtaccgctgcgtactgcgctgttcggcggtgtcaccggtagcggagccgatttgttcgttgcctggatgcactcgatggggcaaaacctggtggagtcggtggcgattacggtgataggcgcgaacctggtcgataaaattcttacagcggtgattgtctggcttttactgcgccagctgccgattcgcaccacgcgccattttccggcaatggctgccgtgcgctaaatgcatccatttacctcattaacactgtgggcattggcggcctgcaccacgcttatcctgcccgcgcagaccattttgccgatctatagcgcggcgacctttttctgccttattgcgctaaaggccacgcgacggcgggcaaaatatgtcgtctggctgatgttctcgctgggagccgggctgtggctggtacacggtggctggctaccagaatggctaagcggcacgccacgctcgccagaacggtggtcgcatgctattacgctctggttgcggattctggcgattgtttcaacctcacagttgtggatgcagtacgtccccgtgcaatgttttattcgcgctctgtttgcttctcgcctgccgccaggcgtcgcttatctgtttgccgggccgttattggtcgttgagcagttaaaacggcaattagcgattattcatgaagcgcagcgtgcccgtggcgtgccgctggatgagggctggtatcagcgtttacgtgcgatgcccgcgttaattattccgctaacacacaatgcgctaaacgatctggctatccgtggtgcggcgctggatatgcgggcatttcggatccacaaccgacgaacaacgttgtgggcaccagccgatagcaccctacaacgcgtagcgcgttacaccatgatcttgctgatgctgacagaattcggagcgtggatatggttacgttagaacagttccgttattgcccgacacactcaacgcatcctccgttctgttatgactttcactatgtcaaaccggggatggtcgccatctttggtgacaacggcagtggcaaaagtacgctggcacagctgatggcgggctggtatccggactttctgccaggagagataacaggcacggggacgctcctcggtacgcccattgggcatctcccgcttaatgaacaatccgccaccatccagctcgtccagcaatcgccctatttgcagctctccggctgtacctttagcgtggaagaagaagttgcctttgggccagaaaatctgtgtcttgctgaagcagagattatggcgcggattgatgccgccctgactctgaccgagtgccagccgttgcgccatcgtcacccggcaacactctccggtggagagacacagcgcgtggtcatcgcctgcgccatcgcgatgcagccaaagctcttaattcttgatgaagcctttagccgcctgactccgcaggccagcgaaatgctgttgcagcgcttacaacactgggcgtttgaacgtggttcgctgattattctttttgaacgtcatcgcacacctttcctgaactactgccagcaagcgtggcaattgcaaaacggagcgctccagccactatgttaacgttaaataagatatcttatcgctggcctggcgcggcaacggattgtctttgcgacatttctctgcaactcaaacaaggtgaatggttggcgctgaccggcgacaatggcgcgggaaaatcgacgctgttacgagtaatggcaggtcttcttacgcccacagccggtacggttatgctgcaacaacaggcgatgaaaaacctgaaaaaccgccagcgcgcggcaaaggttggcgtactgtttcaggaagcggaaaaccaactttttcacagcaccgtcgctgacgagatcgcatttggtttgaaactgcaaaaatgcccggcggatgaaatcactcaacgtacccatgctgccctgcaatgttgtcagttagcagacactgccaacgcgcacccgttggatctgcatagtgcgcagcgacggatggtcgccgtcgcctgcctggaagcactctctccgccactattgctgctggacgagccgagtcgggattttgacgaaaattggttgagcgtgtttgaaagctggctggagaagtgccgccagcgaggcacgagcgtcgtagcaatcagtcatgacgccgcatttacccggcgtcatttctctcgtgtggtgcgactggaagatggtctaatcaggaacgttaatccaccagacgatattcacccgtagcggtcatcattaaggtcaaatttgcaggcagactctcttccagcacccggcgaacattcggcccgtcggtacggtcataaaaagcttctgcgtctgccagcgatacccctcccgccagcttgcgccctaccagtcgttcccgcaacgcagtagctggcgcgttgataaagatcgagaaatcacaaaattgcgcaagctggcaccacttctcgtcgtccagcaacaaccagtttccttcgacgatgacgagtggtgcggtaacgtgcaacgcatcttcaacaggatcatgcttttgtcgatcatactgcggccacgtacaatccccttccactacctggcacagattttccgccagtttcgcaacgtcaaatgtctctggtgcgcctttgaaggggcgcaattgatgcgcatccagccagctattgtaatggtgaaaaccatccatcgggagcgtctggatagcgggtaattcagggtcttgttgcgcgagatattcccagaaggtagttaaggtagatttacccgtccccggcggagcgcaaagaaaaaccaccgtacgtcgctgcggacttaccgtctgtaaggccgccagcatacgcagcaacggtttatgcacgcgttctatctcttcatcatggtactgcgcttgcacgttcagcccattcaccgttaattcaattttcacggcgttaattcctttaaggtggtcgttactgccagcgtcagcgccgttttgaccattccgctaaaacgcgcctctgaccagacggcgaaatcggcgaacttcatcgcttttaacgcgtcatagagcgtcgcattgcaggttatgctattgacgttgctgataaaatcccaggtcatgtcatcggcaaatccgggcgtttcatcctgttcgttcaggtaatgccagtactgggaaaagtgcgtgatatcggcatacagccatttatccattttccccagcgcataaatcaaacgcagcgcaacatcaatatcgtcaagcgggccgctttgggcgagtaacggcttcactgcatattcgacgatctcttcatcgttatcgacaaacagcgacggcagaaactggcgtatcccctggagcaaaatagaatgcgcagttttcataaatgaaaataaattgtcctgtgcatccagttgctcaagcacatcatcttctgtcagcgtcgccattggtcttccgatagatcaccatcaatgcagggagtctattatattacacgtttggtccgcgccgccgatcagtaatgtctgcgtccgcaccccattcgccgtctgttggataccgttcaccaactcgccgcccgtcacgcccgtagcgctaaagaggatatcgttccccctcaccagttcatcgagcgagtacacacggttaacgtcaacgcccattgccttacaacgcttgcgctcctgctctgcaatctgccgattttccgtgtaatcccctttagcctgacaaaagtcaatcagctcggcctgcatatccccacctaatgctttaacggcacaggcagaaatcacgccttctggcgcaccgccgatggtgtacatcacgtcgtaaggattatcctgccagcaggtcagcacgctggcggcgacatcgccatccggcagagcgaaaaccttcacgcccagctgtgttgcttcttcaatcgcggcactcaggcgcggtttatccagcgtaaccatgcgcagcttgtccagcggtttgcctaacgcccgcgccacgttgcgcaagttgtccgccagaggcaaagacagatcaatcgccccggcagccagtcgattaacaaccagctttttcatatacatatcgggcgcatgtaacaggctatctcgaggggcgaaagccatgaccgccagcgcattgctctgccccatcgctaccatccgcgtgccttcaatcgggtcaaccgcgatatcgacttctggcccatcgcctttgcccacctcttcgccaatccacagcatcggcgcatggtcaatttctccttcgccgataaccactcgtccacgaaaagcgacgtcgtttaatgcctggcgcatcgcggtgaccgccaggccatcaattttatttttgtcgccacatccggtttgcggccaggcagccaacgctgcctgttccgtaacgcgaaataatggccacgccagggacatcattgcgcggcctccccaatatcaacgccaaattgcgccagcagatatttctcggcctgctcattccagatgccgtgcgtttcctcaaccagccgcgccagctctttaaacagcggatcggttttgcctttttcggcaaaatcggcaatggcggtgagcggcatggtcacgccgttataaatgagttttttaccgccagggatatccggcagattgagcacggtatctggcaccgcatccagcccaccgatatgcgtgaccataaaggacggctgcaactgccccgtggcgcttaacgcaatcgcctctttcatgtcgtccgttgaaccgccggatgtaccgacgacgtgcgtgctgttgtaatggacgttgtagaaattaaacggcactttgaagtttttatccgtcggcccggcaaagaagttcagacagccatcttccgccagtaattcgtcagccatctcaacgacagcaggcaccgccgcataaacaaaaatgtcatcgaacccgacatctcctgtcagcgcccgcagcgtctggaccggatcgctcatccctttggtattcacatacaccagctcaatgcctttactggccgccagatccaccggcagcagcttctgcacctgcgccaggcgtttgtcgtcgatatcgaccaccaccacccgtgacggttgtatgccaccgttaatggcgtaatcgatagcgccaatgcccatcggacccgcacacgccagcagtgcaatattgccgccaggtttgacgcccatgcgatgctcataaacatattgcgtggtgtgataattggcatgataagcaccaataatgcagcacataggctctgccagcgacgccgcagcaaaataagagccgtgatacggtaatacgcagcccaaattaatggcgatttcgggaataatcatataggtggcgttaccgccaaaatattcgtagctgtagcctgctgaatatccgcttggtaaccccatcgccggttgcaatacaaaacgctggccttttttatatttgccagtgagatttttacccacttcgacaataaccccggcacattcatgcccggtaatgaccggatgattttctaaatcgtcgggtacgcgtttatgttcactaccgagtaacgccgctttccaggtcgataaacagacgctgtcagaaattacactcactaacagttcattatcggtaatttctggcagttcaaattcgcgcagacggacatcccgcttgccataaatagcagcaactttggttttcatttttacctctgtaatcagtgtttatgttcggcggttaattgattaaataaagtgtcgagttttggatcgccaatatagttattaatcaatatcagcggtttatccgtcacacgtttcacgcgcccttccagactggcgtgagtgacgacgatatcggcatccgcaggcacgttttctatcgcgtaatgttttacttctattgccagccccgctttttccaggcgtttacggaaggtggtcgcgcccatcgcactggagcccatccccgcatcgcaaacaaaggcgatacgcttaaccctgcttaacgagaatgcaccctcttgtttcatcgccttaaccgcattggctgactgagcaaacttatcttcgctctccgtttccaccgttttttccatcttcagtatcagcgaagtaatagcaaaggacaccagggtacctaccgtaacaccggcaattgtcgccaggaacgagcctttcggcgtcagtgccaggtaagcaaagatagaccccggacttgggccagccaccagaccaccgtccagtaagttaaacatccaggtaccagacataccgcccgcaatcatggcaataatagtcagcggcttcatcagcacatatgggaaatacagttcgtggatcccaccgaggaagtgaataatcatcgccccgggcgcagaacgtttactcatccctttaccaaacaaggtaaacgccagcagcagccccaggcccggacctgggttagaggccaccataaagaagatggatttaccgttaaccgaagcctgttgcattcccagcggataatagacgccctgatcgatcgcattattaaggaaaagcactttcgccggttcattgatgactgacagcagaggcagataacccgcatgtaccagcgcctcgatacactctttgacgaaagtattggcaattaacaccgccgggccgatcacttcaaaacccagcagacaaaggagcatccccgcgatacctaatgagaagttattgataaccatctcaaaaccggcaggtatgcgtttttccagtgccttatcgacatattttatgaccaacccaccgagcggccccatgatcattgagccaaggaacatcgggatctctgcgccaacgatcacaccaatagtacctattccgcccatgaccgccccgcgtttaccgccgaccagatgaccaccagtagaaccaatcatcacgggcaataaataggtaatcatcgggccgacaattttggcgaaatgttcattcggcagccaaccggtgggaataaataacgcagttatgaagccccaggcaataaaagcaccaatattggggatgaccattgcagtcaaaaagcccccaaaagcctggacctttgcacgagcagacttgttttccataatattatcctgtagaggagagagtaattatccgcggctgataatgtccgctaattgtttttctgatgatgctgttaagagttgttcgagtatttcttcttcgcacagtaattcacttaacgcctgaatagcgccaatgtgcgaatcggcatcggcagcagagagtccgatgagtaatttaattggttcgtcattccccggaaaataaacaccttgttcaagtaatgtcaaagacatcccggttttaagcgccccacattccggtcgcgcatgaggcattgccacgcctggtgcgagaatataataagggccattgttaatggtggaatctttaattgcctgaatgtaattctcgctgatatagtttttatccagcaatgataccatcgagaaatcgatagcttcctgccaatcttttgctgaatgtataactgagattgatgattctggaaaataatcactaagccgcataaattatccttattttatttttagggtaccgtcaggcggtaaaaataaaatactcgtgcggtttaatgaaagcaattgagcagggaaaccgatgttttgaaaacagtgaattattaatttcttatataacattgagttatagatataacaacaaatgtcaatacgcatatcgtgatgcatattacataattgatatttattgcatataaatatttgtgatctacaacacgctttatctattgcttgtccgcaaacggacatatcaaggtaataaaaaaggtcgccgaagcgacctttttacccgaaatgctaattacagcagttcttttgctttcgcaacaacgttatcaacagtgaagccgaactcttcaaacagcagctctgccggagcagattcaccgaaagtggtcataccgacgatagcaccgttcaggccaacatacttgtaccagtagtcagcaatacccgcttctacagcaacgcgtgcagtaaccgctttcggcagtacggattcacggtaagcagcatcctgcttgtcaaatgcgtcggtagacggcatggacaccacgcgcgctttcacgccttcggcagtcagtttttcgtaggcagcaacagccagttcaacttctgaaccggtagcgatgaaaatcagttccggctgaccggcgcagtctttcagcacataaccaccgcgcgcgatgtttgccagttgctcttcagttcgttcctgctgcgccaggttctgacgggagaggatcagtgcggtcgggccgtcctgacgctcaacaccgtatttccacgcgaccgcggattcaacctggtcacacggacgccatgtagacatgttcggggttacgcgcagagaagcgacctgctctaccggctggtgagtcgggccatcttcgcccagaccgatggagtcgtgggtgtaaaccatcacctgacgctgtttcatcagcgcagccatacgtacggcgttacgtgcgtattccacgaacatcaggaaggtggaggtgtacggcaggaaaccaccgtgcagggagataccgttagcaatcgcggtcataccgaactcgcgaacaccgtagtggatgtagttacccgcagcatcttcgttgattgctttagaaccagaccacagggtcaggttagacggtgccaggtcagcagaaccgccgaggaattccggcaacagcggaccgaaagcttcgatagcattctgagacgctttacggctggcgattttcgccgggttagcctgcagtttagcaatgaactcttttgctttcgcgtcgaagtcagacggcatttcgcctttcatacggcgggtaaattcagcggcttcctgcggataagctttcgcgtaagcagcgaatttctcgttccatgcggattctttcgcctggcctgcttctttcgcatcccactgagcatagatttcagacgggatttcgaacggtgcatatttccagcccagctgttcgcgggtcagggcaatttcagcgtcgcccagcggcgcaccgtgggagtcgtgagtaccggctttgttcggggaaccgaaaccgatgatggttttgcacatcagcagggacggtttgtcagtcactgcgcgcgcttcttctactgcgcgtttgatggatgccgcgtcatgaccgtcgatgtcgcgaataacgtgccagccgtaagcttcgaaacgcattgcggtgtcgtcggtgaaccagccttcaacgtgaccatcaatagagataccgttgtcatcgtagaacgcaatcagtttacccagcttcagcgtacccgccagagagcaaacttcgtgggagatgccttccatcatgcagccgtcgcccatgaaggcataggtgtagtggtcgacaatgtcgtggcccggacggttaaactgcgccgccagcgttttttctgcaatcgccataccgactgcgttggcaataccctgacccagcggaccggtggtggtttccacaccagcggtgtaacccacttccgggtgacccggagttttagagtgcagctgacggaagtttttcagttcttccatcggcagatcgtaaccggtgaggtgcagcaggctgtagatcagcatggagccgtggccgttggacagcacgaagcggtcacggtcagcccaggacggattctgcgggttgtgtttcaggaaatcacgccacaggacttcggcaatgtcagccatacccataggggcacccgggtgaccggatttggctttctgtactgcgtccatgctcagcgcacgaatagcattggcaagctctttacgtgaggacattttgactccagatcggatgatgaagggcacgcccttaacgacttgacgacagcgcgttttgggctacgccggaaaatttgccaacaatttaccgcaagccgcgcgtcatgtacatggaacatccttttgccgcttcagaaatctctggatcatgctcgcatgttgcgcaatctactcgcccgtccgctgcgcttttccttatactgagactgagcgtcgattcacctgcaaacggcgcatttttagaataatcctgaccttgtgcggaagagaaaacatgaaaattcgcgccttattggtagcaatgagcgtggcaacggtactgaccggttgccagaatatggactccaacggactgctttcatcaggagcggaagcttttcaggcttacagtttgagtgatgcgcaggtgaaagccctgagcgatcaggcatgtcaggagatggacagcaaggcgacgattgcgccagccaatagcgaatacgctaaacgtctgacaactattgccaatgcgctaggcaacaatatcaacggtcagccggtgaattacaaagtgtatatggcgaaggatgtgaacgcctttgcaatggctaacggctgtatccgcgtctatagcgggctgatggatatgatgacggataacgaagtcgaagcggtgatcggtcacgagatggggcacgtggcgttaggccatgtgaagaaagggatgcaggtggcgcttggtacaaatgccgtgcgagtagctgcggcctctgcgggcgggattgtcggcagtttatctcaatcacaacttggtgatctgggcgagaaattagtcaattcgcaattctcccagcgccaggaagcagaagccgatgattattcttacgatcttctgcgccaacgcggcatcagcccggcaggtcttgccaccagctttgaaaaactggcgaaactggaagaaggccgccaaagctcaatgtttgacgaccatcctgcatccgccgaacgcgcccagcatattcgcgatcgcatgagcgcggatgggattaagtaaagcctggtggtgtcgaacgtaggtcagataaggcgttcacgccgcatctgacatgaatggcacatttgttaccttgtgcgcattgccggatgcgatgctggcgcatcttatccggcctacgggtgccgaacgtaggtcggataaggcgttcacgccgcatccgacattaatggcacgttttacccgtgcgcatcgcatctggtgcttactcgccctttttcgccgcctgaatatacagcatctccagcgccagcgtcgccgcagccagagcggtgatttccgactgatcatatgccggagccacttccactacgtccatcccaacgatgttgagatctttcaggccgcgtaccagtttaatagcgcgatcggaggtcaggccgccaatcactggcgtaccggtgcctggtgcaaaagcaggatccaggcagtcgatatcaaaggtcaggtaaaccggcatatcacccacaatctgtttcacctgggcgataacgtcatccacgctgcgatcgttcacctggcaggcgtccagcacggtaaagccgttgtctatatcaaactcggtacgaataccaatctgcacggaatgattcgggtcgatcagaccttctttcggcgcggtatagaacatggtgccgtggtcaaattcacaaccgttcgcataggtatcggtgtgggcgtcaaagtgtaccagcgccattttaccgaaatgcttcgcatgagcacgcagcagcggcagcgtaacaaagtggtcaccaccgaaggagagcatacgcttaccggcagccagcagcttctcggcgtgcgcctgcagcttctcgctcatctcacgggcatcgccgaaagcatataccagatcaccgcagtccacgacgttcagacgctcacgcatgtcgaaattccacgggaagcgattgtgttcccaggccagattcgtcgaaacctgacggatcgctgccggaccgtggcgaccaccggcacggccagaggtggccatgtcgaacggcacaccagtaatcacccagtcagcatcgctgtcatacggctggaagttcatcggcaggcgtaaaaaaccaaaggcgttggaaaccagtgagttatcgtattgatgacctaaggtgctcatggatggactcctattacaaagtcgatataaaaaaacccttccgcgtcgttaggcccgacgaggaagggttggatttgcgaaacacaagtttgtgctaattatcgccttaaatgggcgaggcatcaagcgaggttgctatttccgacacggtggcggcgcatagccattgttatctgctggaaaagcttgtccagagcacggtggcagcgcgttttgcgccgggccttgtaattcaaaggcggcaaagccgattaccccggtattacgcacatcgccttgcgccgaattggctgcgtaggaatcaacaacgttggcgaactgaaaagccgcttcggtatgtttatctttgcggaatcctttaatcgctaacgaatctccggcattcacaatatagccgttgttattcagcgaaccttgcttgccgttcagcacatccaggccatcaaccgtagcaacgatctcgtagttggtgttacgactgtaattacgaacatataattgataattcattccgactctggcatggacaatatagcgtggttcattattggatgaatcataaacacgcgtaataggtagagaattaaaattaccatcgcgaatagcatattccagttcgttaatacgaatgctataaacgcggtcgtagccggaaggaacattagtcgaataactaataacgatcatctccgccggatcgcgccaggctcgctcagcagatacgccctgaaccgttgagtgcacatccccaccccaggcggtgccgacattacccgatgcactgctattatactgcgcattactggaacaaccggccagcagcacgattaatgccaccaacgcgctacgtactttccattttttcataaccgttccctctgcatttaattaatgcagcgattgtagggagattatttaataagaaaagcagctaaattatttttaagaatatataaaaagaaagcggaccgatttacgtaaataaatcgacccgccagcagaataatcttaattattcatcttcaagataggtataaccgtacaaacctgcctcgaactcttcaaggaactgttgttgcagttcagcatcaagatcggttttcttcacttgatcacggaactgagttaacagcgttttcggatcgagctgtacatattgcagcatgtccgccacggtatcgccttcgtcagacagttccacttcgacactaccgtcagggaacacgaacacgtcaaccgcttcggtatcaccgaacaggttgtgcatgttgccgaggatctcctgatatgcgccgaccataaagaaaccgagcatcggcggattctctggatcgtactccggcataggcattgtcgtggcaataccgtcaccatcaatatagtggtcgatagcaccgtcagagtcacaggtaatatccagcagcacagcgcggcgttccggcacttgatccagcccttccagcggcagaaccgggaacaactggtcgatcccccacgcatccggcatcgactggaacagcgagaagttgacgtacattttgtccgccatacgttcctgcagctcgtcgataatcggacgatgagcacggttttgcggatccagctgcttttgcacttcatggcacatgctcaaataaagctgctcagcccatgcgcgttcttgcaggctaaaggtgccggaagagtagccgatatgaatgtcgtgcagatccatctgactgtcgtgtaaccattcacgcagagaacggcgagttcccggttcgtgcatctcctgccaggtttcccacatgctttgcagcgcacgcggcgcatcttctgcaggcgcggtcggcaccgtgtattcgttacgttccacgccgatgatattagacaccagcacggtgtgatgcgcagtcactgcacgacccgattcagtgattaccgtcggatgtggcagaccgttttcttcacatgcatcaccaatcgcccagatgatgttgttggcatattcattgaggccgtagttcaccgaacagtcggactgcgaacgagtaccttcataatccacgcccagaccgccgccgacgtcgaagcactgaatattgacgcccagcttgtgcagttccacatagaaacgcgccgattcacgaacgcccgtggcgatatcgcgaatattcgccatctgcgaaccgaggtggaagtgcagtagttgcaggctgtcgagacgcccggcttcacgcagggtttcaaccagttgcagtacctgagtcgcagccaggccgaacttcgatttttccccgccggaggactgccatttacccgagccctgcgaagccagacgtgcacgcacgcccagacgaggaacgacattcagacgttctgcttcatccagcacaatggcgatttctgacatcttctcaatgaccagatagaccttgtggcccatcttctcgccaattaatgccaggcggatatattcgcggtctttataaccgttgcagacgatgacgctacgggtcatgccagcatgcgccagcaccgccatcaactctgctttcgagcctgcttccagccccaacggttcgccagaatgaatcagggactcaatcacgcggcggtgctggttaactttgatcggataaacaaggaagtaatcgccgttatagccgtaggattcccgcgcacgtttgaacgcggcgttaatggaacgcaaacggtgctgcaggatctgtgggaaacagaacagtgcaggcagacgctgaccctgtgcttcacgagttttcactaactgcgcgagatcgacgcgagcttccgggacgtccgggtccgggcacacgctgatgtggcccagctcgttaacgtcatagtagttattgccccaccaggcaatattgtaagtacgcagcatcttgctggcttcctgggagctcattgcaacctcctgcatggagcgtagtacaccgtgttcgcccgctgacgaaggcaaacccatagacatgtcgtcagacatagcgaacctcaaattattttattaagtgtaaaacagttaacgactatcgcagcctggaactgcgataacaacccataagcacatggattttccagcagtgaatgctgacgctccaactgcgcaaccggtttctttttcataacattattaagcacataaccgaacgtaagtgtgacagttcggcgaaaccacgagaaaactcttgtttttacaagagcgcccttgttcagtcctcagtaactgtaaccagctcttgaatcctgagaagcgccgagatgggtataacatcggcaggtatgcaaagcagagatgcagagtgcggggaacgaatcttcaccagaacggtgagacaggttaagcagcagacaacggttcattatttcgtatcacctccacggccgcctgttaagacgaacccacaagccaaaactctgatttcaacccggctggaagtggcaacacgaaagaaacgtcgtgtgctttttatttaagccgcgcgccgcgttttataccccacaatggcagaaaattgcaaaagataaatacgcagaatgccggcattgtcaggaaaaatttccagccacgtttttaacagaatgagacacgattcaaaaaaagtggaaatcgggtgaagaattgacctaaaatagccatccagatgttaatccatccataccgattaacactcagactgccagtgtttttaacttgcagagtcgtggtaggatccgctaccacagaaaatccacacaacagtttgagctaaccaaattctctttaggtgatattaaatatggcaaaacacctttttacgtccgagtccgtctctgaagggcatcctgacaaaattgctgaccaaatctctgatgccgttttagacgcgatcctcgaacaggatccgaaagcacgcgttgcttgcgaaacctacgtaaaaaccggcatggttttagttggcggcgaaatcaccaccagcgcctgggtagacatcgaagagatcacccgtaacaccgttcgcgaaattggctatgtgcattccgacatgggctttgacgctaactcctgtgcggttctgagcgctatcggcaaacagtctcctgacatcaaccagggcgttgaccgtgccgatccgctggaacagggcgcgggtgaccagggtctgatgtttggctacgcaactaatgaaaccgacgtgctgatgccagcacctatcacctatgcacaccgtctggtacagcgtcaggctgaagtgcgtaaaaacggcactctgccgtggctgcgcccggacgcgaaaagccaggtgactttccagtatgacgacggcaaaatcgttggtatcgatgctgtcgtgctttccactcagcactctgaagagatcgaccagaaatcgctgcaagaagcggtaatggaagagatcatcaagccgattctgcccgctgaatggctgacttctgccaccaaattcttcatcaacccgaccggtcgttttgttatcggtggcccgatgggtgactgcggtctgactggtcgtaaaattatcgttgatacctacggcggcatggcacgtcacggtggcggagcattctctggtaaagatccatcaaaagtggaccgttccgctgcgtacgcagcacgttatgttgcaaaaaacatcgttgctgctggcctggccgatcgttgtgaaattcaggtttcctacgcaatcggcgtggctgaaccgacctccatcatggtagaaactttcggtaccgagaaagtgccttctgaacaactgactctgctggtacgtgagttcttcgacctgcgcccatacggtctgattcagatgctggatctgctgcacccgatctacaaagaaaccgcagcatacggtcactttggtcgtgaacatttcccgtgggaaaaaaccgacaaagcgcagctgctgcgcgatgctgccggtctgaagtaatctttcttcacctgctttcaaaggccagcctcgcgctggcctttttcttttacctcaccgcggtggatagcattcacgccgcatccggcaaaaagctgcccgcacaataacatcattcttcctcaacacgttttatcgcaaattatcatcactactgaaaccgattacaccaataacaccagccaaatatttgtaatattttcatattattattcagttttcacagttgttacatttcttttcagtaaagtcttaattgcagataacagcgtttaatctatgatgatataactcaattattttcatgcacttaaaccataactaagataaatgttagtgtaagcgattacactgatgtgatttgcttcacatctttttacgtcgtactcacctatcttaattcacaataaaaaataaccatattggagggcatcatgcctgacgctaaaaaacaggggcggtcaaacaaggcaatgacgtttttcgtctgcttccttgccgctctggcgggattactctttggcctggatatcggtgtaattgctggcgcactgccgtttattgcagatgaattccagattacttcgcatacgcaagaatgggtcgtaagctccatgatgttcggtgcggcagtcggtgcggtgggcagcggctggctctcctttaaactcgggcgcaaaaagagcctgatgatcggcgcaatcctgtttgttgccggttcactgttctctgcggctgcgccaaacgttgaagtactgattctttcccgcgttctgctggggctggcggtgggtgtagcctcttataccgcaccgctgtacctctctgaaattgcgccggaaaaaattcgcggcagtatgatctcgatgtatcagttgatgatcactatcgggatcctcggtgcttatctttctgataccgccttcagctacaccggtgcatggcgctggatgctgggtgtgattatcatcccggcaattttgctgctgattggtgtcttcttcctgccagacagcccacgttggtttgccgccaaacgccgttttgttgatgccgaacgagtgctgctacgcctgcgtgacaccagcgcggaagcgaaacgcgaactggatgaaatccgtgaaagtttgcaggttaaacagagtggctgggcgctgtttaaagagaacagcaacttccgccgcgcggtgttccttggcgtactgttacaggtaatgcagcaattcaccgggatgaacgtcatcatgtattacgcgccgaaaatcttcgaactggcgggttataccaacaccacagagcaaatgtgggggacagtgattgtcggcctgaccaacgtacttgccaccttcatcgcaatcggccttgttgaccgctggggacgtaaaccaacgctaacgctgggcttcctggtgatggctgctggcatgggcgtactcggtacaatgatgcatatcggtattcactctccgtcagcgcagtatttcgccatcgccatgctgctgatgtttattgtcggttttgccatgagtgccggtccgctgatttgggtactgtgctccgaaattcagccgctgaaaggccgcgatttggcatcacctgctccaccgccaccaactggattgccaacatgatcgttggcgcaacgttcctgaccatgctcaacacgctgggtaacgccaacaccttctgggtgtatgcggctctgaacgtactgtttatcctgctgacattgtggctggtaccggaaaccaaacacgtttcgctggaacatattgaacgtaatctgatgaaaggtcgtaaactgcgcgaaatcggcgctcacgattaatctcctcaggcttcctcctgtcacggaggaagccacctcttgcagtcatcttttcttcgctctatcctctgccgctatgaaaacatcccgtctccctatcgccatccaacaggccgttatgcgtcgcctgcgggaaaaactcgcccaggccaacctgaagctagggcgtaactacccggagccaaaactctcttacacccagcgcggaacctccgccggaacggcctggctggaaagctatgaaattcgcctcaatcccgttttgctgttggaaaacagtgaagcctttattgaagaagtggtgccgcacgaactggcacatttgctggtatggaaacatttcggccgcgtagcaccacatggcaaagagtggaagtggatgatggaaagcgtgctgggcgttcccgcccgtcgtacgcatcagttcgaactgcaatccgtgcgtcgcaacaccttcccctaccgctgcaagtgccaggagcatcagcttaccgtacgccgccataatcgcgtagttcgtggcgaggccgtctatcgctgtgttcactgcggtgaacagctggttgcgaaataaccatctgaactatcaggaactttcctgatctggctgattgcataccaaaacaactttcgctacgttgctggctcgttttaacacggagtaagtgatgtaccgttatttgtctattgctgcagtggtactgagcgcagcattttccggcccggcgttggccgaaggtatcaatagtttttctcaggcgaaagccgcggcggtaaaagtccacgctgacgcgcccggtacgttttattgcggatgtaaaattaactggcagggcaaaaaaggcgttgttgatctgcaatcgtgcggctatcaggtgcgcaaaaatgaaaaccgcgccagccgcgtagagtgggaacacgtcgttcccgcctggcagttcggtcaccagcgccagtgctggcaggacggtggacgtaaaaactgcgctaaagatccggtctatcgcaagatggaaagcgatatgcataacctgcagccgtcagtcggtgaggtgaatggcgatcgcggcaactttatgtacagccagtggaatggcggcgaaggccagtacggtcaatgcgccatgaaggtcgatttcaaagaaaaagctgccgaaccaccagcgcgtgcacgcggtgccattgcgcgcacctacttctatatgcgcgaccaatacaacctgacactctctcgccagcaaacgcagctgttcaacgcatggaacaagatgtatccggttaccgactgggagtgcgagcgcgatgaacgcatcgcgaaggtgcaaggcaatcataacccgtatgtgcaacgcgcttgccaggcgcgaaagagctaacctacactagcgggattctttttgttaacccctaccccacgcgtacaaccgcgtggggagacgacgcggatttttaactatgcgtatcccccgcatttatcatcctgaaccactgaccagccattctcacatcgcgctttgcgaagatgccgccaaccatatcgggcgcgtactgcgcatggggccggggcaggcgttgcaattgtttgacggtagcaaccaggtctttgacgccgaaattaccagcgccagcaaaaaaagcgtggaagtgaaggtgctggaaggcaagatcgacgatcgcgaatctccgctgcatattcacctcggtcaggtgatgtcgcgtggtgaaaaaatggaatttacgatccagaaatcgatcgaactcggtgtaagcctcattacgccacttttttctgagcgctgcggcgttaaactggatagtgaacgtctgaacaagaagctccagcagtggcagaagattgcaattgctgcctgtgagcagtgtggtcgtaaccgggtgccggaaatccgcccagcgatggatctggaagcctggtgtgcagagcaggatgaaggactgaaactgaatcttcacccgcgcgccagtaacagcatcaatacgttgccgttaccggttgaacgcgtccgcctgctgattggcccggaaggcggtttatcggcagatgaaattgccatgactgcccgctatcaatttactgatatcctgttgggacctcgcgttttgcgtacagagacaactgcgctcaccgccattaccgcgctacaagtacgatttggcgatttgggctaacggagaagaataatgatcaagctcggcatcgtgatggaccccatcgcaaacatcaacatcaagaaagattccagtttcgctatgttgctggaagcacagcgtcgtggttacgaacttcactatatggagatgggcgatctgtatctgatcaatggcgaagcccgcgcccatacccgcacgctgaacgtgaagcagaactacgaagagtggttttcattcgtcggtgaacaggatctgccgctggccgatctcgatgtgatcctgatgcgtaaagacccgccgtttgataccgagtttatctacgcgacctatattctggaacgtgccgaagagaaagggacgctgatcgttaacaagccgcagagcctgcgcgactgtaacgagaaactgtttaccgcctggttctctgacttaacgccagaaacgctggttacgcgcaataaagcgcagctaaaagcgttctgggagaaacacagcgacatcattcttaagccgctggacggtatgggcggcgcgtcgattttccgcgtgaaagaaggcgatccaaacctcggcgtgattgccgaaaccctgactgagcatggcactcgctactgcatggcgcaaaattacctgccagccattaaagatggcgacaaacgcgtgctggtggtggatggcgagccggtaccgtactgcctggcgcgtattccgcaggggggcgaaacccgtggcaatctggctgccggtggacgcggtgaacctcgtccgctgacggaaagtgactggaaaatcgcccgtcagatcgggccgacgctgaaagaaaaagggctgatttttgttggtctggatatcatcggcgaccgtctgactgaaattaacgtcaccagcccaacctgtattcgtgagattgaagcagagtttccggtgtcgatcaccggaatgttaatggatgccatcgaagcacgtttacagcagcagtaacccaccttagcgagaaggatctcgttgagactctgagtgacagcgcccttctttccacgcatactgggcgctgttgcttttttgaaccaggaaacagaacctctgacaatgaatttacagcatcactttcttattgccatgcctgctctccaggatccgattttccgtcgttccgtggtctacatttgcgaacataataccaatggtgcaatggggatcatcgtcaacaagccgctggaaaatctcaaaattgaagggattctggaaaagctgaagatcacgccggagccgcgtgatgaatcaatccgtctggataaaccggttatgctcggcggtccgctggctgaagatcgcgggtttattttgcatactccgccctccaattttgcttccagcattcgcatttcagacaacacagtgatgaccacttcccgcgatgtgctggaaacgctcggcaccgataaacaaccgtctgacgtattggtggctctgggttatgcctcctgggaaaaaggtcaactggaacaagaaattctcgataacgcgtggctaacggccccggcggatctgaatattctgttcaaaacaccgattgccgaccgctggcgcgaggcggcaaaactgattggtgtggatattctcaccatgcctggtgtggcagggcacgcctgatgagtggaaccttactcgccttcgacttcggtaccaaaagcattggtgtagcggtcggccaacgcattaccggcaccgctcgccctttgcctgcaattaaagcacaggacggtacgccggactggaacattatcgagcgtttactgaaagagtggcagccggacgaaatcatcgtcggtttgccgctgaatatggacggcaccgagcaaccattgactgccagagcgcgtaaatttgccaaccgtattcatggtcgtttcggtgttgaagtaaagctccatgacgaacgtcttagcaccgtggaagcccgttccggtctgtttgaacagggcggctatcgggcgctcaacaaaggcaaagtcgactctgcctctgcggttattattctcgaaagctatttcgagcagggatattaaggcgatctaaaagcctggcggatagtcgttaccgccatcttgccggatgcggcgtgaacgccttatccagcacacatctggcagcggctgtaggtctgataagacgcgttagcgtcgcatcagacatttattgcctttataggccctataaacttgcgcatcgggcatggcaacgtcacaaacgcccttcccccacccgctgctgataactctgctgaaacgttatcatccccacctgctgcccggtttgaataacatgcggtaactggtgggttttcccttcgcgaatcaaattccccaccgcgggagtgttaatcaataattcaaacagcgccacgcgtccttcctgtttatccacttccagcttttgtgacaacacggcccgtaaactacctgccagttgattacgtacgggatctttttcctgcgccggaaatgaatccaccagtcgctcaactgcctgcgcggcaccacgcgtatgtaatgttgccagcaccaaatgcccggtttctgccgccgtcagtgccagacggattgtctcgctgtcacgcagctctccgagcaaaatcacatcaggatcttcccgcaatgcagcccgcaaccccgatgcgaaagtcatacagtgcaaaccaatttcccgctgctggatcaaacatcgctggctggcatagagatattccacaggatcttccagcgtcagaatatgcgcatcggcatgttgattaagatagccaaccatcgccgccagcgtggtagatttgccgctccccgtcgcccccgtcaccagaatcaggccattctcgctcttgagtaattccggcaataccggtggcgcaccaagctgttcgagctgtggacagtgcgaaggtaacaaccgtaatgccagagaaataccttgccgttgcgcgaacgcactgccacgcaaccgctggttttccgccagcgacacggcaaaatccagctggccattttccagcaatattgcccgctgatcgtcatccagccactcccgcagtagctcttcgacgtccggcgcatcaaacggcgcagcttccattctgccgcgaatgcgccatcgtgcgggccaggcgctgcacaggtgtagatccgagacgttatgctttacactaagggccacaatttcttccatattcatactaagatcctcggaaaatgaacgatattgcgcataacctggcacaggtccgggacaaaatctcagcggctgcaacgcgttgcggccgttctccagaagaaattacgctgcttgcagtcagtaaaacaaaacctgcgagcgccatcgcagaagccattgatgccgggcagcgtcaatttggtgaaaactacgttcaggaaggggtggataaaattcgccactttcaggaactgggcgtaacaggattagaatggcattttattggcccgttgcagtctaataaaagccgcctggtggcagagcatttcgactggtgtcataccatcgaccgtttgcgcatcgctacccgcctcaacgatcagcgcccggcagaacttccccctcttaacgtactgattcaaattaatattagtgatgaaaacagtaagtccgggattcaactggcagaactggacgagctggcagctgcggtcgctgaactaccgcgtttacgtctgcgcgggctgatggcaatccctgcacctgagtcagaatatgtaaggcagtttgaagttgcacgccaaatggctgtagcatttgccggactgaaaacgcgctacccgcatatcgacacgctctctctgggaatgtcggacgatatggaagccgccattgcggcaggtagcacgatggttcgtatcggcactgcaatttttggtgcgcgtgattactctaaaaaataaggaattaaaggaacgccatgaatacgttgactttcctgctttcaacggtcattgagctgtataccatggtgctgttattacgcatctggatgcagtgggctcattgtgatttttacaaccccttctcacagtttgtagtgaaggtaacgcagccaattatcgggccactgcgccgcgttattccggcaatgggacccattgacagcgcctcgctgctggttgcctatattctcagttttatcaaagccatcgtgctgtttaaagtggtgaccttcctgccaatcatctggattgctggtttactgattctgctgaaaaccatcggcctgctgattttctgggtcctgctggtgatggcgattatgagctgggtaagccagggtcgtagcccgattgaatacgtgctgattcagctggccgatccgctgctgcgcccgattcgccgcttgctaccggcaatgggtgggattgatttctcgccgatgatcctcgttctgctgctgtatgtcatcaatatgggtgtcgcagaagtattacaggcaaccggaaacatgctgctgccggggctgtggatggcgttatgagtgccgtaacagttaatgatgacggtctggttttacggctctatattcagccgaaagccagccgtgattctattgtcggtttacatggcgacgaagttaaagtcgccattaccgcgccgccggttgacggtcaggccaacagtcatctggtgaagtttctcggtaagcaattccgggttgccaaaagccaggtggtgattgaaaaaggcgaacttggccgccacaaacaaattaaaatcattaatccgcaacaaatcccgccagaaatcgcggcgttaattaattaggtatcctatgcaaaaagttgtcctcgcaaccggcaatgccggtaaagtgcgtgagctggcgtcgctgcttagcgacttcggtcttgatatcgtggcccaaacagacctcggcgtagattccgctgaagaaaccggcctgacctttatcgaaaacgcgattctgaaagcgcgccatgcggcaaaagtgaccggtttaccggcaattgccgacgactctggtctggcggtagatgtgcttggcggcgcgccgggcatttactccgcgcgttattccggtgaagacgcgaccgatctaaagaatctgcaaaaactgctggaaacactgaaagacgtaccggatgaccaacgtcaggcgcgtttccactgcgtgctggtatatctgcgtcacgcggaagatccgactccgctggtatgccacggtagctggccgggcgtgattactcgtgaaccagcgggcactggtggctttggttatgatccaatcttcttcgtaccttccgaagggaaaaccgccgccgaactgacccgcgaagaaaagagcgccatttcccaccgtggtcaggcattgaaactgctgctggacgctttacgtaatggttaaattaccgccgctgagtctctacattcacatcccgtggtgcgtgcagaaatgcccgtactgcgatttcaactctcacgcgttgaaaggagaagtgccgcacgacgattatgttcagcatctgcttaacgatctggacaacgatgtggcttacgctcagggccgtgaagtaaagacaatctttattggcggtggtacgccgagcctgctttccggcccggcgatgcaaacgctgctggacggcgtgcgtgcgcgtttgccgctggcagcggatgcagaaattactatggaagcgaacccaggcacggtagaagcggatcgctttgtcgattatcagcgtgctggtgtgaaccgcatctctattggtgtgcagagttttagcgaagaaaagctgaaacgactcgggcgcattcatggcccgcaagaagcgaaacgagcggcaaagctggcgagcggtttagggttacgtagctttaaccttgatttgatgcatggactaccggatcaatcactggaagaggcgcttggcgatctacgccaggccattgaactgaatccgccgcatctttcctggtatcaactgaccatcgaacccaatacgctgtttggttcgcgaccaccggtgctgccggacgatgacgcgctgtgggatattttcgaacaggggcatcagttattaaccgcagcgggttatcagcaatatgaaacttccgcttacgccaaacccggttatcagtgccagcacaatctcaactactggcgatttggcgactacatcggtattggctgtggcgcgcacggcaaagtgaccttcccggatgggcgcattctgcgtaccaccaaaacgcgtcatccgcgtggttttatgcagggaaggtatctggaaagccagcgtgatgtcgaagccgcagataagccgtttgagttctttatgaatcgcttccgtctgctggaggccgcgccgcgcgtggagtttattgcgtataccgggctttgcgaagatgtgattcgcccacagttagacgaggcgattgcccagggttatctcaccgaatgtgcggattactggcagataacggaacatgggaagctgtttttaaattcgctgctggagctttttctggctgagtaaacttgtattgccggatgcggcgtgaacgccttatccagcctacatgtggcaacggttgtaggtctgataagacgcgcaagcgtcgcatcagacgttgattgccggatgcggggtcaacgccgcatcctgctacaaatcgtgcactatatcaaacttacttaatcaccccattgcgccgcagttgttcggtatcttttttccagcgttcattagcttggttgatatcgtcaattttcatcaaaatcgcgacttttttactatttatttctgaaactttcatcgttaacggatattgccctttttcgagcgttacccagtcatcctgcaatttacggctgagtttttgtgattgcagaaaagtctgtcgccgttgttcgttgatatcgaaatctcgtttctgctgaatcggcacttcataacactcttcactctgtttatgacatgccgcaatcgccggttgataaacctctttgtcatatttaaccgcgaacgcctcgctatcgttctgtttattaaactcatcacgctgttggtgaatttttttaaaggcttcttcgcgggtcatttgcttaccgtttgcatcttttccccaatatgcatccgctgctttctgcgccgccaccatttgcttatcaagcgctttcacttccttttccagcgcaggaatcgagttcttctgggtattcaacgcagattcaagctgactaaagcgataattgaaatcttcgctattcacgatcagatatttattattcgttttgatatcgtcgaccacccgcccacgatcgctggctgccgcctgaaaagagtaaaagttcaccgaccagccagacgcgggcgttcctttactggttaacatcgccgagaattttaccggtttatctttcgtccaggtctgttcgagcagttcgtaatctgccaactgaccgacccaggtatagagatcgtcactggaagagacatcgccttccgctgaccaggtggcctgattacccttagcatcaagattttttaaggtgatagcatcaagcttgagaatgccgtgatactgctttttgaattgatcttttaagatattttcagttggcggttcgccatctgcccaagcattaccagtcatcaacataagcagtgccgtgccaacaatccattgctttttcacccgaaaaacctcacgcggaataatttattccggtgattatcattagggtaatgaaaattggcaatggacgtaagtctgaagtgaaaaagccccggcacgataccggggcgaggtgattagtactgattgaagatctgctggatctgctgcggatctttggtttgcgtcagagccagctgcagcaggacgcgcgctttttgcgggttcagcgtgccagaggcgacgaagccgtatttcgcatcatccacttcagcatcctgagtggtagcacccgtcggtacgcgggaagaacgcactactgcagtgccgtttttcgcggcggttgccagggtgtcgaacacggatttatacaagttaccattacccacaccagcgctaacgatgccatcatagcccgcatctaccagtgctttagccggaagatcggatgcgttagcgtagttataaacgatgccgactttcggcagctcattcagcttagagacatcgaatggcgtatcgctggtgtgcttacgtgccggggtacgttggtagtcaatcttaccgttgtgaatgtatcccagaggaccgtagttaacagacttgaaggtcgctacgtcggtggtgttggttttggtgacatcgcgaccgtccagtacggtgtcgttcatcaccaccagcacgccacgattagcggaggctttatcagctgcggtcactaccgcgttatacaggttgaatggaccgtctgcgctcatggacgtggacgggcgcattgcgccgaccatcaccaccggtttgtcgcatttcaccgtcaggtcgaggaagtaagcggtttcttccatcgtgtcggtaccgtgggtaatgacgaagccgtcggttttatcgcagtcggtgttaatttttttcgccagtgtcagccagacattatcgttcatgtcctgggagccgatattcactacctgctcgcctttaacgttcgcaatgtcttttagttgcggcaccgcattaaccagattttctacgccaactttacccgctgtgtagttagatttggttgcggagtcaccaccaccggcaatggtcccgccggttgctaaaatggtgatattgggtaatgccaatgctgcaccactaaaacccataaccagtgcggcaagtgccgtctttttgaaaaactccatttcattcctccagttacgtgaacgctacgcattatcccttagctctgtatgggaaatttgacgttaaacaatttacaacgtgaatatattttggagatctacaaagttagaggcaggtaacaaaacgaagaattaaacggcataaaaaagtattatgccgtcttaaaatagaggattattttaaattcccgaccagggctttgcggctatcttccagagtcacaacgcggctacaaacatctttgccaaactgctggaaatctttttcctgctttttccactcggtttggattgaggattgcagcccccccaggcttcccagcacattctgtaatgggttaccgccgcttttcagcaccgctttcgcgcccatttcattaatgctgtcctgtaaaattccacccattgcctgattcactaattgctggccttcggcgcgaacctgatcaatggctttatagtgaaacgtcaggccatcgctgcgcgtttcgataatgcggttcatctgctctttcagctgcgcatcaagtttggtcagacggctgcgcattttgctgctttcgcccatctcctgaacgataattttatccagcgcaatacgggctttttcgacgcggcttttcgcgccttcatcaatccacggcagcgtgctgcgtagttcagcctgataatccttcgcctgctcgcgctgggcggcattcagggaatattgcttaccgttatacatcacgttgccgtctggcgtgatcaccagattgccgttttcgcccttcacctgcacggtttgcgggctgacaatcacatcgtcacgcggcgtgacgctgcactggtagtcggcgtgagcggtcattgccgtcactgaaagtgctgccgccagcagcattttgcgcatcatagtcttccctcaagaaaaaatcaggccagcatttgctggccccagattgataacaaagtacgcgttttccatgccggatgcggcgtaaacaccttatcccgcctactcgatcgtgcatctttccaggcatgataagcgtagcgcatcaggcagttttgcatttgtcatcgcccgtatgctttcttagtcccaccaaacgtcgaaaagttcgctggtgcgtacctcatccagtttgcgctcttccagccacttacgcacaatcgcctgatgttcttcggtgcatttgccgatttcctgcatgcagatcagaccttcccaggccagataaccgctgccgtcaaaggccagtttgttcggttcgataacctcgttaataaaatcatcaacggttttatcaatctgttcttccgatgtaccttccgggaatcgccatgccaccgaaaatcctaattcctggaattcgtcgatgtgcatttttttacgcagacgacggctacggttctttgccattatttcaccctctcgaacattaagtcccatactccgtgaccaagacgatgaccacgttgttcaaatttcgtcaccggacgtgatgccggacgcggtacgtaatcattgctctctgacaggtttttataaccgtcaatagaagacatcacttcaagcatatgttccgcataaggttcccagtcggtcgccatatggaatacgccccccagctgcagtttgctttttaccagttcggcaaacggcacctgaacgatacggcgtttattatggcgcgctttgtgccacgggtcagggaaaaagagctgcaccatgcgcaatgaattgtcaggaatcattttatgcagcacttcaaccgcatcgtgacacatcacgcgcaggttgcttaaaccttcttcatgcgcagaagccaggcacgcaccaacgcccggtgaatgcacttcaatgccgaggaagtcctgctcggggcgatctttagccattgccaccagcgacgcccccatgccaaaaccaatctcaagcgtcaccggcgcttcacggccaaaaagcgcggggaaatccagcatatcttcgctgaactcaacgcccatcaccggccagtagttttccagcgcatgttcctggcctttggtcagtcgccctggcggcgcacaaaactacggatacggcgcagtgggcggccgttttcatcaaattccggtgaaatgacgtcgtttttcataaagatttagtcgcttgtgaaagtgttctgaaaacgggcattatccaaagttagttgccggatgcaagcatgataaggccgtggctgcggaaagttccggtttacaccctgccgtcgctgtgctgcaatcttgccccaacaacagtgaattcggtgaccatgcaagcgtcgcaattttcagcccaggttctggactggtacgataaatacgggcgaaaaactctgccctggcaaattgacaagacgccctacaaagtatggctctcagaagtgatgttgcaacaaactcaggttgcgaccgttatcccctattttgaacgctttatggcgcgcttcccgacggtgaccgatctcgccaatgcgccgctcgacgaagttctccacttgtggaccgggcttggctattacgcccgcgcgcgcaatctgcataaagcggcacaacaagtggcgaccttacacggcggtaaattcccggaaacctttgaggaagttgcagcactgccgggcgtcgggcgttccaccgcaggcgcgattctctcgctttctctgggtaagcactttccgattctcgacggtaacgtcaaacgcgtgctggcgcgctgctatgctgtaagcggctggcctgggaaaaaagaggtcgagaataaattatggagtttaagcgagcaggtgacgcccgcggtcggcgtggaacggtttaatcaggcgatgatggatttgggcgcgatgatttgtacgcgctcgaaaccgaaatgttcgctctgtccgctacaaaacggatgtattgccgccgccaacaatagctggtcgctttatccgggcaaaaaaccgaaacagacgctgccggagcgcaccggctactttttgctattacagcacgaagatgaagtattgctggcgcagcgtccgccgagcggattgtggggcggtttatactgtttcccgcagtttgccgacgaagaaagtttgcggcattggctggcgcaacggcagattgctgccgataacctgacgcagctgaccgcgtttcgccataccttcagccatttccacttagatattgtgcctatgtggcttcccgtgtcgtcattcaccggctgcatggatgaaggcaatgcgctctggtataacttagcgcaaccgccgtcagttggcctggcggctcccgtggagcgtttgttacagcagttacgcactggcgcgccggtttagcgcgtgagtcgataaagaggatgatttatgagcagaacgattttttgtactttcctgcaacgtgaagcagaaggtcaggattttcagctgtaccccggcgagctgggaaaacgcatctataacgagatctccaaagaagcctgggcgcagtggcagcacaagcaaaccatgctgattaatgaaaagaaactcaacatgatgaatgccgagcaccgcaagctgcttgagcaggagatggtcaacttcctgttcgagggtaaagaggtgcatatcgagggctatacgccggaagataaaaaataaaaacagtgccggagcacgcctccggcaacttgcataaaaacaaacacaacacgcacccggaatgatgaaaaaatatctcgcgctggctttgattgcgccgttgctcatctcctgttcgacgaccaaaaaaggcgatacctataacgaagcctgggtcaaagataccaacggttttgatattctgatggggcaatttgcccacaatattgagaacatctggggattcaaagaggtggtgatcgccggtcctaaggactacgtgaaatacaccgatcaatatcagacccgcagccacatcaacttcgatgacggtacgattactatcgaaactatcgccgggacagaacctgccgcgcatttgcgccgggcaattatcaaaacgttgctgatgggtgacgatccgagttcggtcgatctctattccgacgttgatgatattacgatttcgaaagaacctttcctttacggtcaggtggtggacaacaccgggcagccgattcgctgggaaggtcgcgcaagcaacttcgcggattatctgctgaaaaaccgtctgcaaagccgcagtaacgggctgcgtatcatctacagcgtcaccattaacatggtaccgaaccaccttgataaacgtgcgcacaaatatctcggcatggtccgccaggcgtcacggaaatatggcgttgatgagtcgctgattctggcaattatgcagaccgaatcttcctttaacccgtatgcggtcagccgttccgatgcgctgggattaatgcaggtggtacaacatactgccgggaaagatgtgttccgctcgcaggggaaatccggcacgccgagccgcagtttcttgtttgatcctgccagcaatattgataccggcaccgcgtatctggcgatgctgaacaatgtttatctcggcggaattgataacccaacatcgcggcgttatgccgtcatcaccgcctataacggcggcgcaggcagcgtgctgcgagtcttttcgaatgataagattcaggctgccaatattattaacaccatgacgccgggcgatgtttatcagacgctgacgacccgccatccctctgcggaatctcgccgttatctttataaagtgaataccgcgcaaaaatcctaccgccgccgataattccattaaccgcccctgacgatgctcaggggcaaaaatgttatccacatcacaatttcgttttgcaaattgggaatgtttgcaattatttgccacaggtaacaaaaaaccagtccgcgaagttgatagaatcccatcatctcgcacggtcaaatgtgctttttcaaacactcatccgcatcacgatgtgaggaaattaacatgaatcttaagctgcagctgaaaatcctctcttttctgcagttctgtctgtggggaagttggctgacgaccctcggctcctatatgtttgttaccctgaagtttgacggtgcttctattggcgcagtttatagctcactgggtatcgccgcggtctttatgcctgcgctgctggggattgtggccgacaaatggttaagtgcgaaatgggtatatgccatttgccacaccattggcgctatcacgctgttcatggcggcacaggtcacgacaccggaggcgatgttccttgtgatattgattaactcgtttgcttatatgccaacgcttgggttaatcaacaccatctcttactatcgcctgcaaaatgccgggatggatatcgttactgacttcccgccaatccgtatctggggcaccatcggctttatcatggcaatgtgggtggtgagcctgtctggcttcgaattaagccacatgcagctgtatattggcgcagcactttccgccattctggttctgtttaccctgactctgccgcatattccggttgctaaacagcaagcgaatcagagctggacaaccctgctgggcctcgatgcattcgcgctgtttaaaaacaagcgtatggcaatcttctttatcttctcaatgctgctgggcgcggaactgcagattaccaacatgttcggtaataccttcctgcacagcttcgacaaagatccgatgtttgccagcagctttattgtgcagcatgcgtcaatcatcatgtcgatttcgcagatctctgaaaccctgttcattctgaccatcccgttcttcttaagccgctacggtattaagaacgtaatgatgatcagtattgtggcgtggatcctgcgttttgcgctgtttgcttacggcgacccgactccgttcggtactgtactgctggtactgtcgatgatcgtttacggttgcgcattcgacttcttcaacatctctggttcggtgtttgtcgaaaaagaagttagcccggcaattcgcgccagtgcacaagggatgttcctgatgatgactaacggcttcggctgtatcctcggcggcatcgtgagcggtaaagttgttgagatgtacacccaaaacggcattaccgactggcagaccgtatggttgattttcgctggttactccgtggttctggccttcgcgttcatggcgatgttcaaatataaacacgttcgtgtcccgacaggcacacagacggttagccactaattacgcaaagaaaaacgggtcgccagaaggtgacccgttttttttattcttacttcaacacataaccgtacaaccgtttcatgccatccgcatcggtttcgctataaacaccttgcagctccggcgaaaatcccggcaacaaattcaccccttcttccagtgcaaggaaataacgttgaaccgccccaccccagacttccccgggtaccacgcaaagcacgccaggtggataaggcaacgccccttctgccgcaattcgcccttcggcatcacgaatccgcaccaactccacttcaccgcgaatataagcgctatgcgcatcctgggggttcatcaccactgacgggaaactctgctggcggaacatcgctttttgtaggtctttgacgtcgaaactgacatacagatcgtgcatctcctgacacaactggcgcagggtgtagtcgcgatagcgcaccggatatttgttataaacgctcggcaacacctcagccagcggcgagtcatcctcaatatgctgttcaaactgcgccaacatctctaccagttgtgccagcttctcgtggctttccgccggagttaataagaacagaatggagttgagatcgcacttctccggcacaatgccgttctcacgcagatagtgcgccagaatcgtcgccggaacgccaaagtcgctatattcgccggtttcggcattgatacctggtgtagtgagtaacagcttgcacggatcaacaaaatactgatccgcggcatatccttcaaagccgtgccacttcgcccccggctcaaaactgaaaaaacggcggtcgctggctaacacagacgtcggataatcctgccacaatttgccatcaacaacgggcgggataaacgggcggaacagcttacagcgcgcaagaatagccttgcgcgactcaatacccaactcaacgcactcagcccacagccgacgcccactctccccttcatgaattttggcgttaacatccagtgcagcaaacagcggatagaaagggctggtagaagcatggagcataaaggcgttattcaaccgcttatgcgggcaaaaacgcgcctgtccgcggatatggttatcttttttatggatctgcgacgtctgtgagaatccagcctgctgtttgtgcaccgactgggtcacaaaaatccccggatcgttttcgttaagttctaacagcagcggcgagctatccgccatcatcgggataaattgttcgtaaccgacccacgcggaatcaaacagaatgtaatcacacagatgcccaacggtatcgatcacctgacgggcgttatagacagttccgtcataggttcccagctgaataatcgccaggcgaaacgggcgcggcagctcggctttttctggcgcaacgtcgcgaatttgctggcgcagatactcttcattaaaacagtgcgcatcaataccgccaatgaaaccaaacgggttgcgtgaagcttccagatagaccggcgtcgcccccgcctgaatcagcgcgccgtgatgattcgacttatggttgttacggtcgaagagcaccagatcgccacgcgttaacagcgcattcgtcaccactttattcgctgccgatgtgccgttcagcacaaaataggttttatcggcatgaaagactttggctgcgaatttctgcgcatctttcgccgatccttcatgaataagcagatcgcccaattttacgtcagcgttacacatatcggcgcgaaagacgttctcaccaaagaaatcgtaaaaatggcgtccggcaggatgctttttaaaaaacgcaccatgttgatgtccagggcaagcaaaggtgctgttgcccatctcaacgtactgcgtcagcgtgtcataaaacggtggcagcaaattctcttcatactgacaggctgcggattccagctccagccactgctgctcgttgccgttgattaccgccgtaacgcccgcaggtaattcaacagcatgttcggaatacaaaaacaccggtagatgaaaaccggtgcgcttaagcaacgcaagaatgccactgcgactatccgcagcggtaatgacgactgccgcgacgtccgtaaaatcagtatctcccaacgccaccacgcgacgatgagaagaaagtcgggataccagttcactactggcggcaatattcattgatttcataagcgcaaacccgtttcggggaagtaagaataccggacaaggtggaaaaccctgccccatgagatatgggtcaaactggtcaccagctccgaccgccagacatcagtaaaagcagaaacgctctgattttactgttgtcctgcagtgagcgtgcgttaacttcaccgcatgagcagtaacatagaaagggaaacgtttcgcgcgaaatggcgataagcgagagaatgtaaggagatggcgtgcatcgggcaaactccgtacagagaggagaaaattcgcgcaatcatggcacctttcgctaaagcgtgcaagccaggactttgcgaccagacaagccatcaacaaggcaaaaagttcataataagaaaatcaaacaatacagctaacaggaactcttgtggtcatcggcccttttatcaacgctagtgcagtcttactgggtggcgttctcggcgcactgctcagccaacgcttaccggaacgtatccgcgtctccatgacatctatttttggtctggcatcgctggggattggtattttactggttgtgaaatgcgccaaccttccagcgatggttttagctacgctacttggcgctctaattggcgaaatttgtttgctggagaaaggtgtcaatacagcagtcaccaaagcacaaaatctgtttcgtcactcacgtaagaagccagcgcatgaatcttttattcagaattatgtcgcgattattgtcctgttttgcgccagcggcaccgggatcttcggggcgatgaacgaagggatgaccggcgatccgagtattttaatcgccaagtcatttcttgatttctttacggcgatgatcttcgcctgctcgctgggtattgcggtgtcggtaattagtatcccattactgatcatccagttaacgctggcgtgggctgccgcgctgatattaccgctgaccacaccgtcgatgatggcagacttcagcgccgtaggcggtttattgctgctggcaaccggattacgcatctgtggcattaaaatgttcccggtggtcaacatgcttccagcactccttctggcaatgccgctttccgccgcctggaccgcctggtttgcctgacaatgcgtgcaatagcggcaaagtgatgatagattgtgcagtctgcagtaaattgaagaaatttgattgacgagacgaggcgaatcaggtttaatgcgccccgttgcccggatagctcagtcggtagagcaggggattgaaaatccccgtgtccttggttcgattccgagtccgggcaccaaattcatatcaacggacctccacggaggtccgtttttcattccaggacgccacgatttaagcgtcctgcctccaaatcaattctaccgaactcaaccagattccccccacatcaacctcattgtgtgggtataattgtgggcataccccagttcgacagaatttgtaccctctttaacgcattcagaaggctgaactatggcactgactgacgcaaaaatccgggcagcaaagcctactgacaaggcttataaactcactgacggggctggcatgttcctgctggtacatcctaatggttcccgttactggcgtctccgttatcgtattctgggtaaggagaagactctggcacttggtgtgtatccagaagtttctctctccgaagctcgtacaaaacgggatgaggcccgaaaactgatttcagaggggattgacccttgcgaacagaaaagagttaaaaaagtagtccctgatttacagctctcttttgaacatattgcacgacgctggcatgccagtaataaacaatgggcacaatcacacagcgataaagtactcaaaagcctcgagacacacgttttcccctttatcggcaaccgggatatcacaacactcaataccccggacctgcttatccctgttcgtgctgcagaagcaaaacaaatttatgaaatcgctagtcgtctgcagcaaagaatatctgctgtaatgcgttacgccgtacagtctggcatcatcagatataacccggctctggatatggctggtgcattgaccacggtaaaacgccagcatcgccccgctctgaatctttcacgcctgcctgaacttctgtcgcgtattgacggttataaaggccagcctgtcacccggcttgccgttatgctgaatttactggtttttattcgttccagtgaactcagatatgcccgctggtctgaaattgatattgacaatgccatgtggactattccagccgaacgcgaacctctgcctggcgtaaaattctcacaccggggctccaagatgcggacaccacatcttgtgccactcagtaaacaggctgtagccatactgacagaacttcagacatgggcaggtgaaaatggtctgatatttacgggtgcacatgacccgcgtaaaccaatcagtgaaaatactgtaaataaagccctgagggtgatggggtatgacacaacccaggaagtctgtggccatggattccgggcgatggcgtgcagtgcattgattgaatcaggtttgtggtcccgcgatgctgtggaacgtcagatgagccatcaggaacgtaacggtgtacgtgctgcttacattcataaagcagaacatctggaagaacggcgactgatgctacagtggtgggccgattttctggatgcaaacagagaaaaatttatcagtccatttgaatatgcaaagattaataacccattaaaataataaaatccgggcaatagcccggattttattttcaatatatttttctttaaactctataataaattgtggcacaaatttctctaaatagctataacgaatactgctacatatccgataacatcagtgattatcttcttcctgattgcaaaagaatctgcctctaacccatatattttatcttacacagcatccttaacaaaagctgttatgatataatttaccataaatataatctcattttgtctaagctagtatccaggatatttgggaggagactttggataccaggacaggaaaagactagcaaatgttgagcattctctgtaagtgatgaagataaataaaattttgggaactaggtgatggctaattttactggtgaaatgcatagactcatttctgaatatttgcagtgtaagcgacgtaaagatcaatctgttgagccccccctttatattatctctggagcagggaggctgtggctaacgataccactccttatcttatggtgctgctacttaataacgatgtctggtgtaagagtcgtgaggtggtggttctcagaaatctgattgagcaggcgtggggaaaagtattggatgaagataactccattacatatctggttgtgtatcctgaagtgctgacgttggtatttgatgcagctaacacatacaacgctgagcctggtgtactggaacagacggcccgggcttacattgaaatcacatggtgccattgaacgtcatcttgggtgtagtgacttttaacgtcaggtgatgcataagggtctttcgcggagaggccctgtttacacaattaaataagtcgagtcctctaggctgggctgtgtgcacgcccccccgttcagcccgaccgctgcgccttatccggtaactatcgtcttgagtccaacccggtaagacacgacttaacgccactggcagcagccattggtaactggatagtggatttagatacgcagaactcttgaagttgaagccttatagcggctacactggaaggacagcatttggtatctgtgctccatcaagccagttaccacagtcgattagaagaggtcgaagacttctaatcggacggaaaaagccgccgcaaggcggctttttccgtttacaagccgaagattacgcgcagcttaaaaggatctcaagaagatcattttaattttgctgatcgttgcgccctaccagtgaccatacggatagggcttttccttgataaaatcgcggataaatggatcgtaaccgttagccttgatgtaactgaaatcaatcttgttgggaacatttttgcatatcagcatatcatctcccgtcagggtgaactgtcgggcaggattctggagtacaacaggattacgattgtcttttaaccataccctgactttaccaccggggggcaggccaataatcattttgtttcggtaatatatttttcccggacgataagtatcaggataggcagtcagcatctgctgccacgtatcccggctgaaccagatctccgtctcatacgcctttttatcgataactgagtcccagcataccgtcatcctgacaggcagcgccttgccaatattaaaactggctaaaaaaccgcctacgtgctggctccattttcccacactgctctgactgggttcagtcggatccagtcgccggaaaaagctctcccggatatccccgtcctccagatacaccattgtcaccagtgccggcagatttttcgggtaaaaaaattgaattcccagtggtcgtaaggcaacttctgcccccattgctccacgccatcgcccagcagcgtcctcacaccagccctacggtcatggcagccgacagccagcattacgcccactatcacgcccaccatcagcggtaatcgtctcattcctgcctcctcagaacagtccatccagcgcgccttgcgacgcccccgcccggtccgccattgaggtgtagccgagcaccggcacaaaaaaggcgcgagcgcgccattgtgtcgtcactaaggagtgttcaggaggtcaagcccggcgcctgattttgcagacgcgaggaaaagagaccgcgaagcccggtgaacgacaaggggatgtaatgcgagccatcttccagattagcaacccggttcatatatcagtaaaatacggtcgcgctcccctccccctctttgcacaaaggtatgaaaatgtattcagatcaccaacgtagttatctggcccactggttgacgttaagcggcaaagccgaggactcgctgacgcaaactattgccagcgcacgggttgatatgaatcctcatcaggtagaggctgcgatgtttgcgctggcatctcccctgtcgaatggcgtgatcctggccgatgaagtgggactggggaaaactattgaggccagcctgattttggcgcaaaaatgggctgaacgccgccgaaaactgttgctgattgcacccgcaacgctacgcaagcagtggagccaggagctggaagagaaattttcgctgccttcacaaattattgaagcgaagatcttcaatcaaatggttaaagaggggagcgataatccctttgatattgaaaatgcaaccgggaaagcggcgatctgcatttgttcatacgaattcgctgcccgtaaagagcacgagctggcacgaatcccgtgggatctggtcgtcatggatgaggcgcataaactgcgtaatatctacaagaacgatggcgctaaaacagccaaaaaactcagtggcgcactgtccggcagaaaaaaaatactgctttccgccacgccgctacaaaacagtattcttgagctttacggcctgatttccgtgattgatcctcattttttcggcgaccttgcttcgttcaaggcccgttattcccgacagaatattgacgatgcagaactggcattattaagggttcgtctgaataaaatctgtaatcgaacgcttcgtcgacaggttcagcaggaaggcgggatcagttttacccgacgccattcaataaccgaagactttcgtccgacggaagacgaagaagtgctctataaacaggtttcctcttatttgcagcgggacgatctactggcgatcaaaagcggcgcgcgtcacctagtaacgttagtcattcgtaaaattctggcctcatcgtctacagcgatccagggaacgctggaaacgatgatccaccgtcttgaaagtaaaatgccggtgctggatgcgctgacggattatgaaaattacgacgattacagcgatgaagaaggcattgatgacgaagataccatcgatcctcaggcgctacaggccgaaattgaccagttaaaaaattataagactttagcggcatcgattaccaaaaacgccaaggccgaagcactgttacgcgttctcgatcgggcctttacctttacggctgaactgggcggattacgtaaggcggtcatttttaccgagtccgtacgcacccagactggctggcgcaactgttgtcagaaagtggctacgagggagaagtggttctgctcaatggcagcaatagcgatgcggtgtcgaagaagatttacagcgactggctggagaaacatcagaactctggccgggtttccggttcgagtacggcggatatgaaggcagcgctggttgaaaaattcagggacgaaggcaccctgatgatttgtactgaagcgggcgcagaaggtatcaacctccagttttgttcgctgttaatcaattatgatttaccgtggaatccgcagcgcgtggagcaacgtatcgggcgtgttcaccgctatggacaaaaacacgatgtcgtggtggttaattttattaataaaggcaaccgtgccgatcagcgcgtgtttgaattattgagccagaagttccagctttttgaaggggtgtttggcgcatccgatgacattctggggtcgatcgaatcaggtgttgatattgaacgacgtattcatgagatataccagcactgccgctccgatgaacaaattgaacaggaatttaatcagctgcaggatgaactcaaagatcaactggaaaatcgggagaatgaaacccggcgttcattattcgagcattttgacgttgatgtggtccgcaatctgaaaacccgacgtacaaccaccctcgcgcagttaaacgattaccaggaaaatctgttgctgctggcggaaatgtttctgagcgacgagagcgattttcaacgttctgagacgggttttcgttccagaggaaagtattttgacgtcaactggcccattgcggatgaaaaagatgccgaattcttccggcccagccagggatatgggaagcaactgattgatgctgccctgcatgaaggggcaagcctttccacatccccagtttgccagaagctccatttcatctaccaacccagaagcggacaactggccgatgttaaactgttctgcgggaaatcgggacagctgttgctggcaaaagtcagcatcggaaatcaggagcaacagcgagagaaactattgaccgtcgctgttacagaaaatggcgaagtgctggcagaggaaaccgtatcccgtctgcttcgcctgccattatcagagataacatctgtcgaagaacagcctttgctgcctgcgttaacaacacaatgtgaggttttacggcattcttttatccaacaggtcgaacgcgataacgaactttattacaatgaagaagtagaaaaacttgaacgctggtcagaagatcgacgtatcgcgctggacttacgtatcaaacagttagatgcagaaattaaagaggcgcgtaaagccgcccgtcagcttccttctctaaaagagaaaatggaagccaagcgcgcattaaaggtgctggaacgcgagcgggatagcatcatgttgcagtatcatgatgaaaagaaaaaaatcgagcaggaagaggaccgtctgctggaagaggtcgagcaaaagctggcgacggaaataacgtcccgtcaattattcgcggtgagctggacgttgagttcaccttccgcatgaagtgctgtggtttcaggagtcaataatggctaacggtaagatattaaggcaactaataaaagcgggcgcaacgggtgataccgctactttccgtcgtgtttcggaagccattattgatgaggaacgtcagaaacagcaccaccttctggctaacgatctggagcatattctttacggcgatcgtcttgttcaggcttcgcgctcgcctgcgcttcctcaagcaccgatagataaagaaaggggcctgccgttgctggatctccggcagccacagcgcagccttgatgaaatgatcctcccggcgaccagcgctacagtgattgatgaactccttgaagagcaccggcgtagcgatgtattgcatagctacgggatgaaagcagccagtaagatcatgtttttcggaccgccgggctgcggtaaaacgctgacagcagaggttatcgcttttgaactggacatgccgctggcaattgtccgcctcgacgtactggtgtcttcgtttttgggagaaaccgccgccaatctgcgtaaaattttcgattttattgcagagcacccaatggtggtgttgttcgatgagtttgatgccataggaaaagagcgtggcgacagcggcgaacacggtgaattacgccgggtcgtcaatgccgttttacaaatgatggatgcttatcagggtaaaagcctgattctggcggccactaaccatgaacacattctggacagcgccatctggcgtcgatttgatgaagtgattgaatttccgttgccggatcaggcgcagttacgtgagctgttggcgttaaaattacgcggcacccgccgtcagtttgagctggacgatagcgagctattatccctgctgctcgggaaaagcggtgcagatattgagcgcattgtccgtcgggcaaccaagcatatgatcctgcgtcatcaggaattcctgacgctaaaagatttaaaaaacgcaactcagcgagaaaacgccagaacccaccgataagggactgccatgacggcgaattatcagcatctaacgattaccaaagcaccacttcaaaacgaccgacggacccgcagagtcaatatgccccgtattcgcaggggcgatttacgccagcacgggcaaatgctgttgacgcaactccataccttgcgcccaacgctggcacaagtacccggcagcgccgatgacgggcgctatatcctcaagctgaactacagcggcacaatgaatttttcagcattgatacatcacggcgtggagttcatcagtcaggaaggtaaacaggtctgtatcgttttcactaatgagcagggtctgacaaccttcgaaacccatctggcgcaactggggcttccccgtacggacctaacctacaggaatattctcgaagcgcttgacggcattgacggctggtcggcggaagatcgtaaaagctgggcactccggcgctatggttttcctgtagcggaacgctttaatctggatgtggagctctggccagtcgatgtggcgcatcaccccagacgtatcgacctgtatacccgttttgaaaattggctcagagagcaggggattctctggcgggataaagtcaatctggacagcctgttgatgtaccggatagaggtttcgctcgcgcaagcagaatacctgttagcgcatcgggacgtcaggttggttgatttgccaccgtccagcggcattagctatcaacaaattaaccgggacatcaatacacttccagagcatctgatttcgcctgcggtaaatgcggccagagtctgtattctggatagcggcatcaacaccaatcaccctctgttaagtgccgccattgctgaaagcgccagctttattcccaatcaggatgcgtttgatcaagaggggcatggcaccgccgtagcgagtattgctctgtatggcgacgttgaagcctgtaaccagagcaatttctggcagccgcagctatggctgtataacgggaaagtactgaacgagcgggctgaattcaatgccgaaacgattgaaagcacactaacagccgccgtcgcgtattttaccgatctcggttgccgcattttcaatctgtcgctggggaatgctaatgcgccctatgacggcaaacatattcgcggtatggcgtatctgttagatacgctggcgcggcaatataatgtactgtttgtcgtctctgcggggaatttcgcaggcagcgacgatcctccggtgccgcaaaatagctggcgggatgaatatcctgactacctgttgcatgaggacagcgtaatcatcgatccggctccggcgctgaacgtactgacagtgggcagcgtcgccagacataacgcaacgttggatgcgcagcgtaggcctggcgatattcagcatctcagcccggcaacggaaaaccaaccgtcgccttttacccgacacggcccgtcggtaaaaggcgcgtttaaacctgacgttgtagcgcacggtggcaatgtcgcttccaacgttcggcaagggcaatggcaggcacatatgcgcggtctgggcgtattaagctgccatcaccagtttcagggtaatacgctgtttaaagaactcagcggcaccagctttgccgcgccgtatatcacacatctggcgggtcgactgctaaatgaatacccggaaatgtctgccaatatgctgcgggcaatgctggtcaatcatgcttctgtttctcaggagatgacgcaggcttttccgcaggccatgagagaaagctatagaaatgcgcctgcaacgagaaaccgggagattgagcgcgacgtgacaggctacggcatcattgatgaagatgcgttatatcgttcttctgaaaatgtggtggtcatgcgatgtgaagagcagatagaaaataacgcgcaccaattttttgaactgcccttcccggcttcttttttacgatcgcagcgtgcaacccgtgaagtccgcgttacgctggcatattcacccgccgtgcgtaccacccggctggattatactgccacacggatcggtttccggctggttaagggccgctcgctggatgaagtgcaggccagttttaatcaccagacgcagagtgagacggaaacccgctccgatgatgcccagactaaccgtgttgtatcagcccaacagcgggaacgcgggacggtacagtcgtcgatttggacttttcgccagcgtaacccggatgaaaaatggtttattgttgttacccgtcaggacagagactggggcgaagcattcagcagcgagcaggagccttacgcactggtcgtgaccgcgaccgatcgcgataatgaacaggcgcagctttatacacaaattcaggcgcagatccgtgaacaggaacgcgcacgagcacgtattggataaaaatagattatgtcaacgaagcaaaaattagaacttaactggattggtaagcataagcgtcctcgtctggagccgcgtattctgctcgaagataaggagttatcttatggtgatgcggatagtgagaatctgctgattcatggggataatctactggcgttgaaggcactggagcagaagtatgcggggaaggtgaagtgtatatttatcgaccctccttataatactggaagtgcttttacacattacgatgatggacttgaacactctctatggctttgcttgatcagagatcggttagaattattacgcactttattatctgaagatggctctatatggataacaattgatgaccacgaagttcattatttaaaatgtctttgtgatgaaatattcggaaggaataactttatttcaaatgttatttgggaaaaatccgatagcccaagaatggatgctgcatttttctcttctcgccatgatcacatattagtgtacgcgaaagatcagtcaaaattcaaagtaaaaagacaaccactgtccctcaatgatctacctagccattacgataaagtagatccaagcggcaatccttactacctaaaaccgctaagggcaatgggacaagcagataaaagagaagatcgcccaacaatgtatttccctcttgttgcccccgatggcacagaaatttttccaaagcgccaagatggaactgatggacgttggcgttggggcgtacaaaaaatagatcaggagaaatggagaattgattggtcgaaaggacgaaatggttggactccatattttcgtgtatatgctgatagttcgtcaggtagaccgccagaaacgatatggtttcattctgaagttggaagtaacagaacatcaaaagccgaaattaagaaggtgattcctactataagtgcatttgatacacctaagccggaagctcttataaaaaaaatactggagattgcaactgacaatggtgatcttgttctagactcctttgctggttcaggcacaacaggggccgtagcacaaaagatggggcgtcagtggattatggttgaattaggcgaccactgtcggactcatattgttccgcgtatgaaaaaagtgattgatgggaaagatttaggcggtattacaaaatctgtaagctggcaaggtggtggaggttttcgttatttgagtctagcaccttcattgcttaaaaaagatacttggggtaattgggtaataaataaatattacaatcctgaaatgcttgctgaagccatgtgcaaacatatgaacttcacctatgcaccaagccagactcaatactggaatcacggttacagcaccgaaactgaccacatctacgtcactaccggttctttggcttatgaacaactgaaagttctgagtgaagaggtaggaactgaacgtacattactgatttgctgcaaagcctttatgactgaaggcgcggacttccctaacctgacgctggtaaaaattccgcgtgccattttgagcaaatgcgaatgggatcaggacgactatagctttacgctaaacgttctctctgattcagaacagcctgacgatattgactacgacgaagacaccgaagacgaagaataattatgagccagaataacgccgttaaaattgtcaatcgagttagcgcacgactgtctctgcgcgatccgcaggatgaatcattgtgcatcttatgtgacgtgctggaacaactcgatctcagtaaagatcccgatcttaatcgctggctggcggtgctgcatcagcaatacccaacggtaaaaggatttgaacgcgcctttccttcactctgctttgcactggcgaccggcgtgggcaaaacgcgcttaatgggggcgatgattgcctggttatacctaaccgggcgcagtcgtcattttttcgtgctggctcctaacctgaccatctatgaaaaactcaagatggattttttacccggttcgccaaaatacgtttttcagggtatccctgaactggcgcaaacgccgccagtattaatcactggcgatgactatcaggaagggcgaggtgtccgtctggactatgcgattgccgaaagcaaaacgggcgatctgtttggtggcgaaaccgcgccacatattaacatcttcaatatttctaaaatcaacgcgctggataatgccaaaggggccgctaaatccaaagtcgctaaaatccggcggattcaggaatacgtgggagagtcttatttcagctatctggcaaacttgccggatttagtcgttttaatggatgaagcccaccgttactacgccagcgcgggcgcgcaggcgcttaacgatctgaatccagtattgggtattgaattaaccgccacgccgaaaacggtgggcgcaaatccccgtgatttcagaaacataatttatcactatcctctttcgcgagcgctgaaagatggatatgtcaaaattcctgccgttgccacgcgcaaagacttccgggctgcaaattattccgaagaacaactggaaaaaattaagctggaagacggtattcaccatcatgaatacgtaaaaacggaactgaccagcttcgccaataataccggcaacaaactggttaaaccgtttatgttggtcgtagcgcaggataccgatcatgcggacaggctgaaagcccgtattgagcatgacgaattttttaacggcgcgtacagaggcaaggtgatcaccgtccactctaacctgacgggcgaagaatcagaagaaaccatgcagcgactgttgactgtcgagcatgacaaagacactgaaatcgtcattcacgtcaacaagttgaaagagggctgggacgttaccaatctctacacaatagttccgttacgtgcatcagcctccgaaattctgactgaacagaccataggccggggacttcgcctgccctacggaaaaagaactggcgtcgaggccgttgatcgcctgaccatcattgctcatgaccgttttcaggagattatcgatcgcgccaataatgatgactcgataatcaaaaagttctctatatcgggctggatgatgatgagaatggtattccagaagtaaaacctcagcaaattatcgttccctcaatggctgaatatctgctgggtaatcaaattatcgataatagtgggttgcagctttgtgaagataaagcgatataccgaacaaactcaacaccaaaaccgatactcggtacagaaacggaacgtaaagtcgccgagctcacgtttaaagtcgtctccgaagaagcaaaacggttaaccagcagccagcaactcagtatgccagaagtcaaagcgaacgtaacacggcgggtgcaacaagccttgcgcgaatgggaagtgactcaacaccaaacctctccctcttctacacaaatcgatctggctgaaatgattgaagagcaacctgaacaaccgagtttcccctcaatggaagacgcagaggttcagcaactggtcggaacgatcaccgaaaaactgatggaatatactattgatattcctcgaatcgtggttttgccagaacgtgaagtcaattacgggtttaatgatttcaacctctccggactggatcgcattgcgctcaaaccaggcagtaaagagcttcttctgacgcatctggagaataacgaacagcggacaatcagttggcaggaaggcggtgaaacggaagaacggttagaaaactatctcattcgttatctgctcgaccatgatgaaattgactacgatgaacatgccgatatgctttataaacttgccggacaaatggtgagccatttgtgcagttatcagccgcaggaagatgcagaatccgttctgaaaaatgcaggccgtcaactggcagaatttatgtgggcacaaatcaaacaaaatatgtggacaacgccaacgggttataccggacgcataactcagggattcgatgttatacatccagccacattcaattttgccggaaatgaaaaaccgagagattttcgtgtcgccattcccggtggtgaaaaaaataaagttcgccagatgattttcactggtttcaataaatgctgctacccttatcagaaatttgactccgtcgatggggaacttcgtctggcgcaaatactggagaacgatgcttcagtggtgcgctggatgaagcctcgccctggacaattccgtattgaatatactaatggtagaaactatgagccggattttgtggttgaaatgaacaatgggtactgtcttattgaaccgaaaaaagccaatgaaatcgatactcctgaagttcaggccaaaacacgggcagccctgcgctggtgtgaatttgccaatcagaatgcagcaaagaatggcggaaaagtatggagatatgcgcttatcccacataatgaaattgaattaagtcgcacagtttcagggttaatggctgattttatgatgacaaatagtttatcagcatagtagcagcccaccggagttgtaattaaaaaccattccgagacattgcgttgctgtttcgggatggtttagcataaacaatgagtaaaaaatgaatacagaaagaccgctccctcaaaagcagaatctttataagaccatgtggtatttaatattcagcgcagagagatttgtaactatcgctgccgaaaattcaatggccttcgaacttgaacatgaagagtataaacgaaaacttgccgagaggaattatagtattgatcccaaagttcatgtccactctcatccacaaaggctgaaagacctgcgaactttattactcaagacaacgggttgtattttgagtgtaataatcttaatagtaggtattggcttttatacttgaagtggcacactgaatttggccacctgaacagaggtgatatgctcacctcagaacaacacaggtgctccaatgaaaaaaagaaattttagcgcagagtttaaacgcgaatccgctcaactggttgttgaccagaaatacacggtggcagatgccgccaaagctatggatgttggcctttccacaatgacaagatgggtcaaacaactgcgtgatgagcgtcagggcaaaacaccaaaagcctctccgataacaccagaacaaatcgaaatacgtaagctgaggaaaaagctacaacgcattgaaatggagaatgaaatattaaaaaaggctactgtagattcaatctgtcaatgcaacacccctttcaattatctctttcggtgttttgaacttcagtgtctttctcggtctgttgtttagctgagcagcaaccagatctagttcatgttgagtatattgggcaagacatgtctttttaggaaagtactgccgaattagcccatttgtgttctcatttgttccccgctgccaaggactctgaggatcgcagaagtaaactttaacgccggtgctgacagtaaattctagatgtctggccagttccattcctctgtcccatgtcagtgattttctgagttctgacggtaaactcaggaatttgtcggtaagagcctgatttactgagacagaatctttgcccctgagtctaaggatgatcgtataacgtgattttcggtctacaagtgtggctatatgagagttttttgtacctgagactaaatcgccctcccaatagccccagagagcgtctgttatcgatatttcgggaacgttcgtgaattggtgttccgttcactatgttaatcgtacctctttcgcctttgcgggtatgacgcctgccatggcgaaggctatgcgaccgtcgcagatgctgtatattcaggtggtgtagcgcttcacggctacgaaagtacagcgttttataaattgtctcaggtgatattcgcagcgttttttgacgtggttttgttcgccttaaccatcctgatatttgctctggagaccatttcatctccagcttttccagaacaagctttcgcaatggcaaattttgatccagtaagcacggttttggccttttcgccattctgttggctcggttattagcatcaacagctttgtaatagcgtctgccccgattacgctgaacttcacgtgagatcgtcgaaggactgcgattcagcgcagtagctatcgcacgaatgctcattttggctgacaaaccagctcgtatctcctcgcgctcagacagtgtcaggtgagctacagcccgcttacgctcatggggttttatgccgccagtatcccttaacatagtgaagatcgttccgggttttgaacccaggatattcgctatttcactgaagcctgttccgttcttccatagttcaaaaacagaggctttttcctctgctgtaaatgttcgtctcattcaaaaaacctccgcaaccccatgttttcacataactgttgcgttgaccaattgaatctacaaccgcgctcttgatgtcagactccctgaacagttctcgataatcgggaaactcagagcgcattatcctgtggtcacactctgccatgtgttcggggttcatcgcagcagctacagatactggaaaaaccgtcctgaaaaaccagactgcagacgggctgtattacgcagtcaggtacttgagctacatggcatcagccacggttcggccggagcaagaagcatcgccacaatggcaacccggagaggctaccagatgggacgctggcttgctggcaggctcatgaaagagctggggctggtcagctgtcagcagccgactcaccggtataaacgtagtggtcatgaacatgttgcgcataccaaaatcaccgacagacagaatcaaaaatgatcatcgggacgcaatttctctcgccaggttactgcgggctggagaacttacccctgtctggatccctgacctgactcatgaagctatgcgggatctaatcagagcccgtgcagcagctaaacgagacagcagagttgcccgacagcgaattctgagcatgctattgcgaacagacaaacattatgcaggaaagcactggacaggaaaacatcgaacctggttagctaatcaatcatttagtcagccatctcaacagattgcttttcaacactattgtcaaagtctggagcagattgaagatcgcatacttcaactcgaccaggaaatatctcgcctgttacctgagtggtctctgtgcaatctggtctgccagttgcaggctcttaaaggtgttggtcagctaattgcaataactctggttgctgaactgggtgatttttcgcgattttccaatcccaaacagctcatggcttttctgggactggtgccaggtgaatattccagtggaaacagtattcgtcccagaggaataacaaaagttggaaacagcgaactgagacgtctgctttacgaagccgcctggtcttatcgtacacctgcaaaagttggggcatggcttatatattaccgaccggactctgtaacacaatattccaaagatattgcatggaaagctcaacaacgattgtgttctcgttaccgaagtctgacagcaaaagggaaaaaatcacaagtagccattacggcggtggctcgtgagttgactggatttatgtgggatattgcacttgctgcccaatcatcattcagtcagcagaagcaaaattaaaccctgaagcagtcagacacggaatgagtgatcctcgtaaaagaattcagggaagccagaatgcgctaatacctgcacgtagaaagaggccagctcactgcgtaaatcgtcatggggctaaaatccccgaataagagtttgtaaaatccaagatacagtctgactgtttcaggttctttaatccgcgatataacgaagctcccggagctgcgtaaggtctttttgggcttaatatttgacaaaggtcataagaatttttctttccgagacagactgcacgaagcgctctttccgctgtgttattgtccgcctccgccagaccgtcatcacagaagttgcacaacgcaacccagtgcttcctgatataccggaacgcatctctcagacggcattttttcgataacgtgtgttctttctcctgcatcagcttatacagggaagtcagtagcggtttactctgcatttgcctgaccgccaggcgttcagacaccggcaacccgcgtatttcgtgctcaatggcgtacagttcgccgattagtttcagtgcttcttccgccgtcgcgcttttggtactgatatatacatcgtggattttgcgccgcgcatgagcccagcatcctgcttccgtcaacgcgccgccttcacgttcggcactgaacagccgatcgtaacctgcgaacgcatctgcctgcaggataccccggaagggacgaaggtgttgctccggatgtttaccctgatggtccggtgagtaggcgaaccagaccgccggaggttctggcgaaccggcatttcggtcatcccggacatacgtccagatatatcctgttttcgccttcttcctgcccggtgccagtacttttactggtgtgtcatcagtgtgaaccttgcgggtgttcatcacataactgtacagggcatcattcagcggcgtcattaactggcagcacgcatcaacccagttggagagtaaggcacggctcagttcgacaccctggcgggcaaagatttcactctgacgatacagtggcaggtgttcgcagtattttcccgttaacacgcgggcaagtaaccccgggcccgcgataccacgctctatcggacgggatggtgccggtgcttcaacgatgcagtcacattttgtacaggctttttttacccgttctgtgcggatcactttcagggcgctgctcaccagttccagttgttctgcgctgacttcccccagataatccagctcaccgccacactccgggcaacagctttcttcaggctccaggcggtatatttcacgggggagatgtgccggtaacggacgacgatggcgcgactgtcgcaactggcggggaaccagcgggtcatcctcacgcccactgtaacgatcgctttcctgctcgcgttgtttcagcagggcttcagcctgttcaacctcacgacgcagtttttcagaacgggttccgaacagcatccggcgcagtttttctatctgagcccgcagatgctctatttcccgttcatcttcttcgatcttttcttcggcacgtgccagtgcagagcgcaggaaggcctccgtctcttcaaccagactcagttgctggtctttctgacggagggcttcagcctgctcagagagcagcctttccagctcagcgatgcgaatgaggtatttctgactcatggccgtttttataatgcggtcaggagttttttacaacattgtcagtgcgttaaggcgggatgtttttggctgacgccagtccagcttatcgaggagcattgccagttgcgagcgggtaatggatatcttaccgtcacgcaccgcaggccagataaactgaccttcctcaaggcgtttggtgaacaggcacagaccatcagcatcagcccacaggattttaatcgtgtctccccgtcggccacggaagataaacaggtgaccggagaaggggttatcatccagcacatgctgtatctgctcccccagaccgttgaaggatttacgcatatcagtaacgccggcaacgagccagatacgggtacctgatgggagtgaaatcatcgtcccctcccggtcagctcacggatcaacaccgtgagcagctctggtgaaggattttccagcatcattttaccgtaatggaattccacatggcaggaagctgcacaagcaactgataatgcctccggagcaggagcatctgtagcacagcgcggggtgtcgataagttccactggaaccagagtcggagaggccggaaaagattgtgatactgtagggcctacaatagttggaggcattctacgagaaatacgtccttctctttgccagaggcgtagccatttaaaaatcaggttgttatcaacgccatgttcccgggccagttgtgcaacattggcatttggtttcgaagccagttcaaccatatgaagtttaaattcattagaaaatatccggcgggttccggagcgccagtctgtaggtttatccatcaatagaactccgtctaatttagaaggagctctaatttagtctgcaaggagcaggtgttacagacggcattggctttacgcttacccatagaggcggatataaggggaatgccggcagagcagcggcttgctgaacgtcagcgaaaaacgaaaccgctgttgaaatccctggaaagctggttgcgtgaaaagatgaagaccctgtcgcgacactcagagttggcgaaggcgttcgcgtacgcacttaaccagtggccggcactgacgtactatgcgaacgatggctgggtggaaatcgacaacaacatcgctgaaaatgccttgcgggcggtcagtctgggtcgtaaaaacttcctgttcttcggctctgaccatggtggtgagcggggagcgctactgtacagcctgatcgggacgtgcaaactgaatgacgtggatccagaaagctaccttcgccatgtgcttggcgtcatagcagactggccggtcaaccgggtcagcgaactgcttccgtggcgcatagcactgccagctgaataacacatccccgtcaatacggccctcgctgtacgcttaccgcttatccaacggacatccgcaaagtgatctatacgacgaatgccatcgagtcgctaaacagcgtgatccgccatgcgatcaaaaagcgtaaagtgttcccgacagacgactcggtgaaaaaagtggtgtggctggcaatccagtctgcgtcccagaaatggacgatgccgttgaaggactggcgaatggcaatgagccgctttattatcgagttcggtgaccgcctggacggtcacttctgagaaaggcatttacacagaatcttaaacaggctcgcgccagtcggcaaaactagttgacgtctaatacactcccccttaccgaagaccttcagttttatattttaagagtctctgagaaaggctgccttccggcagccctttacccccacatcagaacatataccggaaattcgcgtttaccgcattatccacgttatatttaccaaaggctgacttctcaaactccagaccaaagcgcatattgtcctttatctgcgcattcataccaacattaaacagcatccggctgtccttctctccttttatccgtttctccccggacgcatcacgcagtacggtctctccattattcagcaggtcaaactgccagctggttccggcacgggccgtcacactccagtccttaccactgaaggtcttgcccagttcaacccctgttcttccaaccagcggactgaagtccctgttcttcatgctcaggtccatatcaccgtctttccagcggaatgttttcccggacacggcgccgtaaaccagttcagcctgcggctcaatgaacgtgtcctctgtcaggtgatagcggtaacccgtttcagcaccggcataccaggaatgggtgttgtagtgtttcgttcccaggctagcaaagttacctgtgtaatcattgtcatggtgaatatatttaccaatcaaatcgatataggcaccggactcaaacaatgctgaagcatacagaccgccccccaccgatttcgtctttccgctgaatgcatggctgtctgcactgctgtcggtataggtcatcgtgacaccggtaaacaggtccacaccgtccagttcatgttttttgtcaaagccgacctgaacatgggtgtaattatcactgtaaccaccgtctgcagaaccggcaccactcatgatgcgcgcccaggcaccggcatcaccgtttgtgtcacgcaggtcacccatacgtttgttcagattgttaacttccgtcatgaagtttttatacccggcattcatgaaactgtcagccttcgcggcagcggctttatcagcctccgctttaaaaccatccagtatccacttcgtattgccaccactggtatcaacatgcagggttggggtcacccgactgaaacctgtcacccgggtgccggccttaaacatctctgctgaagttcccgccggtgccgtgaccagaggaatattcagggcctgtccctgagcaggattattcataaagctgacgttcaggctgttatctgaaccagtggctttttcagtcacattaattttatcggcatttttcaggtccgtacgcaaaacaaaatcactgcctgttgcatccagtttattcaccgtcagggtacggaatgtacggtctccttcagaactaatacggctgtttctgacggtaagactgtggatggcagagtccccacccagagtccacagtgcattatgcatactgacatcagccctgccaccggttatggcaccattgaatgctgcgttatagccctcaagaagactgccggcaaacgccgatgcagccgtttccgcagaagccagttctgccggcgtgtcagacccgatggtaactgttgatgccgcagaggcatgaatatcaccggaagcatgtgctccacgggtaatttccagtgctgcgttatcgccggtcaggtcatatccgtccgtcagatatacagcaggggcatactgattagccgtatctttaaccggtgtaccgctcagggtgattttgccgttcttaccggcctgaatatgcccgtcgctgaaaagaccgttcagtgctgtaagatgaccgccatcatgcactgtcagtgaactgccggcaaaagcacccggggctgtcaacaggacgtccggagaggtgatgctgacggcactgtcataagcgtcaatccccccggtgaacctgctgccgatatccagggctgagttatggttcagcgtaatattcccttcatactggctcctgtcattcacggtgtccgggacagaggtaccttcctccggaatgacataatttcctgttccgtcatttttatccacaaatgccctgtcacttcccagtgtgatatggctgttatccgacttaatgtcactgttcagcgaggcgttacgtgaaagatggaagtcagcgtctttcagcgacagtgttttcattgtaaactgacggttttcccagtctttctggttcaggctgaccggtgcactgccactgatggaggcatggataaccggatgtccctggaatatcagggtgccactgtcctgactcagggtaccttccggcaggttcacgctaccatcaaagattacctttcttccccccggcacctgtggaatggcgacatccatattcccggtcagctgaccatgaaagataacgggttgttttgcccgcccggccaggatcctatcttttactgtctgaactgctttgtttttgttcatgccaacaaactcccactgagccggatcattcaggctgttcccccacagagtgttaccatagctggcagatttcagaatatagaagcgggtctggctgttgagtatcatgctgtacaggtttcctggagtgccggtaccaccaaagggggatatatttccaatcgtcggttcactgacatttgtatcctgagccttaagatccagtaaaagctgggatttttgctgtgcattatttgtaatcaccgccccgtaatcagcagcctgcagtcgggtgaaggtaacggcattaccattaaggtcaagcttacctccccggtatccccatgaaatgttatccggattgacctgacgggcatccccgagcaccacggtcggacgtccgctggcgaggttcactgaactgaaggcctggatattacctgcagtgtctgcctgctggttaagtacaacgataccgtctcccgttttcagtcctcccgggtttacacctgttccgtttatggtcagggttccttcccccagcttatgcaagttgtcaccggcaacgccgttgaccttccaggttacattcgtccccttgtcagtaataatgccggcacccgtccatgtttttccggattcagcagatacggtgtaactgtctttaaattcgagataaccggcaccctgagtcacactgtctttcaggataattgcaccattctgcccgctgaataccagatttttaccggcattgaggtcattgtctttctgcccgtgcatggtccagtttttactgccctggctcagggtacctgtgcctgatgttttgtcgtatgtccagttcagggggcccagtccggaaacaaagtctacgggggcatcgaaatcgtcctgcataacctggttcagataatctgttggtatgacattccaccagttcgtagcaccattaatacctgcatatgctcttaatacagcaacaataacccatttttttgttgtttatcataagcaaacaaaggagaaccactatccccaggggctccatagtcaggtaaagggccgtttacaggattataagtttgcccgggattagagactattgttgcatcagatatcagaggaactcctgtggttcctcctgttttaaaagcatatccaccggcaaccttaactaaatttccgtccttgtccttagtgtactgcgtaccactacccacccgataaaaagcggtgtaacgttcagtgtatttataagcattggctttggttccttctgatgttaccgctgagggaataacttctgtaaccagtttattcagacgtggagcatggaagtcaatagaagggtggttattacggtcaacaagggaatatgtatttttcccattaccaaagctcacactccgatatcctccgttatgctttacgctgacgatatactgaggcgatacaagcgtagcaacgccatttgagctcacactgctgaaatcggccattggggctttacccagtcttcccacaagttttccgtccttatcatataccggaatatcattggcaccaggtacaaaaagccctttgttttcggcgaaatcacgataaatctgataggcaatatcggaacggacaatacccgcctgggatatctgagagtaacacagacagattgctggaatgccagccagaagaatatgcgttaatcttcggcatgtctttttattaccctgcgggcaagttcagagacagcaataagccccccggtgacggggcaatatttaagagaataaactttattcactatggattctccatgatgtttacaagggatataaaagtaaaatagctgaagaagctaatgataacccgacgttatcaccagaaaggaaaatatagttactgcattaatgtgntttnntganctgaaccgncccgggtttcctg

SEQ ID NO: 194 - DNA, 466 bp, Escherichia coli
agtgctttcatggtaagcctgctgtccggcgagaacgagatggcccagcccactggttttcttgcgaacaggtcgagaacaacggcgaggtacgcccagcgcttacccgtccagagtagagtaagaggcagggcgtagtcggactatttccctgcctctcctccccgaaccggacgtgcacctttcagcgcatccggctctccatttaaatgctggcgaacgccattgccacttctgtaaagcgcgatgtatacgtgtttctggtctccgtcctcagatagggattaccttcgggtagccgccagcggaacagcttcttgccttgccccaccaaccggtacagtatttcgccgctgagcttgccgtgattggttttaccaaataaaacccacgttttgctctgacccggtttcggtgatttacaccaccacctcatcagggaagcgatacctgtacggtatttgcg

SEQ ID NO: 195 - DNA, 21636 bp, Escherichia coli
acctcatcagggaagcgatacctgtacggtatttgcgggccagccagtgagccagcttccagaacacgacacggtcgatataactgaagactttggccttaaaatcaacgaactgatagaacatggcccagcctttcagttttcggttgagttgttcagccatatcgactttgctttcactgtagttgcctgataacagtgctgtcagcgatgcggcgaagtttctggctttctcctgcgggatcgttgagaccactcgcatctcgccataacgactgcgtttgcgaatgatcctgtgccccagaaagataaagccgtcattaacatgggtgattttagtcttatccatgttcagcctgagtttcagactgccttcgagcacaccccgacactcctccctgatggcttccgcctgtgctttggtgcctttgacgatgaggacaaaatcatcggcatagcggcagtacgccaccgcgggtttccactgccagttttctctgaccgccgtacttcggccccgttggatactgttattccagtaccaccgatcttttctggctttcccgctcaggtagcgctcatgcaggtattgatcgaactcattcagcatgatgttcgataatagcggcgatataacaccgccctgtggcacaccttcactggccgcccgaaagagaccgacatcgatatgtcccgccttgatggttttccacagcagagtcatgaaacgtgcgtcactgatcctgcggcgtacaaccttcatcagcagtcgatgatgtacggtgtcgaagtaactggacaggtcgccttcaatcacccagcgtccccgggtttcaccacagtctgtgagctgtaatttcaccgtgcggatcgcgtggtggacactgcgctcaggccggaagccatatgagagcgtatgaaaatcactctcccatatcggctccatcgccatcagcatggcccgctgaacaatacgatcccgcaacgcggggatacccagtggtcgcagtttgccgttgcttttagggatgtaaacccgtctggcgggcaagggctggtagtggcctgagagtaattcatccctgaggatttgcagctcaacagccagtctggcctgtagcattgttttgttcacgccatcaacgccgggggtatgggccccctttgatgaaagcgtgatccgcgccgcttcagccagccattctggttgtgttatcagacgcagcagccgttgaatccgtagggacggatcggtggctgcccatgtggcaagcttgcgttgcatttcgctgattatcaaaggtcttcacctcgttaggtcagttaattcacgtcgcaaacacattcaaactgcttcccttcgccatgtaatgggctttccccatcgcggactactacggaagctccgccagccagcgcgtcatcggagccatgcccccttaacatccgtcgctgaccttccccggtttacctgcctggactcaggcatactgaggaggctgcccgtcgcactctttatccttgcttgccgcaagttggcagaagtcagcaacgcaagtgtgatagacgctgctgccccggtgtttcgcatacatgtcaaaacaccttcgaccggcagtgcttacgtatcactgccagttcctcctgcacggcctgtcagatcacgtaggccgtggtgacgttttcaacccacagaggcggattaacgggttcatgttcttcagcctttcagtacttaaccttgaggatcatctcggcttagtgatctcgcctcaatccccgttgtcagcgggttacatcaccctgcgggcatgccgcaggtcactgccgctcaggttctccaccgtcacacccggtgggattgttgggtttctcatcgtgagttaccggttcaatattccagacagactcgcggttcatttaagcatccatgcccgccctgaactccgggcacaccgtaagtaaaatcagccacccacagctggtcaggtcgttctgccacgaactgacggtttacgcggtcgcctgcggcaaaggctttccggctgatggtcgtacggacctttttaccccggagaacaccggcaagtcccataaccgccatgaggcgcgccactgtacatctggccaccctgattccttcccgtaacaactggcgccagactttacgcacaccgtacacctgatgattttcatcgtatacgcgctgtatctctctcttcagccagtcatcgtgctgcgcacgggaactgcgtttatcaggatgatgtcgctgttgctgacagtggtaattcgttgacggggcgatatgcagttcactgcataccggtccgaccccgtactgctcacgcagcttatccagcagtggcattattttttccagaggcggtcgaactcctccttcgcaaaataagcggaagcctggcgaaggatatcgctactgcggcgcagttcacgattttcacgctccagctctttcagacgctgacgttcagcggtggtgagccctccatcaccgcccccggtatcccgctcatgctggcgaacccagacacgcagagtctccggcgtacagccaatctttggggcaatggaacaaactaccgcccattgtgagtcatattcgcctgactttccagaactatacgtatcaccctatgacgaacttcgggggaaaaacgagtatttttagtcatcctgtttacctctttctcagggagtttagtctccaggattcccggggcagttcaaaaaactttcatatccagaccattctccagagcccaattgttgaataactgtgccaaccacgatacaacgcgtcatacctagcacatgagaaccagatattctgcctcactttggtctaggtacaggacaaatcaaagatagtcaattacgagttgcaaattgcgaactacgtaatgtaatgttatttttccttactgatattcttattttcttgggggttctattatcttcagagtcagtcaaatatctggccaagacaggaagaaccgtgctgttaagtactgagtctatatccctagctccagacttatcacattgacaatgatgtgtaatccagtcaataagagaatcattgtattctatcttatacatctgacctgatgcctgttcaaaacgttggcagatcttatcaattttaatgagtacgatatctctcagtgttttggaatgcaacggtgtgaacggaattaagttagttctccccataaatgccgccccaaaatgctcattaaacaaaggaagaagcatttcttttattctgtctctatttgtctcaccatcattccatatgtttgtgatattttcactggcaaagtttgatgtcattattatgagacaatctctgaaagacaccatcttaccttcagcatcctcgataatacctgagtcaaatatctggaagaagaactccaggacatccggatgtgctttttcaatttcatcaagcagaataacactgtatggattatgactcaccctttcagtaagagtccctccctgaccaaaaccaacatatccaggaggtgcccccttcagagtggaaacagtgtgagcttcctgaaattcagtcatattaatcgtgatgagtttattctcatccccataaacaaactcggccagcgccctggctgtctccgttttgcctgtgccagaagggcccgcaagtaaaaataccccatcaggttttacaggatctttaagatctgcccgacaaataagaacttgtgatgcaatagcggacatagcatatcgctgccccaaaactcgctgctccaagcatcttaacagaccggatgctttttgttgttcaccatcaaggcatacacccagtggaacacctgtccacccagaaacaacatcagcaacacaatttttatccacacactcaaaaaccataggactgtctttcttatatgcactttccagttcttttctgtacatattctttgatgaaatatcatctgaactttgtattcttgcaaccagttcactttgatgacgccacgctgatttgagttgctcaagctcctcctcaagttgagcaattttatttgcaagcatttcctgacgcaaaacatctgacctttcctgtgtcagcagcgcaagttccccttggtatcttaccaatgaagcttcgacatcctgaatggcatctggtgatgtagactgagatacagcaacccgagaacaagctgtatctaacagacttacagatttatctggttgacggcgcccatgcagataacggtctgatagatgtaccgttgcagttattgcttcttccctgatagaaacattatggtgtttttccatcatgggcaaaagagaacgtagcatttccgctgtgacatcctgatttggctctgctacttttactatctgaaaacgccgggctaacgccccatccttttcaaaatactttttatattctccccatgtcgttgcggctataatgcgcaattctccacgggcaagagcaggcttaagcaaattagctgcatcagtctgtcccggaagtcctcctgcaccgataagggaatgagcctcatcaataaacaaaatagctgtgccatccaaagaattaagttcggtcaacagtgattttaggcgattttcgaattcccctctgacactggctcccgcaagcagagcccccatatcaagggcatggatccggacattcttcagtacatcaggcacacggccagacgcaatttgcagtgctaaaccttctactatactacttttccctactcccggttcaccggtcagtattggattattctgtctgcgacgaagcaaaatatcgataagttgtctgacttccttctctctgccagtaaccggatctaatttacctgtttctgcccgcagagagagattctcagtatatttactgagatattcatgtgaagacctatcggtgggacgatgagaagcagaatgctctgcttcgtctgaaaaagagataagtaactcctcagctacatccatatcacaacataacgcatcagaaacattgagaggaaatattgaatctcttaaattaatcatagtactcaaaaagacagggatatctatatgatcgatttgccatttagtactggcatgtatccatgttttctccagtagagtctgcatcgactcagaaaatacaggtgaggattgtggtactgtattgatacggataagttcactttcaatagcattaagaaccctctcaggattaaataaggactgctcataaagcacttcggctatatatttatgttcctgcaataacttccatagaagatgtagacagtctacttcatgatgtgaccttgatattgcgtaattaattgcagaatccagagtatttcgactttctggagctaatttattaataattggtttcagatagatactcacttatcactcctgtactactggacatattgttatattgccgggcagtctggaaatccaggcacttttctcccagctatgtgtggtaagcagcttattactcagattcacctgtaaatctttaagtttatccttttcctgttttagttgttcccattcgatatatgcctgacttagattgcctgtatcactcagtttgtaacggacaagaatgcctttaatccccattgattcgagaaaatttcttgattctggagaaaaatcctttgtcattaactcactctctccatccgaaaacttgttgataaaatcaatccaggctgtttctcctgtaaacttataggtggcagaaaaattagggaacaaaatgtcaattcttacagagtgacagcttcccggataccaggtaaaaatacctgaatcagcaaaattcatacttcgtatactgctgttacctgttttacactcaagagtcagagttgtacctgttggtttgactcggggattatccggaattgtcgcaggtgcactatctatcgtaactctgtaaggctgtgactcagcattttgtagggtctgattcagtaagtctagttgcccctgtacatttattaattcatccttgttttgcgttcgctctctgagccaaacatcaagcagatcatccggggaaacaatgtcattaatgaaagtaatgaatgaaggggaaaaaggtatacttctttccctgaaggacaacagtctgacaccgtctggatcaagcgctaaaactccgttagacggacctttcaaaaagccaataatgtccttatatacttttccctgcatctcagaataactgagattatgttttcctgagttaaaccggcctaaaacagatttcctccattgttcaccaacccaacaccctgtataagtgacagcatggtcgagaagttgataaatctgccgctcataaatatcccatacagaatcaatcaccggctctctattattgctgttaatgactgagcgaaccttttcaaactcatcaaataatattaccagcttgttttctggatctgaacgcatggcattacgaataagttcaactgatgatgctgtatgtaacactgaattcacggcattacgtagagcattctgccagcttctccatgtggtaacatgagtcagtgtcctgttcatttgactgttattaagaacagaaatcaggtatatacgtaacatgagatcaaattgttctatttgacgtttcattccgttatccactttaagtgaaaacagatggttaagcagtctgaattcagaaagccagtcctgcgccgaactcgttggtatattgtgtaattcatcatctacaaactgaaagaatctatgctcagatgagcgattgtgtataatattggtcagttgcagcggattcattaaacctgaatgtgagtctttacgtgcccttgcaacagacataataaactgtctgaaatgctcctgacgactttcatccaggtatagcacaaaggatgagaacgcctccggaaccgtatcacgtccatatgcctctttgatagtctcataccactgatgaagtttattctgtcccggttgtgtccatattccggaaagatagacagaagagttttcatcttcccaaaagtccgtaattcttacagcaggaatattaacatcttcagaaacaaaccatgaataagacgggtcactctgaaccaactcagtcaggaggtttctgaacacataaatattctcaattccattatttttctgtatctcatctctttctacagcaagtgaagctattgatgatattttatcatgaggtctggttatcttcagtaactcatgaataccaggagattttgctaagtcactcagggattcatctttcatcatcttatcccaactgataagtgatgatgagagcgacagaattagttctcgctttcctgatggtgaagcttgcatgaaattcttcttatattcagtaacgcgccatgagacaggactgatatcgaatcttgttgttttatgaagagattctctgaaaatagatatttatcatctagtgcaggcttaaaagggaaataccgcatgttagacctaactttgtcttcatattttgatatctgctctgtcagaaatgcatggctggtatcaacagaaccatgtctgatgttatacacattatatgaacaatatccgctatatccaacaaaacacaatgcagtcatgactataactgatttaaacgatacattcactctttgtttgttaacatgaataacgtctgaatcatgtatttgtggcagtatctcggaaataaggatatcagcaaaaatacagtttttgtccttctcccccatgagttcaccagataaacagatcccggcaatttccgtctgagagaaaaaaacgttctcaatacagaatgtggaaataaatatgtcaagtgaatactttagacctttcaatctatcaggaaactgcagtatatcatttttttccttgtcacttaatgaatcatcaagcgcatggcatattgatgccattatattagatcttaatgatgataatatgtatgatgaatcatattcagatgcattcgtccctgatttattggttgcccaaaacactggatgccatttttcatgtttttgatagattttttgtgccagcactgaatatccactgatgtgctcacatccactaatcactataaagaccggaatgttgtgatgtaagtgtaacgacagttgttctacaaaactccttgttttttgagacaatgtccgaatataggtgtaatcatgattaattagcttatcagcagaaatgacgagaacaacgccacgaggtggctgtttttacatttacgtgctgataaagaacttatcacagagtttattactcccgggttatcatatatctttcctgacaactccagcacgcttaaatctctgaaaaaccaccaacgaattgtccggaattgttggggagtgctatttacacaattacggtgaaagacaggaagattgatatcttcaagcaaagagttgtttttttctgaatctcccgtaagtaagaaccaaggaacctctcctcttccccttttacttatgatattcagaccttttttgaaatacgaatcaagcgtcaatgctctctttttacgagagaaagactttagaaaatttctgtattttcctgcagaaaagtaattatggatacaatccataataaatttaaaggaaagagtaacaagaatcacagaaatccagtaaagtgcagttgtagtatctgtccagtttctgaacacgccgataacatagcaaacagacagaacgaagacagaaacaaaaaaccagagaaataatgaaaatgtcttcttaagcataaaaatcatctcatataaatcatggataaaaccacaaaatagacagcaacaatacctacaagtaataaatagaaaccaagcctcgatgatttatactttttttcctgagtgaaatattgtttccttcgtcgattgcaacattcaattcacattgtcgcctcagcctcgatatataattattgatttcatcattactacccacggaatatttacctctgaaacccagtaacaggcacaggagaaagacccatccagcctgacttcccgattcgatgactttatcaagtttataaaagaactcgacccccccagtggagtgtccgaaatattttatctgcaaaagattatcacgccattcttttctacagggaagctctgaacacaatattgcctcatcaagcatgacgattacagcataaaatgccgcatcaagttcgctgtcactcaacgacatttttcactattgcgaacagcctcctcaacagtgttaattatattctttctagtactgtcgtaatcactatattcttcagggaaaactctgacagatgatatgagtttaaatactggcatatagcattcaacaatattcaccagcacctccacaacataagtataacatgtttcatccccaaaaatgataaactgtaattgaacatttgcccactggcactgatattcgccagatgagcaacatccatgctcactatgtgggtggttctcattatgttcaacaccactacagagttaaatacggttcttacatatggttgacatgaacgcaatactgcttctcctatcgtgtccataaacatcctgcgattttctgttctgccatccggttctcctgtggagcctgacagatattgtactaggctacgtcttccagtgtctggataaagcatatttcagctcccaaaagtggatgaacgttatctgccaaccgccggatggaaagaaccgttatcctgtttaggcctgcttacggcatacttttcctgcgataatactaactctacaagtaaatcatcaggactacatgaccaatagaatgcaactcttttttgagtctgagctaacgtccataattctgaatgtttatctatctttaaccagattgtattctctcttacctgcaaatcagatgtaacggcatccatcactgtaaacttgattcctggaagagcatgctgaattatcatgtcgatatgttcagatggagcaatcttaatctctggcaatgcaatcagcttattctttctgaaggtatctgaggttaacttaatatagtaatctgaattacttccggcaccgtactcatcgaaattacagatcaatgtatcagtagttatttttctgaattcaacactaataatcttatctcgacatgaatcatccagtattaacttaatataatactgcagatcactgaaacatgagatctgctcataatgattgtatgatagttcgacaatcctagtatctgaaagtccagagttatgaaatgtagatatttcccctgcaaactgacataatgccatataatacaaccatgggtgaatggcatcttcattaatgaatgaagaaagaagtggtaatgtcctattaatagcacatagaattaaaaagttataaagatgtccatcggacactgttcgttctgtatatctgtatttctccagtctatttttgtagaacttaatatccgaatagatctctgcgatcttatttctaagtttgtgattcgcagataacctcatcacgggaaatgaacactcatcatcaatacataatgaattatttccatatatgatccttgtcaggggtaaatactcatagtctgtagtattatctttttcctcatctgtaagaatctgaatatcatattttattcttgtaatatcggcatcctgactgtcatgataaacattacgcatgttacgttcatcatctgaacttatccatctggcagagcctcgtttatcattaacactggagacatttttatgaccggaattgaatctcttaagcgcaagccacaaatccacggtaccgtgatctgaacctttgagatttgtcaggcacttatcctgtaccacacagttacccggatactcgatataataccctgaagataaaacagcctttattttttcaactctgacagtatcttccttaagaagatcatcattgatacaacattcatagtacccctgatgatggggttgtgataactgcctgcttctggcaagcatgaagccatgatgcaagtcaattgactgaaagtgctgaggttgtaaatagagccctgaataccaataaacaagttgttcttcttcttgcatgcagtaatacccgtacaattatttcatactgatactttctttacccatcgatatctttttggaaagaggtaagagtgatgcatgtaatgatttgttccaccaaccttcctcaacaacatcaaccggaatatctaagagtaacatatgctgttttccaggaaatggatagtatccagcaatcacacctacatatttagtcccttcattcctgtctatatgtagcgttatctcctgccccggcatagccacgtatttatcaactttaagaatgccatcaaccttacctgtcccgataaaaaactgtttgattaacacaggattattcattatgtcctgtaatgtatttttatctgaagcctgtaagaataataatgcacagctgttggatatctcgttaagtgagtttaattgcgtatcagatgatatctgaaaagtaagcaagccggcgccaaatggagcatcggcattgttgatagcctgcactctatcctgttcagaatacttatcagaacaggcagtgatgaaaaaggggaataccataaccgctagtagcaggcacttaatagtcatcaatttctcatccttttaagacacggtttatttgttccatagagtcattatctttaagtagttcctcaagccattctgacatagtcattgttgaccaacgtatggccctctccagaagataaggaacaggactggttggttcagattgcctgaaaaaaatagctattttctccagttgctctatagctttctcccttgacatctctttatctgttgagggtgttaatgcagaataaaattcctttttttcctcaggaagtgctgtccttgtgtctctgctatcgggtttgcctagaaattgagaaactgaactgtgatccagtgtttcttgcggcaaaaaacgactcagtaactcggttatctcactgatgatatgtctggtttttgcgaaaatatgatgtatatcttcatgcgtatgaaagaagtaagaagattcaatctcatcaattttgtcaggtagatcataaagctggagaagttgctcactaaccttgcggggattatattttcctacagctcttttgaaggactcaacagagtgatcaccttcgctctctattaatctttcttttccagcttctgacaaacttgctccatgttcaaacgataacaccttataccattcagaaagtgtgatttccttatcctcaagaagaggatatgctttcagatactctgataaatctatatcaagacgaaccaatttactgtaacgaatttcctgaccttcttcctgcgatggccagcatgtagtccagtactgagaaataaactttgcaagatattccaatccgcaatgcatcccttccagagcatataaatgcgtcaaggactccacataccagcaactaatttgtaggtccttactcttattacgtaaagtaacctcacataattttcttacttttctccagtcagctctgcggggttcactgacagcccattccccctgagacatatagtccggatcattttgtcttgcctcccgtatttcgctatacaccggatcatactcaatatcatcacctgccggcgattctcctataacaggaagcagtaatgtatccgtttctattttgttcatttttcatcctattaatacctgaggatatccactgacaattgtccctccgtgagcacagatatcgcccattcgtgcagctggtttgccgcatatcaagaccttaacacttcccataatgacaacatccactggcccagaacaaagagccagggtccccaatgtcgctgccggtaatccaccaataaatacagacggagagcctggtggtaacaatggccccccaacatggggaacaggtggtaaaccaggcgtcaccataggacatacatgcatatcagtaactcttgcagcaggttgaggcatatacaactcctaggaatgactattacaccaatgccgaaaaagaaaaaacacaccttcatcaggtgcatcataatatttattcgactgatgcattaatattccataaataatttttttttctgaacatgacggtgcatagaccggatcatatggggccggacttagactcccctgtgatacaaataatgacacccccagtgcacctgtctgagtggaaaatccaacagactcagcgtgtctaaatatttcccagcgttgctcatcatcgccttccttccatctgacaatagactgtaaaagcagtgaatcctcttcaggagataactgagagataaattgtgccagccatctgattaatactaacgaatctgtattattaatccagaaatcaagtgcatccagccatctcccttttatcagcatttgctcaactgttttattaatttccggaacagtgatattctttgtctctgacatatgtaatcctttatcctatattcacgattccaccttttatctgtgtcattgcagagccctgaagcgtcaacatggtgccttttacctcagaaatagcctggctttcaaacttaagtgtggccgctttgacctctgccgatacctgcccttctatagtaattttagcggcttttatatctatacctgatgtggatatcgttatctcatttgcacccacttttatttttattgactgtgttgattcaagagtaagattcttatcggtgataagactaccacttcccccgctcactttaagattataatctccgttcgaaacttttatattaatattaccatgtacatcattatgtaggtcaccttctttaagaacaagcctgtcattccctctttttatttcagcattacgcccttcagcaatagttaacgacatagagcggttaatagtgctgatcatatccttctttacagtcaggagagaatcaccagatgaagtcactataactttttcctcaccttctttatcatcaaaaaccagttgatgaccttctccttttttaccattcttaacactacgggtgataaatccagacttacaattattctcaggaagagaaaaaggcgatgtattctgaccattatacactgtaccaacgataactggatagtcaggattaccctgtataaaactaaccagaacctcactgccaatgcgaggaataaactgactaccgaatccctccccggaccatacctgagatacacggacccaacaggaggttttatctgtacctgccgctgacttttctccccagagaaagctgattttacacgcccattatcatctgtataatattcttcggagtcagggccgaccactctggcaagtaaaacaccgggaataataggtgttttaaattcacggctgaaattaagtgagcttttattatctgaagcacacaaatcacaataacacaaaccagcatgttcattgtcattgttgacagcattaagatataacgaagtaattctgtaatcctgtttgtccagactgaaacactccccgcatgacaaccaccatgaatccgtttttcctgaccagattttgagttcactgtcacatgatgctatcagtgcttcagaacgtttctttatcaactcacgctttctctctgggataatatcttcataaactcccttactgggttttacatccgtcagtttactttctgactttatagtaatttcactgacattactctcattataacctgaaagtgtcacagaaggacatttgagactttctgtgaaagaccattccctgatatagccatgacgcgattccttcagattttcacagggtaagtgttccagtttatcataagatgctttaggatgagatgcaggatcatctgccaatgtcataatatgtttatctctattatgaacaaagaaatagtaaatgcccgcctcagacaaaattctattaataaagtcaagatctgactcctggtactggatcttatactccagcaaattctgttctttatataaaattacttgtggcggactaaataaactgtcttccagaattgtgcttacaatatctgatggctttatatttgaccatactcttgttcttttaccagatgccaattcggctatctctggttgtaagataataatgcaggtatgttgcatgctgttatcataattatatatcacttttgtgaccacaccatgaatgaaacgcgcaggtaacgaattgtattgttccccgatctcacaactcaaacgcgtgccgtgtaacttatccagagagttgtggtcggtcctactaaagcattttatttcataactatatacatcagatattgactctttacctttaatctcaagtggaaataatgatatatcacagccgtgcaaccggataaaatgttcactctggaatttataatgatcgtcagatataaatctttgcctagtcataatatattctcatcaaaatatacaaaagcaccgttctttataattttctgtttcagaaccgagtgaaagattgaaaccaagcttattgtttatattaagttgattatcattgttaccgggatagattttcacatatattttgaacttaagaacatcacctatatacgatcttatttgttgtctgataaaatagtgggaatcttttcccggcataagttcctgtgcttttctatagtccacaggccccaatacaacatcaaaatgtgaatcaaccacccaacgaacattgcctatgacaggaccttcccccagagtatagaggcaattccccagaaccccctgctcactgggttctgtattttcaaaagtgccacgaaaaggattaatggacactctgatttgatgtattaacgagagtaactgctcaagcccggccagggatcttactggttgtgaatagaatgcaacgtatgccagacctgtcacactaactgtctgaggggtgatcccgcctaaagataaaagaacattgttaagaacattattatcccttctgttttcatctcctgacagatgcattttttgccatgcgagataagaaagacaatacattctatggtcaaacatgtccatgaatgccttaggagcgtcgtcattataacgtaatttcctttcaatcagccattctgtatatgcggcaggaagaacccctgtagccccggttaatccattatcgaataatgtgagatgatactttccgtccttctcatcctgatacagattctctatctgaccgtcaggtgcatctaaagacagacttgatgtaaatctgaaatgttcatcaacaacgtcttcaacgctttcatctggtttcagaatatttttcaataacacacggactttattgaaaaagctgaatttactccggttattaatcaaagccatgttaactttcctgctcttatcggccatacacgacgagtgtgctcctcatgttcaatgacagtaatcatgcgagtaaagctattgacaggggcatgtagcccaagaaagtgatcaaggaaagagcaaaacatgaaacattcagggtgcatatctgcatcctttgaaagagttacggtaatatcaattccacgagcagttacaggcggatatatgccgggtaaacgggatgaaactggtgtgatttgtaactctttaatccattcaataaaaattgatattgagtggttattgttgtagttatatatggatagcatttctctcagtttcattgccccatcagtaccactgagcaacacaaaattaagggataactgagaaacaattctccagttcattccttttaatgccatagccggcaacattcttgatggacggttcagcgcagttattcgcagctgagcaatatctatatcacaatcaaaatcaccatcaggatcaccattattaattgatgatggaatattaccatttgtacatattgcatcaattgaaaggacatccccagtcatgatacatgactgggctccgccatcatcgctcagacgaatatatacactttcctcaaagttccctctttcagaagacgagcgataacatgaactatgccagaatatattgcacgattgtttaatgacagaatgttcaagtccaaataaattttttaacggaaactgcttgactatatcattttcatatctgtgcaatgtcactttatttatatcccagattaagacttcattacgtgaatataaatcggtatttacctgatactcatcctggccatcagataatcgtaggggttcagttttcttctcgaagagattgacaacgggagaacagtttactttaaaaagtctttcagaaacattcctttctattctgtctggctcatacttttctgcactgctttttaatgttatttctattctcacagaatcccctgagcataattcgattccggagtcaaattctatatcaatgaagttaaatcgttctggaaaagaaaaatagtccagtatgaggttatgtatataagaaacgttccctttttgtggaagtgttacttcactctcataaaatccggcaccggatatattagcactgatatcatataacacatcattatttctctgcaaaacgatattatcgacctcatcgcacaataatgtatatattataccagtaaccgttgccggaccattcaaataaaatcttacaaaatcaagagaaaaattagctccgtcgaaaacgtctaaattcaattcaattttccataaggaggacgaattatcatagtgaattcttgctttattaaccgttgcagggacaatagtcagtggatataccgtccgaaactgacagatggttttatatttatatctggaatatagcgatgtgccagaaggaactctataagttgaagttattccactggattttctgtctggttcaaatgatacaatacatgatgaaggatagttatacaaaaattggggagcaagattacgaagtaatgcttccattaactcgggtaaatcttcatctaatctctgatgaatttttgagcttaagaaagcaaaagactccgttaatctctgaacatgtggatcttcagaccccccctgattgtatccaagacgccgggctacctttggatatttttttgcaaactcaataccttgttttctaagaaaagcgagttctttctgatagtaagataatagtttattcatccagtgaaaattctcctgagttcttatcccatttaatacagagtcttaccatgtccataaagaacagggctgtaactgaaaagaaagaataattatcatcactggaaagatattcaacaactggttcctccagccgggactcataacgctggagcatcatcaatattcttgaagaaatttcatcattaacagaatcactatgttcacctgcagaaactacatatactgatgactttatgccatagttcaggacagaactattaacaaacggcagctcatctgtttcaaggtataaaggtcgtgatgataataacatcccgagctcatatttcagatcatctgaaggaacaaaattcagatgatcttccagagagcccggattatcatcacgtaagaactgaagaaacgaatgcattcagtattcttatacaagagcctctttatataagttgtacgtcattggtcccaatttctccgtactttttccatcatctgacggaatattcatctcaattgagacactctcttctggggtaaacgacaattccagaatgagatttgaatcattatcatgagccaacaacatattatgcatacgacacccctgataaacaaccttaaatgatgagtatgcactacctgatttagttgattccctacgtaaaatttctattttaacttctttttcacctctcttaaaaaagttctccagaaggtcttgtatgtgtttagtaaccctaagcttcaaattaattaaatcaaaaacagtaccgtcaattcctgaaaaagcgtgaaatgcctgaggacaatgtccatcaaagtagtcaccactgttttcaacttttgaatttccctttataacttttccacctatctctattttgacaaactccctgctaagagcggaagaattactcataactccgaccataataacctcttaacttacacttgatggtaaatcagcaacaagacgcaatgacatacttaaaccctcaagctgaaaatgaggtttaatccatgcaattgcacgataatttcccggacttccagggacttcaataacttcaacagatgcctcacgtaatggataacgagcctttgtctcctgaccagcgttatctgatgccacaacatattgcatgatccagttttgcagatatgtctgacattctgtcctcgacataaagcttccaactttgtcacgaacaatcactttaagataatgtgcgaatcgtgatgttgctaatatatactgaagctgactggataattttgcattcgcattagcctgatcagtattatacagtcgtgctttgtttaccgactgaacagcgaaaaatgccgcaaaatcagtacctttacaataaaccagaggaataaaaccgagatctgacaattctttttcccgacggtctgagatagcaacctccgtcggacattgtaaaagtcgctcacctgtatgggatacataattataggccggcaatgatttaaccaaaccgccaccttccacgccccgaattgctgcacaccagccatactcctcaaaagcatcaactatccggcaggcaagttcaaaagctgtatttacccacagatagtctttgcctgagttatcttcactaatgtgctcttcaaaattaaacgtttcggcaggtatagtcttcatgccatatggaatacgccccagagactgtggcaaagtcaatcccacataacgactgtcatctgtctgcctgaaactacgccaacgggcataatctgttgtctcaaacaattttgccagatcacgcgggtagggtaattcgctaaatgaactcatggacaacatacccggagcaatagcactcagaaacggggcatgagcactggcagcaacatgggaaatatgctccagcaaatcaatatcctgcggtgtattatcaaaatagaaatcaccaacaaaagcagaatacggtgttcccccgaacgttccatactcgctttcataaatattcttaaataagacagactgatcgaaatctgaggctgacttgaagtctttgagcaattcctttttagtacagtgtaacaccgtgtattttacattttcagtaacgctggcctgaaccagcttataaagtcccgtccatgctgattctattttttgaaattcagtcgcatgcataatcagactaagctgctcagacatcaacttatcaatatcagcaatccgcttttcaatactaccgattaaatcgctgttaatgaccaaagaaccactggcaacttcagcaaggaaattattaatctgtagtttaaacctggtcttttcagaatcctgtctcacagctctggtattatttataatctcttcaagacaatcatctgtagcatactgagtttcattcagccctaatgttgatgcaactgtcatgtttattccttactttcatcgttttcaggattgccattagtagtcaccagcaattcctgaagtttttctttcagtttctcattacttgcagccctgtttcgtaggtcacaaagatgcaacctcaattccgataattttcttagacactcaacctgttgaatcacattatcgggagaaaaatcatctttgcaactaaacctcagttcgacatccagttttccttcatttcccgggataacactgtccaccataaaatgagcagtcggactcattgatgccataacttcatcaaaattgtctttatctatactaatgaattttcgttctctcaatggtttttctgacgaagagtactcacccaaaaccccgatgacaaggggtaactctttcgcagtttcagcatctccggtttcaacatcatacgttatctgtactcgtggggggcgggttttatcaagtttatgttgtgtattgctcatgtttctatcctacaaacagcttttaaattcttttttattaagaacactataatctactatcataatattgatgaacatagcataattatatgacctaaataccatagctaccgcacagatgttttcgaaagtgaaaatatctgatataaagttatatctttggcaaaagattgtatcaatctcttgttatattcatggattctatatagtgataccataaaaagaaagtgagcatgtgatacatttttgctgattaatgatataactctatataattttcgtatttactaactaaatagctgcgcggaatagtaggtcactttgagggaactcagcccggattgtgcgatctgatcaatcgccaaaaagaaaaatcaccaa

SEQ ID NO: 196 - DNA, 4025 bp, Escherichia coli
gcgcggaatagtaggtcactttgagggaactcagcccggattgtgcgatctgatcaatcacccaaaagaaaaaattaccaagcggactgagcgatgccgatcatagcaccaatccccagaaccgaacgatgcctgatgcagaaaactatcataaaacaaaggacaaaaaccacgcccggcggctcaccgccatgctgatgctgcatcgtggtgacgccgtcagttatgttaccagaacgctctgctgtgaccgttcatcgattgtcgctggattaactggttcacgctgtcgggtgttgaaggcctgaagtcattgccgtcaggacgtgggaggcgctggccgttcgaacatatttgagcattgctgcgtgagcttgttaagtattctcctggcgatttcggttatcagcgttcccgctggagtaccgaacttctggcgataaaaatccgtgatgttaccggttgcccgctacatgtttcaaccatccggcgatggttacctgctgccggacttgtatagcgcagagccgcgtcgacactgtgtatccgtgmcccccacaaagaagaaaaaatggccgctattcatgaaacgctggcgaaatgcagtgcggaaaaccccgtgttttacgaagatgagtggatattcatctcaacctgaaaatcggtgctgactggcagttacgcgggcagcaaaagcgcgttgtcacaccgggccagaatgaaaactattatcttgccggtgcactgcacagcggtacgggtaaagtcagcaatattggtgggaacagtaaatctttatcattatttatcaggatcttaaaacatctgaaggcgtaaagacgattacgctcattgtcgataactacatcatccacaaaagccgtgaaacgttgcgctggctgaaagcaaacacgaagttcagggtgatttatcaaccagtttactcgccgtgggtgaatcatgtcgaagggttgtggcaggcgcttcatgagacaataacccgaaattaccagtgccgttcaatgtgacagttgttgaaaaaggttcgtcactttatggataccgccagcccattccccggtggaaaacatgggctggctaaagtgtagtggcattaggatctgttatttagcacggtgcgattggcatcactcgccgcgtcgtccagcgtcaaagagcagacatcaggctgtaagaaaggattcgtcggcacatcatcaaacggttggcccgcattcaacctgtgccatgcttgctctagtgtgcagtctcttcgtagtacggcagcagcatagcaccacatccaacttttcttgttcgtcaatcaacgcgatcagcgcatattgactgataaacgtccgttgtgccggagagagagcttgcagacaggctggttcgagcggaaaatgctcaagcaattgccccaccgcctgcaacaacacctcagagcacgccagccagtcactaagcgtctcgagtgcaacaacgaaacggtgccccaatctccagtagatcgtgcaacccgtggttgccaccaccatcggtgcatcgcggagttgtcgggctaactgggtgcaattctctgcgatgacacacttacgcaccgggcggagaaacgcccgtgacgcggggtgtaagccacttcctgtaagcgtatcaagcagcaccatgcccaaaccactgctgctcgcctgcacgtcaaaagtatgaatcaggccatcctctgattgcagcccatcaccgtgcgattcatagctgcgctgatcctccatgcgaaacgtgaagccacccgctagcgccatatcgcattgccctgttcccggtgatcgggttcagatgaatacctgtaaaattggcccggcttatatcagtacacatctgttgatgattgcactcgctacagaatcctgaggctctactctcgtcgcacggcggcaaacacactggattttattgattgtgttattgaagaaatgcctttcccgatacagcgctttcagacagaccggggaagagaattttttgccgttaaagtgcaggaaagattaaaagaatacggcatcaagtttcgtccaaataagccagcgtcgcctcatcttaacggaaaggttgaacgttcccaaaagacagacaaagctgaattttacgctaccgtagatctttctgctgatgacctgaaggaactgctggcagaatggcagattactataactgggaacgtcctcatagcgctcacaacggtaaaactccgatggaacgctactttgaacttgctgagaaaacaccatactctgatgccgttcatgcaaactatcagcccaatgaagagcatatacaggaacagaattacaagcttgaacttgaactgagaaaattaaaacgatgtctatgaatcacacagcttatttatatccttatttttttacttacctgtggacttacttggctttagtcccgaggtattgccaggagtatctttattatcgcgtcggcgttgatccggttttcctgtcgatttagcaatcggttttggaccaagtttaaggccccatgataattatcctttagaaatgtaagagggaactcctcaacattggtatattctatactgagaaatttttcaatgggaatgttcaacggccgaatgattaactcgatattgtgagcaatgtcttttttggcacagagcgaaccgttagattgcgcgtatttttatggaaggagatcatccaataacggttactcaccgatctcctttatggtaatacgcacctgttttattaacatatagaaaaaattactccggcatgttttatctttttgaagtcaggacatttaccagttcacttaaaactctcttttgttcttcatcctgaagatattgaatccggaatttaatctcttctgcaacccgtcttgtattggactcattaagtatttttgttattcgctgtctctgatgttcaggctggccttccatatttcgtaaaaccagatgaaataatatatcataaagtgcgcaatgccatgaataaccatcattggttaaaataagctcccaaacccgctcctgctcagcaataagctgcagaacaaaggattcaacctgttctgattgtccggggacaacccggtatagcggcgcaatcacagcaaaaaacagttcatttagccaggattccgcttccttctcgctcctgaaagatggacagttctgtattcttcgttcgtattcacgggtaacctgctccggaatatcctccggcggtgtcaaccacttattcctgagcaatatactggttgacggatggcagcaggctatttcagcaataatttcacgtaatgcctccgggctgaacttcttcagctgattgtagtgctcccgggtaaaaccgtgatcatcgcataaaagttgccatgtcattgatatactgtttgccattcctttcttcatcattaatacctgttacatgaatatcaacagaccggtgtaccttttctgaatacctccccggacggactggcaatccccattctcctcagcgtggcatctgcagctttcgccacttcgctgatatccagcttttcaggtagcggcggggacgatatctgcgccaggcaataattcctgcgcaacaacaaccactcccgttgtgcttctgtacattcaacatttcccataacaaaaagccagcgggcagaagctctgcgccagcaaccagcagcctccagtttttgcgcaaccatgtcttccacgacttccgggggactctttttcctgctcaaaacatcaactcactgaaataatatacatacctgacggtctcagcgaaccgtccatgccgggctgaagtcctcttcctgaaacaattccgtcagcccgctaatctgtttcagtctcagtacttcatcctggtccatacccagctcagtgccaatgcgttcatccatccagcccaggcgtgaaagatccctgacaatatcggacagggcagcataatccggtaatgaccggggkcaccacc

SEQ ID NO: 197 - DNA, 3905 bp, Escherichia coli
  modified_base (3)..(12): a, c, t, g, unknown or other
ccnnnnnnnnnngttysctgacaatatcggacagggcagcataatccggtaatgaccgggggtcaccaccggttttcagtttcacttcagaagtcatcggcagattcggtgttgctgtattaaatcatgattaacagtgacgaaaagaacatcagtgtgataccggtacccgggaaaggtattccaccgcgcggataattgccggtgtcacatcccaccgccgtttcagaaccggcaacagctcattaaggtttctgatataacgctcagtgaacagccgttgtccgtccctggttaaatgaaaacctgactgattacaggtaatggtgatatgacaggtatcgttgccaatatatacggcttcctggggtctgaatctgacattccagtaccaggaatacggggaatgattaagatgaaaaagacgcatctgaatgtcactgaataatggattcatcataaataaaatacacctgataataaaatatagtggaaaaccagaataaagaaatggtccggtattatgcaaaatcctcaaggtggcgactgatactgttttcacggtaacaggtcaccagtaattcacgggttgcccgggtgaacgccacataaagcaccggaatcacttcagactcatccgctgcaccagagtgcacgaaagacgcattgataaccgccacatacgggaactccagccccttgctgctctggtacgtcagtaaatgcaccacatccttacgtcgcgagtatgtcttcttgccttccctgtcaaaacaggtggcaaaaggtaccccgcgtagtgtcataacgtcctgcaattgttgcgctgaacgctctgtcggacacagcacagccatatcactccagtgaccacacaggacatggcgcttctccagccagtctgcaacttgtctggcttcatcacgttcagaagcacaacgcaggatttccggctctgtaccctcttcaccgcccgcctgtggctgaacgagcggtatttcacggttctgatgtttttcaaaatactcgcgggagaatgcataagcaaagtgcagaatgcgtttcggattacgataattgaccggcaggacagaagtgcgtccctgtgcctgaatccccacactggccagagaaaagttcagggcccgctcccgccggtaaatggactgggcgtcatcgtacatcaggagcagtgaacgggatgcgttatcaaacagacgggcaatcagggccagccagcgactgtcaaaatcatgcccctcatccaccagtacagcatcatatccggttcgggtgatttttccgctgttcacggcctcttccagtgcactgaagcatttatcaggatattcttttctgtcggccgtcaccttaataccgtggcgttttaccattgaggcacaccagctgtgaaaatgggataccgtaacccgtgacgccagccctctggcttcaatgcattcccgcagatagctggccaggtaatgttgtagcacaacaccagaatctttccgggtgtggtttcagccaggtaaaggcaacggaacaaaagaatcatggtttttccggaaccggccacaccatgaatgacacgatgcccgtcaccaatatttctggccagaatctcctgctgaatatccataattttgatttgtgagttctgtttcacggtcacttcaggaaacagatgggcgcgcagaatatctctcatccggggtgtcacccgggttctgaatcccgtggtaaacatcccggcaattttttgccggaatacttcaggtaaaacagactgcgtcatttcatcctggcagattgtctgtgctgaaggaaaaattttttccaccgcattctcatcattccctgccagtgtcttcagttgctgacgggtaatgcgggtaaacaccacaccatacgcccaggccaggttcagccgtcccttatactgaccgtcattctgccgtaagcacgggtttgcaggtaaggcattaaccgtatcacaggcataacgacgaacctgtaccagcggattgatttctgatttcagaagaccgtcggtttccagcgtgacctgctcctgatttacctggcgcagcgtggaaaccgtccagtccttgacctccagaaataccagtccgttctccgggtcaataatgacaaaatccggatgccggtttttccgtcccaccggaatatcgtaccagacaaggcagtcatcattcagaaagctctccagtcgtgaagctaccctcctctccccgggcgtcattctctcctcagtggacgccgatacatttatcagtttcgccataaacgcaccttaatctgtgaacaaaaaaataatcaccaccgacatccacggatgttatatcgtgggtatcgctttattcagaaataaaaaacagaatcattaacatgaccagaatactgtgaaccatgctgcagggtatctgcagatatcccttctgttatatccggccggggtaaaatcagaacactgactgtcaggcagcttcattttccgcgtattccagactctgcaggtactgcagcgccgccgggtcagccacatattccacctgcccgtggtgacgctccacttcattaatgattttctcaagcttcacgcggaaaaattctttacgcaggttaatcctgttaatgcggtatttttccagactgtcatgaagtgttttttccagcgcaggcgcatcatcacaggaaatcatggcgtgaacatcaaaatcaaacggaacagaagcaccacttaactctttgaccctgtccatgggttccagccgtcgggtcatgccaattttaaagacatcctcaccaaacgaaccaatattcgaaatgatataaacatgcccctgtttcgtaagctgagccatggatttagcacgttcatactgcgcatgcgcttcctgaattttctgttccagctccaggcgttgtttctctaactcctccctgtgagccccttctgctgcgcgcagcgcctcctcaatcagtttctgctgctcagcaagacgccgttcttcctcttccgcttcccgctggcgccgttcaggttcatcctgacgctctttttcttcacgcatctgacgcttaagctctgcctgatattccttctcttcctgcgctttttccagcaatgccactttgtccagaaactgttgcctgatactctcccggtcagaattatcttccaggttaagaaaggctattttctcactgacagcagcgtaagcctctctttccttacgaagctggtcatatttgctttgccagttattaatcgttacaccagccagcagagtcttcgccttaaatttccaggcggaatcaacaatccgttgcattgcacggctggccttctgtctggcggtatgaaattcctcacgacgtctggccagttgctccttttcctgtcgtattccccgggctatcgcggcattgacagtttcattaaaaccccgctctctctgaaccagctctgaaacggcctgctcaaaggctgctgttttctttctgagtctccggtaaataaaaaaacgaagtaaaattgcaaatacagtaagcaaaccaaaaaacaaaccaataatacctgccggattcgatactgcatcaataaagcgctcattaagatttatcagcgccctgaccgccacataaatcccccagagaataacgcaaactaaaatcaggacaaatcccgctgcattatcatcttttttcctcctgccatgactttcctttattttccttctcagtaactgaatatctttgattaacgccctccggaaatatttatacccggaaggttgtccggctttatgatgccagccactacaggattaactgacgttctgtcagatatcckcgcatccggtgccaggccgtcaggt

SEQ ID NO: 198 - DNA, 255 bp, Escherichia coli
tacccggaaggttgtccggctttatgatgccagccactacaggattaactgacgttctgtcagatatccgcgcatccggtgccaggccgtcaggtgttcccccacgctgcgaaccagccgctggttattcataaaagacgccagcatagccagcagaagaaaaacaccgacaagacgggcattaatacgactgttcgccgttgcatccggcgtatcgtacagcgccggtttctgggcggagttagcagagaagaa

SEQ ID NO: 199 - DNA, 108024 bp, Escherichia coli
  modified_base (49379)..(49379): a, c, t, g, unknown or other
  modified_base (50002)..(50002): a, c, t, g, unknown or other
  modified_base (108016)..(108016): a, c, t, g, unknown or other
  modified_base (108019)..(108022): a, c, t, g, unknown or other
aaagacgccagcatagccagcagaagaaaaacaccgacaagacgggcattaatacgactgttcgccgttgcatccggcgtatcgtacagcgccggtttctgggcggagttagcagagaagaagcaggcataatcccggttcttgtagtaagagagcggaataaagcccagattcgcgaattcaaactcccgcgtttccgggatcatcacctctgacggaattttgacctgattaccggttcccagatcatacaaatggattggcaaatcctgcaccgcaccaccggcctgaggcccacggatctgaacacaccagccgttggtgacaaaactgcgcaccatgttggctgcaaaggcaaaagacgcgttcgtccagagatatttatggtggtccggtcctttcacctcttcaacatagttaaagctgcggacaggtacggtatccgggccatacggcaggcgtcccagtacacggggcatcaccaggccaatatagcgggcatcgtccgtctcacggaaagcattccacttgatgtactcggcacgctcaaagtggttgccaatatccttgatggcagccacctcttccatggtttctttctggaagaacgccgggccaactgaaccaataaacggcatatgtgcagatgccgccacccgggaaatatttttcagcaacgccacgtcctgtgcagatgcatcaaactcccaggctgaaaccagggcggcaatgggctcaccacccggcgtgtcatactcagccacataggtctgcagataaaggccgctctgaataatttccggcgcatcctcaaaatcctgacgcagatcgtctttggacagatccagcagctcaattttcacattacggcggaagtccgttttatccaccagggacttcacgccccgccacagcgactccactttctgaaattccggatgatgaagcacagcatccagttgacggctgatctgataatcaagctctgcaatatgatggtcaatcagcgctttatcgagtttttccacctgcgtgccggcttttgccagacactccataaacacctgcatccctgccgtcagacgttcatctgcagatgcttctgacatggcctgtggatcctgccagatatccagtgcactcagggcagataccggactcaggttaattttttcaaacagggaagcatatacgctgtcgccggcatgcgcttcagataccacgctctctgcaacgttcttttctttctgtacagacatcagcattttctctcgtaatccgttaaatcacgccttttccggcaccagtgcacgcagttcatcacgcagcgtctgactcagtgccgggtcacgcagaattttttccagctctttacggaaagtcacgttatccagcagattggctttcaggtcccgcagaaggctacgcatggccagcatggctttaagacggggaatctgtcgggcgacctgctctggcgtgaaatcgttcatattgcggaaagtcaggctgatgctctcttcagagccatcaccggcaagcgtgttctccacattcagatgtacagacggggagatatctgccagaacatcattaaaattgtttttattaatatccgtttttacacgctctgacagtggacgctcttcctgtccgttactgaaatcaccggcaaccagaagtttgagcggaagctccactttcttctgcccaccccccgtatgtaggtctaatttcagatttacccttgctttcgggatttcattctgaaacgaactgctcatggctctctcctgtgaaacctgcatctcaggggttccatcaccgcagatgcctccccttgtgcactgatttaattttgatcattataggacgaagatctgaaaaatctcaatatgacagatacatcgatcgatataatgcaaataatcaggactttattctatggaatgtcgcaaaataatgaatattcaaagcttataaccattgttaatgtaaaaatacagaaaattattccacaaaacacttttgatacagccagttaacataaacactgtattttcttgatttcagtcattgaaaatcacaatgagtaaagtttcagcagcattgacgtgatttctggaaagcgggaaagatatggaggaagggcccaacaaaatgcaatgaaagaaggagtgaggggatttcttgtaaaaacagaagattaacaaaacacatcaggaggcagagactcctgattcagtgctaccacatgaaaatttagttaactgttaccgttctgaaatctatgtcagaagatattccattaccgaaaatcaatcagcgatacagagacgatcatggtgcgcttgtcaccgtgaccagtgttgaggaaacccgggtggtgtttatgcgggacggctatccgcatccctgcatgcgaccgatgtacaacttcctgggaaaattcaaacccgaaccccgggaagaaacagaataaaacgaaatccctgccggcaatcacattgcctgatggcagcataatccacttattaattctcatccccggagacaagccctgaaaaccactccgggtgttcactgtatgctgtgttcagcgcatcccaggaaacgttgatataaaagctgtcctgcaatttccgggtaaccacctctgccaggcggttccggttatccaccagtccggcataacctctctctgccagccactcattcagttcatgttccagagacagattgataatatcgtaatcggaccttgccattcccgtttccttagcacatgttttcaggcacggggataaagtataaagaatgtcgtactgctgctgccagagcaatattccccctgatggtcgtatcagagatggtatgcaggtactttgcgggttgttcccgtcaggttatcgtgcacctccacggtcgtagtcaccaccggcattccggcctttctcagcctcagaacatcagccgcaatacgctgactgccaaaccagaacaggccgtccagtgcagtcaccagtaaacccgcctccagcgcatacttcagccgttcacggggcactttcacttcccgggcaacctgctgatatggcaatgatgtgttttcattcccaaccacgcgacgaatacggtgagacagatgataccggtatgtatccggcacactggaaagactggccttcaggctgtacacgcagccaaaccgtttatcgttaaacaccacatttttctggctgattccccattcttcacgcagcgcagcaatcagttgtggtgtacgggtaagcaacaagcgaaaaggcagttcaaaactggtgacgtaatccacattcagcagtgcaatacgcagccgttcttctggcccggcctctgtctgccggcactcctccagaacatcctgccactgctggcgaagacggggcgattcgttccgttctgtaaaacagtatttatccgccagatagtcaatttgtgtacgcatactgaagagcattccgtataaagattcagctgacaaaactttatcagtccataagaatcaacggaagcaccgatggttcacctggtcatcaccaagttttgccataaccggtagcaatgatcattctgtgtaactatttgcccgcagatgatgatgtttatcgatgtctcccctgtctgaatgtcgcataaagaggatcatcagcagacacagccagtgagccaccgtccgcggaacaaagcgccggaccacatccggatccggcaggggcatgactggcatgatcaagtaattatgtcgcatctccctcactcctggtcccggagcaaatctggctggtatctgtaaacatacttcgtacatgccgctctgcaataaatccccgtgccacaggcttcacagaactttttcccggaaaaatgctgcccgcacatcacacaatgccactccagcacgacaggtaatggcgataaaaacatcgccatatcatcaatgtaaggatgggatttttccggattcagcaccacgcaggccgccttctgttgcgcgctcagggcatgtaaatcgtgctcaaaccacgccccctgagcatctgtctgcaaaatcaaccggccacgacaggaaagacagaaacaatgccggatatttctgctgagcgcagaatcggcactgataatgtgctcacccggcgtgatccccagccccatttttatgccgttcatcctgctaccacctcctcactgaagcgcccggtctggcagtgtgtgcagtactgctccccataataatcgtggtgacattgtctgcagtgccagctggctttacgcactacgggtaaggcgtccggtacgaattgccgtaagcgtttaatcaacagtatttctctgcgctccggtctgacataagggcactsmtgaccrtgcgctgtcagcccgtcgtcagtgtgttcaaaccagggacgttcagtgtcgtattgcgggtggtatctgagagcactgccacagaggtggcaggtgtaacgatcgtatggcgctgtctgtgcggtacgggcaccggtcagacgtccgttgccatcaagtgcgagaaaggattttgcgtacatcgtcatattcctcagccgccagacgacacgcaggcaacagccgtcccggtacgggcagcgtggtcagggtgtgaatggcggttttcagttcagtctcagaagggaaaatcagtgtggtcgctgtgaacacgtcatcacactaaggtcagataagtcgtctgtcgggctcagccacgactgcagccaaagttgcgctcaccggtgccgtaagctttggtactctccttcgccagatagtcagcacgctccagcacctgctgaaagccggtgtcatcatcgcgttccagccacaccgccggcctgaccggaaaatgcgccagcgtggtatgatctccggtatccactcccagggcactgcaccacgcctgtttaatcatcccggccagtgatcccggagcgcggtaatcgccggcacgacaccaggtatcccggttgaccagcagcatcaggtgatagtgtttttacctttgcactccccaaactcccgggcccagacgtaatgcagggttgtgggatgcacgcgtttgccttcacggcgcttacgcttctgataagcatcgattcgggctttcagggcattgatgaagcgggatatcactgctgcgtcagttgctgccggtacatccgggagacgcaggtcaatccgcaatgccgtcagacggggatgaacatccagtgcgcgcagcaccgtctcacggatacgttgttgccagaaggggttgtactcgtatgtcatggttaaatctccgtatggtttcgttcatacggaataaccacgccgtaaaaaatgcgcagagtccctgaagtgacctccaaccgggcaatatctcaggcactctgtgataacccgattgtcgtctccggactgacggctgaattttcagcgttgtttttttaatgccaaaaaccggttacagataagactgtgaggagggagctatggtgatacrcaaaacggtgtgcagggattgtggtaaggcaattactcataatacggatgttgcccattaccggaataccgatcgtcggcgctgtctactgacgtcactgctggtgctgactctgcctgtcggtttatgccgtcaatattcaacgcaccggatccccggctaatacgagaaaacctcagcagaggycgktaatrcccgaaaatcrgcccattaycgcccrcacctccgtacaccattcccttttgatttcgaattctttgttgtcgctataccgcttaacgttcccggtattacctcggcctccaacaacaggaacatattcagctttgcagcaaccagagaagagcaaaagaatcacaggcatataacgcccggcacaataccgctgtgattaccgaacgttcaggtaacatatttccagacagaagccggaacgcgatcgtaaagtttgttcatggttagttctgccagtcggtgatcaaccgcagagttgaaggcttccagctccgcaagggtaagtttataacgtgtgtgggaaatcactttttccagcgtctcccgggatgaacaacgacggaactgatacagccagtcttctttggttttaacttccattagcctctcatcactttatgctgcaattaacgtgatactgccagcataccgcacctgactggcattctggtacccaccccaaactcattactcccgcaccaccacttaaccggtctctcagactgtcactcaccaggtcggatacgtttaccgctcagacggatgcttaatgcactctgttcacgtgtgttgcaggtacgttttatatacgcaggttatacgccagctatcagggatagccctgtgagtacaacgtaatctgttgctactgcgttctcatacccactgatcacactcacagtgtttatttcacagatatgaactcatgtgtttgatctctcttatatatttataataccaatcagacagtcttatcccaacagtgatacctgtccctgcccacaaggcacgggctgccccaccgtaaccgccccgtaaataactctgcaattataagaacgacggttcttcccctcatcctcccgaaaatcatcccttctctgtcgtgcgtacgcgcgagaaacatcgtttcgcggtagccaccgggtatcccagcatcatgctccctgtttatctcccgacaggaatattcccctactcattttttacgtttctccccagttgttatgccagtgaaggtggtgcgtttttcatcaccaacgccggttgagattaacaacatccggaggaacattttcatgaataccccagtttcgctgatggatgaccagatggtcgacatggcgtttatcactcaactgaccggcttaaccgataagtggttttacaagctcatcaaggatggtgcctttccggcccccatcaaactcggccgcagctcccgatggctgaaaagtgaagtggaagcctggttgcaggcgcgtattgcacaatcccgtccgtaattcctgaccattacccgttcaaccgcagcgaatacactatccggcctccggaggcattttgctgcgtgctaaaggagagaatattatgcaaaaacttgaaaaccggtgtgatctgctgctcacccagcatcagaaatggatggcaagtgtaacccggtttattgtcgctcacggaatgggctctccgcatcttcatggttatcatcgcctgaccctggcccactttttctgccggaaaaaggcaccatcatctcggtggcaccacagggactctatcaggtagtcaacccggcaacgccaccgttcattcctgccattcaggaagggttaatgaccagcattcagactcatgaaatcatgttacttacacattttaacctgggtggtgttttactcagtgaactacatcgtctgggagaaagccgactggcaaacaggctgaacagtctgctccggcgttttgacgatcgcgatctctaccacaccctgatatggctgtgctggtatgatctgatgtgcgcccactccatgcagccctggactgaagagttaaagcataaatcacacgcagaacttgaaagctgggctgtggcgcgcaaacgggaaaagcgcgagcttgaactgatgattgacgagtacctgttatacgcctgttgattcataatcactcccgggcggtacgtagtcagtgataccggaatttccggagagggtcgcaggtatattgtttctgtgcaattcatggttattcacgttggatgtagtgattgctgcatccaatgctatcggaaagagattaaccagcaaatggttcctcaaatcgtattgatatttacccggcgcattgagcaccaccatctgcccccgttcccacatcaaacggctggaccggaaaacgatttgcttttcatgctccgtggaaattcacgaaaaagttattgggtcattcatcgaaaaaaacatattctgctgactggagtcatcacccagaaataaacgtcaactgaacaataacgattttttctttgtgggattccatacacttttccatccccctctgaaaattagtcatcaactcaccaacacatcttctgaaatttgtattaaacttattgcttaaatagatgatataatatctcttccattgcacggaatcagcaaaaactgtcattctggcaatcttaacaagaacatttatcggttaattttatcagtaaacaaaggaatatcatactgataaaatgaacattcagggtaagatgatgaaattcacatgaaaaatgctgaagattatttatttcatgcagataaacgataaaaaacaagagagtatatttttcagtgtaagagtcaattgttcatctccactgacgatcacggtcagcatacaaacaaagtgagtcctcctgcttagtcattgcgtatcaaaaactaaaaaacaaaagattctgcaaacaacgtgacattttttatgacatttcccgaatacatgtatatcaataaacggtagtcatcgttgaattaataagtcttacagagctatacgtagcttataaaaccactcaacgaccatcatcacctgactatttagcgggagtatcgtctgtataaatccataaataataacacctgttattaaaataagaatgctgtcagccgtaaactattaacacaacacctgtccactctatctgttcttttaactcaaccggcgtcgaaaatatttcctgattagtgcatcatagtcttcttttttctttctcaaccatcaaaccaaacacaacattcacaaccacacaataaaacaaaaccaaaaacataagattaacaatgccagtcaacaggaaaacactgaatattgaggtgcgctgtaacctggacagcgcatacggcgcatgtgatcaacacagcccattcttttctgtcatcccccaaatgcagaacaaacaatcataaccaaatgaatataaaagaaaatatgatttttcaccatcataaaaacatcaatgtatctttatataaaaatactgataacatgacatagacatttaaaaacataaacaaatcacaacaaaaacatttgataatcacttagtgacaaaataaaattgagacgattttgttataagagaggcgacatggagtgagataatgaataacgaacagatgcttatcaaatgcaaagatccccgtaaatgtcggttttatgccgaatatctgaatcacaaataccccaatgaattccctcagtttgcgcctgacaacccacaaaactgtatcagaaatgttaattcgtttttaaaagaaaagtattataaagattcaaacaattcttttggtgtttttggttcgactgcagaagaagctctcagcaaagaaattaatgaacttgaaattattgcagggcaggcaatactgcctgaagagagttttctctggttgaaaactgacgaacttgcgactttctttacctggactactatttatctgtcgaaggaagaccatacaaaattcccgaaaataaaccataattcatcaggaataaaaaacggaattgaagtcagaaaaatacgaacagttaccgatgaaacgttaaatacttacaaaaaaagtaaccttccggataatccatcatcccataacgaacgaataaaagtaatcatttcatattttgactcctgccattctttaattaataaaaatgcaaaaagcatatacctcgaggaactcagacaggcgtggcttaaaaagaaaagcgcttgtcaaaagtttaagtggctccttcctgacgatgatgaaatgtgtcagtggttctggacaagactgaaacaaaaacaggatgaaaaacatccagtacataacccagtgacccggtggttcataccatcttcaacgaaagaatattatcttgcctctcttgtcgcctttgctttatggaaagaagcgcctgataccattgaactgttcagaacacgaataaatcatgcctggcatcagaaaaaacaaaaggacaaatatcggagtgatggtaaaaaggccattaatatacatataagaagcaatgtgaaagaaatgcttgatgagctcagaactgtttacggtctgagaacaggagagttttttgaaatgctgattacagagaaatatcttgaacacaagcgaaggaagtaattcattacctgttacattctaaataatttcagacagatattatcgttgtgagtcccccgccacctttccggtgtgcggggttttgtcttttttcaccgggaatacatgtatgaatccgtctgatgccattgaggcaattgaaaaaccgctctcctccctgccttactcactttcccgtcacatcctggaacatctgcgcaaactcaccagtcacgaacccgtgattggcattatgggtaaaagcggggccggtaaatcttcactctgtaatgcactgtttcagggggaggtcacaccggtcagtgatgttcacgccggcacccgggaagtgcagcgcttccgtctgagtggtcacggtcacagcatggttatcactgacctgcccggggtgggcgagagccgggacagggatgcagagtatgaagccctgtaccgtgacattctgcctgaactggacctggtgctgtggctgattaaagccgatgaccgggccctgtctgtggatgagtatttctggcgacacatcctgcagtgcggacatcagcaggtgctgtttgtggtgacgcaggctgacaaaacggaaccctgccatgaatgggatatgcaggtattcagccttctcccgcacaggaacagaacattcgtgagaaaacggaggcggtattccgtctgttccggcccgtacatccggttgttgccgtatcggcccgcaccggctgggaactggatacgctggtcagtgcgctcatgacagcgcttcccgaccatgccgccagccccctgatgacccgactgcaggacgagctgcgcacggaatctgtccgctctcaggcccgtgaacagtttaccggtgcggtggaccggatatttgacacagcggagagcgtctgtgttgcctctgttgtccgtacggccctgcgcgctgttcgtgacacggtggtctctgttgcccgtgcggtatggaactggattttcttctgaacctgtcgtggatgatgtcctccctgcctctgagtctgctcacaaaagcgctgttttcgttactgtctctcttgtccgtgcaatagcctgataatagaataaaacgatcgatacctattttatcgatcgtttatatcgatcgtcatgctaataataactcctgttagcaacgtgcgcagatacacacagacatgagattcagggaacaacagagccacacgtcagaaacttccgtcagccggacctccggcactgtaaccctttacctgccggtatccacatctgtggrtaccggcttttttattcaccctcacyctsatgtaaggaaaagctgatgaaacgacatctgaacaccagctacaggctggtatggaatcacattacgggcgctttcgtggttgcctccgaactggcccgcgcacggggtaaacgtggcggtgtggcggttgcactgtctcttgccgcagtcacgtcactcccggtgctggctgctgacatcgttgtgcacccgggtgaaacagtgaatggcggaacactggtaaaccatgacaaccagtttgtatccggaacagctgatggcgtgactgtcagtaccgggcttgagctggggccggactctgatgacaacaccggcggtcagcagatagcccggggtggcactgccagaaacaccacggtcaccgcaaacggtctgcaggatgtcatggcaggtggcagtgccacggatacggttatcagtgccggtggaggacagaatctgcgcgggcaggcttacggtactgtccttaacggtggtgaacaatggatacatgcaggcggcagtgcatccggaacggtgattaaccagtctggctaccagaccattaaacatggcgggcaggcaaccggaaccatcgtcaacaccggtgcagaaggtggtccggagtctgaaaatgtgtccagcggtcagatggtcggagggacggctgaatccaccaccatcaacaaaaatggccggcaggttatctggtcttcggggatggcacgggacaccctcatttacgccggcggtgaccagacggtacacggcgaggcacataacacccggctggagggaggaaaccagtatgtgcacaaatacggacttgcgctgaacacggtaattaacgaggggggctggcaggtgattaaggaaggaggaactaccgcgcataccaccatcaaccagaaaggaaagctgcaggtgaatgccggcggtaaagcgtctgatgtcacccagaacacgggaggtgcactggttaccagcacagctgcaaccgtcaccggcacaaaccgcctgggagcattctccgttctggcgggtaaggctgataatgtcgtactggaaaatggcggacgtctggatgtgctgagcggacacacagccactaatacccgtgtggatgatggcggaacgctggatgtccgcaacggtggtgccgccaccaccgtatccatggggaatggcggtgtactgctggccgattccggggccgctgtcagtggtacccggagcgacggaacggcattccgtatcgggggcggtcaggcggatgccctgatgctggaaaaaggcagttcattcacgctgaacgccggtgatacggccacggataccacggtaaatggcggactgttcactgccagagggggctcgctggcgggcaccaccacgctgaataacggtgccacgcttaccctttccgggaaaacggtgaataacgataccctgaccatccgtgaaggtgatgcactcctgcagggaggcgctcttaccggtaacggcagggtggaaaaatcaggaagtggcacactcactgtcagcaacaccacactcacccagaaaaccgtcaacctgaatgaaggcacgctgacgctgaacgacagtaccgtcaccacggatgtcatcgctcagcgcggcacggccctgaagctgaccggcagcacagtgctgaacggtgccattgaccccacgaatgtcaccctgacatccggtgccacctggaatatccctgataacgccacggtgcagtcggtggtggatgacctcagccatgccggacagattcatttcacctccacccgcacagggaagttcgtaccggcaaccctgcaggtgaaaaacctgaacgggcagaatggcaccatcagcctccgtgtatgcccggatatggcgcagaacaatgctgacagactggtcattgacggcggcagggcaaccggaaaaaccatcctgaacctggtgaacgccggcaacagtgcgtcggggctggcgaccagcggtaagggtattcaggtggttgaagccattaacggtgccaccacggaggaaggggcctttgtccaggggaacaggctgcaggccggtgcctttaactactccctcaaccgggacagtgatgagagctggtatctgcgcagtgaaaatgcttatcgtgcagaagtccccctgtatgcctccatgctgacacaggcaatggactatgaccggattgtggcaggctcccgcagccatcagaccggtgtaaatggtgaaaataacagcgtccgtctcagcattcagggcggtcatctcggtcacgataacaacggcggtattgcccgtggagccacgccggaaagcagcggcagctatggcttcgtccgtctggagggtgacctgctcagaacagaggttgccggtatgtcactgacgacaggagtgtatggtgctgcaggccattcttccgttgatgttaaggatgatgacggctcccgcgccggcacggtccgggatgatgccggcagcctgggcggatatatgaacctgacacacacctcctccggcctgtgggctgacattgtggcacagggaacccgccacagcatgaaagcgtcatcggacaataacgacttccgcgcccgcggctggggctggctgggctcactggaaaccggtctgcccttcagtatcactgacaacctgatgctggagccacaactgcagtatacctggcagggactttccctggatgacggycaggataacgccggttatgtgaagttcgggcatggcagtgcacaacatgtgcgtgccggcttccgtctgggcagccacaacgatatgacctttggcgaaggcacctcatcccgtgacactctgcgcgacagtacaaaacaccgtgtgagtgaactgccggtgaactggtgggtacagccttctgttatccgcactttcagctcccggggtgacatgagcatgggtacagccgccgccggcagtaacatgacgttctcaccgtcccrgaatggcacgtcactggacctgcaggccggactggaagcccgtgtccgggaaaatatcaccctgggcgttcaggccggttatgcccacagcgtcagcggcagcagcgctgaaggttataacagtcaggccacgctgaatgtgaccttctgataattctgcattgcctctctgtggttccggtcatcatgaccgggacccggacgggggaaaacatttcagtgccacattcactggcattcacaataacatgatattcatcacggagtgactatgttacagatagtcggcgcgctgattctgctgatcgcaggatttgccattcttcgccttttgttcagagcattaaccagcacagcgtctgcgctggcagggttcatattgctgtgtctgttcggtccggctttactggctggctatatcactgaacgcataacccggttattccatattcgctggctggcaggcgtatttctgacgattgccggaatgatcatcagcttcatgtggggacttgatggtaaacatatcgcactggaggctcatacttttgactctgtaaaatttattctgaccaccgctctcgccgctggtctgctggctcttcccgtgcagataagaaccattcagcagaacgggctcacacctgaagatatcagcaaggaaattaacgggtattactgctgtttttatactgcctttttccttatggcgtgttctgcatacgcaccattgatcgcattgcagttcgatatttcaccctcactgatgtggtggggcgggttgttgtactggctggctgcattagtgacgctgctatgggcggccagccagatccaggcgctgaaaagactgaccagtgccatcagccagacactggaagaacaaccggtgctcaacagtaaatcatggctgagcagtttgcaaaacgattacagccttcctgaaacgctgacggagcgcatctggctgacactcatttcacaacggatttcccggggagaactgagggaatttgaactggcagacggaaactggctactggacaatgcctggtatgaaagaaacatggcgggtttcaacgaaaagctgagagagagcctgtcatttacccctgatgaactgaaaaccctcttccggaaccgcctgaatttatcaccggaagcgaatgacgattttctcgatcgttgcctggacggcggtgactggtatcccttttcagaaggtcgccgttttgtatcattccatcacgtggatgagcttcgtatctgtgcctcctgcgggctgacagaagtacatcatgccccggaaaatcataagccggatccggaatggtactgctcctctctttgtcgcgaaacagaaacactgtgtcaggaaatttatgaacgcccctacaacagttttatttccgatgcaacggcgaatggtctgattctcatgaaactgccggaaacctggagtacaaatgagaaaatgtttgcttccggagggcagggacatgggtttgccgctgaacggggaaaccatattgtcgacagagtccgtctgaaaaacgcacggatcctcggtgataataatgccagaaatggagcagacagactggtcagcggaacagagatccagacgaaatattgttcaactgcagcccgtagcgtcggtgcggcattcgacggacaaaacggacagtatcgttacatgggaaatcatggccccatgcaactggaagtcccccgtgatcagtatgccggcgctgttgaaaccatgaggaataagatccgcgaaggtaaagtacctggtgtaaccgatcccgcagaagcgtcccggctgattcgtcggggacatctgacttatacccaggcccgtaatatcacccggttcgggaccatcgaatcggtcacttatgatattgccgagggttcggttgtcagtctggcggccggagggatcagttttgccctgacggcatcggtcttctggctcagcaccggcgatcgcgatgctgccctgcagacagctgctgtccaggcaggaaaaaccttcacccgcacactggctgtctacgtcacaacccagcaacttcaccggctcagtgttgttcagggtatgctgaagcacattgatttttcgacggccagtccgactgtccgactggctcttcagaaggggaccggtacaggaaatatcagtgccctgaacaaagtgatgaagggtacgctggtgacatctctggcactggtagctgtcacaaccggccctgacatgatcaaaatgttgcggggacggatctccggtacgcagttcatcaggaatcttgccgtggcatcttccggtgtggcaggtggagctgtcgggtcagtggcgggcgggatactgttcagtccactgggaccatttggtgcactgacagggcgtgtggttggcggtgttctggggggaatgattgcctccgctgtatcaggaaaaattgccggagcgctggttgaagaagatcgcgtcaaaattctggcaatgattcaggaacaggtgacatggcttgccggcagtttcctgctgaccggacatgaaacagaaaatctgaacgcgaatctggcccgtgttatcgatcagaatgctctggagatcattttcgccgccggtatacaacaacgggccgcgaccaatatgttaatcaaaccactggtggtcagtatcatcaggcaacgccccgtcatggaatatgatgcatcccatctcggcaatatggttaaccggctggaagaagcattacccccggagttaccggcataacgagtattctgcaccttttacgttttatcacctgacttgtcagtgtcatcgtcatgattcagagaggtaaataccatgattcacctgttcaaaacctgcatgattaccgccttcattctggggttaacgtggtctgccccactccgggcacaggatcaacgttacatcagtatacgcaatacagatacgatatggctcccgggaaatatttgtgcttaccagttccggctggataatggcggaaacgatgaagggtttggccccctcaccatcactctgcaactcaaagacaaatatggtcagacgctggtgaccagaaaaatggaaacggaagcttttggtgacagtaatgccacgcgaaccacagacgcatttctggaaacggagtgcgtggaaaatgtcgccacaaccgaaatcattaaagcaactgaagaaagtaacggccatcgtgtcagtctgccgttatcggttttcgatccccaggactaccatccactgctaattaccgtttccggaaaaaacgttaactgatccctgaagtcagtttcatgcttcagcctctgtcacaacgcgtggcagaggctttttatttatcaggagaaaacagatatgccgggttacacagagtatgtcctggctgaaggatctttctcatacgggcaggcggttgctgtcataacagcttaccgcaatgtgtttatccaggatgacccgggaatgcatttccgtcgggttatccgcaacgcggaaggtcagcgacgctggcgctgccggaattctgaacccgatgccggaaaggtgcttaatacgcggctcgccagtgacggtcttctcagacaataaacgtcattcatttcatctgtcaggccgcgtcttctccgggagacgtggctttttcatttattacaccagtaaatcttaaccaccgataaggagcaaattatgcgactagccagtcgttttggttatgcgaaccagatacgccgtgaccgtccgctgacacacgaagaactgatgcactatgtgccggggattttcggggaagataaacacacgtcccgaagccagaactatacgtacatccccaccatcaccgtactggaaagcctgcagcgggaaggctttcagccattcttcgcctgccagacccgtgtgcgcgacccgggccgccggggatacacaaaacacatgctgcgtctgcggcgggccggagagataaacgaagaacatttccctgaaattattctgctcaactctcatgacggtacctccagctaccagatgctgccgggttacttcaggttcgtctgccagaacggatgcgtctgtggtcagtctctgggggaagtgcgtgttccgcatcggggaaatgtggtggacagagtcattgaaggggcttacgaggtggtgggcgtttttgaccggattgaggaaaagcgtgatgccatgcagtcgctgattctgccgccaccggcacgccaggcgctggcacaggcggcactgacttaccgttatggtgacgaacatcagcccgtcaccaccgctgacattctgacaccgcgacgcagggaggattacggtaaggacctgtggagtacttatcagaccatccaggagaatatgctgaaaggcgggatttccggtcgcagtgccagaggaaaacgtatccacacccgtgccattcacagcatcgacaccgatattaagctcaaccgcgcattgtgggtgatggcggaaacgctgctggagagcctgcgctgatgcagcctgtccctgaaggcgctgccgggatgtcgttccatttctgatgatgacctgtgcgcctggtatacccgtctgctttaccgtcccggagaaatcagtctgtgcagactgagtacaggcaatggcatcaggccatccgtctgtgaccggaacggttacgcgtacggctgtccggaatttcagccgaatatcattcatccctgatattaccgggtctcacggtcagtgatgaacgtgatgttatcagccacccgacctttacttcctcgcatttattcacactacaaggatttcacatatgaaaacattgtctcagaacaccacctcttcggtctcagcaccggagactgacctgcaacaactggttgccagcctcgtccctgatgaacaacgtatcagtttctggccgcagcactttggcctcattccacagtgggtgaccctggagccccgtatcttcggctggatggaccgtctttgcgaaaactactgcggtggtatctggaatctgtacaccctgaacaacggcggggcatttatggcacccgaaccggatgacgatgatggcgaaaactgggtactgttcaatgccatgaacggtaaccgcgctgaaatgagcccggaagccgccggcattgccgcctgtctgatgacgtacagtcatcatgcctgtcgtacggagtgttatgccatgacggtccattattaccggctgcgggattacgccctgcagcatccggaatgcagcgccattatgcgcatcatcgattgaatggagagaagcacaatgcaacaactttcctttctgcccggagagatgacacccggcgagcgcagcctcattcagcgggccctgaaaaccctggaccgccatcttcatgaacccggcgtggccttcacctccacgcatgcggcacgggaatggctgattctgaacatggcgggactggagcgtgaagagttccgggtgctgtatctgaacaaccagaatcagctgattgccggtgaaaccctcttcaccggcaccatcaaccgtacggaagtccatccccgggaagtgattaaacgcgccctgtaccacaatgccgctgccgtggtgctggcgcacaatcacccgtccggtgaagtccccccagcaaggcagaccgccttatcactgagcgtctggtacaggcactggccctggttgatatccgggtaccggaccatctgatagtcggtggcagccaggttttctcctttgcggaacacggtctgctttaacccgtcaccgtcacaatcaccttcatatcacttcagtttctctttctcagctgtttcttactttcacattcaggaggactattctcatgaaaatcatcacccgtggtgaagccatgcgtattcaccgtcagcatcctgcatcccgtctttttccgttctgtaccggtaaataccgctggcacggtagcacggatacatataccggccgtgaagtgcaggatattcccggtgtactggctgtgtttgcagaacgccgtaaggacagttttggtccgtatgtccggctgatgagcgtcaccctgaactgagtctggaagggaattctgatgagcagaattatcgccactaccggaccattcttaaccgattttctgtgaggactttatcgtgtcagacacactccccgggacaacgcctcccgacgacaatcacgaccgccyctggtgggggactgccctgcaccgtgacgccctgtttcggggcacgtctggtgcagaagggtaaccggttgcattaccttgccgaccgcgccggtatcagaggccggttcagcgatgcagatgcataccacctggaccaggcctttccgctgctgatgaaacaactggagctcatgctcaccagtggtgaactgaatccccgccatcagcataccatgacactgtatgcgaaagggctgacctgcgaagccgacaccctcggctcctgtggttacgtttatctggctgtttatccgacaccggcagcgcccgcaaccaccgtataacaccggatatctcccctttataaccacctgttacagagaacttaagatgaatacattacccgacactcacgtacgggaggcatcgggctgcccgtctcccgtcaccatctggcagacactgctcacccgactgctggaccagcactatggcctcacgctgaatgacacaccgttcgctgatgaacgtgtgattgagcagcatattgaggcagggatttcactgtgtgacgcggtgaactttctcgttgaaaaatacgcgctggtacgtaccgaccagccgggattcagcgcaggagccccgtcgcagttaatcaacagcattgatattctccgggcacgccgggcaaccggcctgatgacacgcgacaactacagaacggtaaataacattaccctgggtaaacatccgggggcgaaacaatgaaactggccctgacgctggaagccgacagcattaatgcgcaggcgctgaacatggggcgcattgtcgttgacgtcgatggtattgagctcgctgaactgattaacaaagtcgctgaaaacggttattcactccgcgtggtgaatgaacgtgacgctaccgaaacaccggcgacttctgccagccctcatcagttgccggaagacaatacagtgatacagagcgtgatgccattaaccactgaaacagcgctggatatcctcattgcgtggctgcaggacaatatcgactgcgaatcgggaattatctttgacaacgatgaggataaaacggattcggtagcactgttgccctgtatcgaacaggcccgggaggatgtccgtactcttcgtcatctgcagcttctgcaccagaaccggtaaatatcactcaccatacttcattccactgacgtcagcctgaacagggctggcgttttcgtttataaaccaaaagggaaaccgataatgtcagacatcacaatctcccgtccggaagtggtcaccgggcatacggacgttatctgctcaaccagtatccgccacattctggctgtacgaaagagtacactgctgcaaatcgacacacttatccggcaactggctgaaatatcagcaatgacagaaagtattggcggtaaagccgccccggactgggccatgaaacaggattttcgctgcggctgctggctgatggagaaaccggaaaccgcaatgaaagccatcacacgcaatctcgatcgcgaaatctggcgtgacctgatgcaacgttcagggatgctttccttaatggatgcacaggcccgtgatacatggtaccggtcactggagcacgataattttccggaaatcagtgaagcgaacattctgagcacatttgaacaactacaccagaataaggatgaggtgtttgagcgaggggtgatcaacgtcttcaggggactgaactggaattacaaaaccaattgcccctgcaaatttggcagtaaaattatcgtcaacaacctagtgaggtgggaccggtgggggtttcatcttatcaccgggcaacagactgaccgactcgtcgacctggaaagaatgctacatctgttcagcggcaaaccgatccccgacaaccgggaaaacatcactattcgtctggatggtcacatccagtccgttcagggtaaagagcgctatgaagacgagatgttcatcattaaatactttaagaagggatctgcacacatcactttcaaaaggctggaactgattgacagaattaacgatataatagccaggtactttccttctgtgctctcagcctgatcccgagtgtgattccctttcgatatcaaaagggactgcgggtataattgagggtacatttttaatcaaaccaaataaattatattaatatcaatatgataaaagaaattttcgattccgagtccggcaccactaattcttaagaacccgcccacaaggcgggtttttgcttttggatctgacaataaccttcacgaaaaaagtttgcttataaagtctgggggaattactctcgccacgttaacgagagtaattttattgatactaatctcctgatactttacccccgtccaaactccagccgctgcacattcaccatcccagtcttctcagcagcactggcatcaatttgtgtcacccgcagcgcatacttttcatccagcgcgtttaaccagttcagcaggtcattaaacaccaccggatctatccagacctgaatattctccccacgctcggctatccgcttgatgactaccgagtgcgcggaagcgctgtcactgataacccgcgatacctgcgcaggcgttgttgtggcggattttcgcgccgccataatatccggcgcggcgctcctcagtctggtgttcatcgccaccagttgctgcaacattgtctcctgttgttctatccgttcgctcaacggctgccagatgaggacgtaatatccgacgctaaacaggaacaccaccgctgccagtaacatgcccttttcacgcggagaacgccccgccaggtgttgtgccagccagtgttcgccacggcttaactggcgttcacgccattgctgaaaatagtgaataaatttatcgcgtaacatgttatttcctccgcaacgttacgccgccggaaaccgcatcaccctctttctgtaacgcgtcctgttgcacaacataatcggttgccagtgcactacgcagtttgtcgaaactggcaaagttcgcggcccgtagctggaggtgaagtatctggcgtttttgatcaaaggtaaaaccacgcatttcgatgtcggaaagtgacgctgatttcagggtgctggctatcgctgacaactcggcgagcagccgggtatcgtcggcctgtgggcgatattttttcagcgccatcgtcacctgagagcgtaaattcacaatccgcttctgctccgggaacaacgttaagaactgttcctccgcctgggtgcggctttgcgccacctgttcgctgacgctccataacgtcacgccccgctccactgccagcgcaaccagaatcagcaatatcggcagaatcatcacccgccagcgcgcccactgttttcggtagctgacgcgaggctgccacggccctgtcagcaggttcccttccggttcgccataagtggtaatggcgggcagagctgtaacggtcaggcgttcagcgtctgcgccagcccatgctgatagcttttccggtgcaatgccgactacggttagcgaaagcggtaaatcctgctcattgagctgggcgcggaacatgaccggagccagcgccagcccggcgctccatccccggcattcatcgatgcggcagataacccgttgcgcatcgcaagccataaacccacaaggaatggacatccagtccggcgcgacggtagcgcgggtgatgccgttttcctgcaaccactgcgcaatgttgcgcatatgctgttggtgaatcactgctacggttgccagttgctggtcgatattcaacggggcgaaatgcagttcatcgatatcctggttcagctcttcttccagtaaggcgggcagaatggtcggtatctgcttacgggcgacatcaggcagttcaacctgccagacgctgatccattcgccgggaatgtagagtcgaatcgcatcagtttgcagccattgctggagctgttcgttagcaacgtcagaccagataccgtgctccacatcgggtgtacggcgctgccaatggatgggatcagcggcgcaaagcgggaaaaaaatctcaaggatggaactcactcactttctcctgtctgatgccagagaaccgaaaagtgttgtgggcccatgcggacaattaacgagttcatcgtcagttcaatctcattcacggtgatatctgaacgcagccagaagtaattgctgtccacgctcaggacggtttttagctgttttttagtacgctcatcgacgtcagcaagtagcggctgtgcaagaaactgatcgacatcttcccagcccttcgccggacgttgttgtaataacgcccgcgcctgaacagggcttaaccacgggtcaaacagcgcctcaagaatcacactttgcgtgacgtctaaagtattgatgttgatttgctggcgggtcatcggcagcgcacagaccagcggtttcagtttttgataaagcccggcgtccattccctgcaccacgcgcatctcgctgatatcggccagcggttgattggcggcgtagaaaggcaccgagcgggcgagatattcgctgtcttcacggcccagacgcgtctgcacgctgcggtcttcatcaataaactcccacaggctttcggctatcagttcggcccgataagcaggcacatccaggcgcgtgatcagggcaatcagttgttgtaccgcgagcggacgcgacgccgttgtgggctgagcgagggcattcaggttaaagcaggcctgtgcgtcacgcagagtgacggcgatttgcccctgcggcagtgggaaaaaacgagggccggaagcccacggctgttccagatgcacgcgcttttcatttttcaggctcagactgagcgcgctcagcgccaggctttctgcactggcgctgtaccacagcgcctgctggtactcctgctggctgcgcgttcttcccagttgctgctgcatccgcccggaaagcgtgatggttaccagcatcataactgccagcaataccagcaccacgaccagtgccattccgcgttttggtggtgaggtgatcatgattattgcggcccgcgtaacaaccagatgcgttcaatctcgccccattgcggcgaatgcagggtcatgcgtaccgccacagggatcgcctgtactgacgaccagctctcctgccagcgcgtgccgtcgtagaactgcaaacggagcgaatcggccggaatcaacttttgcattgtcggcttcacgctgcctgcggcatcggtcagcggccaggctaaccgttcgagataaccgtcatgaatgcggtaaccgacggtgagcagattactgcgcggcagacgcatcaacgggttaaccacaccgccgcgcacaaaacgcattccttcactctcagacgccagcacgccagcgccagccagtaacgctggttcacgctggccctgatcgcctcttaccggacgcggcatcatttgggtcagatcgtgggtcagaaaactcatcgtttgctgcatgaggtttagtttttgatcgtgtccggcgacggcgctattcacgcgcgtgacgccgttagtcacctgctgcgccatcagtgccagcgaggcaaaaatggcaattgccaccaacatttccagtaacgtgaaaccagcgcgagtccttctcactgttggcctcccacggcgctaaaccaggcgcgtcgtgactgaatcaccgacgaaaagtcttcgtgaaggctgacttcaatatccaccgcctggagcagcgcgttgcctgtactcagcggtgtggttcgccagtaccagcggcttcctgccatatcgctctcgccctgctgcctgaccgcccgctgctcgcgggtcatcaggtagagcagcgcggtctggttttcagccacccagcccgctaccgttttttcctcaagaatttgctgattactcagcgcaccgctggcaatctgtaacaccgccgtggcagccagcgcaaaaatcgccagcgcgagcatcacttccagcaaggtaaatccgcgcttcatggcatcctctcatcacattgattgagggataacgcgccatcgtgtgccagctttaccgcccaacatgcgttttgcgccgccgagtagaagcgcagcgtaaacggcgtggcgggttcaaaaggcgaaaaacggatctgcggcgtcttctttttcgcctcttttgcagctcaagttcaatatcgtgcagcgtcagtcgacgacgttgcagctccagcgcatattccttctgccagatatcacttccgggttgtaacagcatctgcacctgtttcggcaccgtaacctgtgccgataaccgggtcgaggaaacgggcgaccactgcccctgacgacgctgcataaactggtagccaggcgggtcgattagcacaccgagtgttttcccttcgatcactgccctgtccttaaactgcgcaaagcgagtcagaaaatcctgcgccgcttttttcgcgggcgattcagaatcggtcgcaaaagtctgtaccacgcccgcactggcaaggccgataagaaaaatcaccagcatgatttccagaagtgtgaatccgcgttcaggcactgcttactgaaactcctgcaaattccagttaccgatatctgcgccagcgccttccccgttttcctgaccatccgcccccagggtataaacatcaaacagccctttttcacccggactgagatactgataatcattgccccacggatcctttggcagtcgtttaatgtatccaccagtacggtagttgcgggagtccgccatattggctggctgctggatcagcgcctcaagcccctgttctgtggtcggataacgcccgttatccagtcggtacatatccagtgcgttttccagcgccacgatatcgctgatggctttttgccgatcggctttctctttgttgcccaacaggttaggcaccaccagacttgccaggacgccaagaataacaatcaccaccatcacttccagcagggtaaaacctgcccgtggtttttgtgtgcgggataacgaattcatgtgataactccgtaaattacattccaaccatattattcagttgcagcatcggctcgaggatggcgatgacaataaacagcaccacgcccgccatcatcaccaccagcgccggttcaaacagccctaacgccagccccacctgggtatcaaattcccgttcctggttgactgcggcctgctcaagcatggtttccagttcgccgctctgttcgccggaggcgatcatgtacagcatcatcggcgggaacaggcgcaactccgccagcgcggcgcgcagactgcttccttcgcggacgcgatctgccgccagcagtagttgttgttcgacatagcgatttgccgacacggcggcagcagtctgaataccttccagtagcggaacactgctggcggtgaggatgcttaaggtgcgggaaaaacgcgccgtattcagcccgcgcgcaacacgccccgtcacaggcaggcgcagcacggtttgatcccagcgcaggcgcatagcaggatttttaagtagccgttgccccagcaccagaagccccagcaaacccgccagccagtaaacgccgctggcctgtaacgcgtcgctcatggcaataagcgtgcgggttgaggcgggtagcgcgtgtccgagatgatcaaactgttcgatgattttcggcaccactgccgtcagcaaaatagtgactacgcccgttgccaccaccagcagaaccagcggatagagcatggcctgcaatagacgtgatttcaggcgctgtcgctgttcggtgtaatctgccaggcgattaagcaccacgtcgagatgcccggatttttctccggcagcaaccatcgaacaaaacagagaatcaaagacgcggggatgttcgcgcaggctgtccgacagggtgtaaccttcctgaatccggctgcgcagcgccattccgaggctttttacatgcagtttttcactttgctcactgaccgcctgtaagcaggtttccagcggcattgctgcctgtaccagcgttgccagttggcgcgtgaacagcgcaagatctgccgccgccacgcgacgatgtgcgtgccgccgacgctgcaacatcccccctgacgaagtattcatccgggcttcaatatgcacggggataagctctttaccgcgcaacaactggcgggcatgacgcgcggaatccgcctcaatcatacctttggttttgcgaccattacgctccagcgcctgatagtaaaacagtgccattacgcctccatggttacccgcagaacttcatcgagagaggtttctccggcgagcactttctcaatgccgttgctgcggatacccgcagagtgttgtcggacataacgttccagctccagctccccggcctgacggtggatcaaatcacgcaatgtggcatccaccacgatcagctcatggatggcagtccgtccgcgaaaacctttgtgattacaggcgggacagccctgtggatggtacagagtgacggtacgggcgtcggtaattcccagcaggcgtttttcttcgtcagtggctggtgcgggctggcggcagtcgggacacagcgtgcgaaccagtcgctgcgccatcacgcccgtcagactggaagagagcaggaaaggctccacgcccatatcctgcaaacgtgtgatcgcccccaccgctgtgttggtatgcagcgtggaaaggaccaggtgtccggtaagtgaagcctggacggcgatttctgcggtttcggtatcgcggatttcaccgaccatcaccacatccgggtcctgacgcaaaatcgcgcgcagcccacgggcaaaggtcatgccgacgcgggtgttaacctgcgtctgaccgatcccttcaatcatgtattcgatgggatcttcaaccgtgagaatgttgcgcgaatggttgttcagctcctgcaatccggcgtacagcgtggtgcttttgccggaacccgtcggccccgtcaccagaaagatgccgtgcggtttgtgtaacagctggcgcaactgcgcggtcagttgctggctaagccccagacgctccagcgtcaggcgggcctggttttttgtccagcagtcgcagcaccacgcgctcgccccaggcagaaggcatggtggagacacgcacgtcaatcgcccggccgcccagcaacagcgcaatacgtccatcctgcggcacgcgcttttcggcaatgtccagccgcgccatcaccttgatacgcgacaccagcagcgaggccagtttgcgccccggacgcagcatttcatgtaatgtgccgtcaacacgaaaacggatcaccagactcttttcaaacgtctcaatgtggatatccgaagcgccttctttgattgcctctgccagcatggcgttgatcagtttgatgatcggcgcatcgtcgtcgctttccagcagatcttccgtttccggcagttcttccgcgagggtaaaaaagtcctcggcagaaccgagatcttccatcagttggcgagcctcggaagagtcccgctgccagaccgcattcagccgctgttcaaattcggcttcgtcgatttgccgcagcgtaaagggcgcgttcagcccccgctgcagctcctgcaaaacagagagcgatagcggatgaacgtggaggatctccagcgacgcttcgcaccatgccaccaggctaaaccgacggctgaaactgtagggcagacgcacggtgttggcggtggtttcctgtgctacaggcaccattaacgcgttctcccggcattgaggaacgcgcgaacttccggcggtaaggcctggttttgcgctggcagtaccggctgtgcggtgtgcggcatcaggcttaaaccttgctcatcacgatagatctgttcggcgcgcatatagttatatttgcgctgcgacacgccgtctgccgccataccgtcacgcagaatggtcgggcggataaacaccatcaggttacgtttttcttttttatccgccgtcgatttaaacaggttaccaatcaatgggatatcgcccagcagcggcactttcgccacgctttctcccgcctgatcgtccatcagaccaccaagcacaatcagctcaccatcgttagccagcacggtggttttcagtttgcgctcaccaaacaccacgtcgaggctggtctgtccttccaccttcgagacttcctgctcaatcaccatctgtaccgcgttaccttcgttaatctgcggcgtgactttcagcatgatgccgacttttttcctttctactgtattgaaaggattgctgttattggagccaacggtagagccggttaataccggaacgtcctggcccaccatgaagaaggcttcctggttgtccagcgtggtgatgctcggcgtggagagcacgttcgagctggagtcgtttttaaccgcctgcaccagcgccatccagtcgcctttcaccacgccaaccgccgtaccgctgaatccagaaagaagctgggcgagtgtggagagatcgccgttggtatccggattaatggtggtagcgccgttttcactgatcaccgtggagcctttctgcggtttcgcctgagaaatggctgcccccagcgtgccaatagggatctgcgtaccgttagcaaactgcattaatccggcatctttcgacgcccactgcacgccgaaattgatattgctaccttcggcaacttccacgatcaacgcctcgacgtgcacctgagcacggcgaatatccagttgttcaatcacgctttgcagcgactgcatgatgtcctgcggcgcagtaacaatcagggcattactgtgtttgctggcggcgatggagacaacctcacgcccgctaccgaccgtgccttccgcctcttctttagccgccgtgagcgtgccgctgacctgcttcagcacatcgaccagatcttcggctttgctgtatttgagatagaaaacctggctgttgccgctgcgttccatttctgagtccagccgacggatcaggcggcgcattttgtcccgcgtggccgggtcaccactgacaatcacactgttggtgcgttcgtcggcgacaatttgagatttcagcgtcgcaggctggttctcgccgctgtttttcgtcaggctttccagcacgcgggcgatttccgaagccgaggcgttatccagcgggatcacctcttcggtgcgattacccgcgtgatccacgcgctggatcacttctgtcaggcgctccacaacggaggcgcgtccggtgagcataatcacgttggagggatcgtaattaacaacattgcctgagcctgcgctgtcgatcatctgacgcagaatcggtgccagctcgcgtaccgacacattacgtaccggcactactttggtgaccatttcatcgcccgcgtagttgtcgctgccttcaccgaccagcggcagcggctcgactttcgcagcgctggatttcaccaccttcagcacgtcgttttccatcggtacgacggcatacccctgtgcttccagcaggttaaggaatagctggtaatactggcgttcattgagcggggtcatggtgcgaatactcactttcccctgtacgcccggccccataatgatggttttattaaggttagcgccgacggtttcgatgaacgatttcaggtcggtatctttaaaattagcggtgaaagtggcttcttccgcccagaccggtgaactacataatgccgctgccagcaccagcggcagtaaacgcttttttgttttgaggccagttgtcttcttacgccagaccgacaacgtaatatcacgccaaaacacgatgaatgattctcctggattaaatgcggttagcgcagcgcgatggaaatgtcgtggcgcgcacccttgcgtaaaaccgtaagttgaatggaatccattgaaggtaactgccgcatcagagcaatcattgctcgtggatcagtgaaatcctgctgatttagcgcaatggcgatatcgccttccttgaaaccgctggcatcgaacagagaacgatctgcccccggcttcactgcataaccgacaatcccctccttacgcacaggcgtaagctggatatagttaaaaattttctgcggatctttcgccagtgcctgacgcacggcagtcgggatctcaactggcgcactggcagcaggctcagcaacagcttgctttgcttcgtcactgacagcttttttgttggtcacggcaacggtggaacgctcctcttcagccagactcaggcgctctatttttccctgatagcgcagcatcacatggtcgcgattgatttcctcaatcactgcgttgtgcgagccaagcgtttcaccctgcaaatagacctgctgtttaccgccttcttcaataaccgcgccgggtctggcaccaaaggcaatcccgcgcagcaccacattaagacgcgtttctgccacaggcacaggttcgggttgttttaccggcgtggcgacgggctgatatttgccaaaccagttttgctggctgattaattgcacgtcatttttatcgaacgtttttgcatccgcacggggcggtttattcgccgatggggaaacagccgtatattccgcagaaaaggagaaatagcgccagagtgaatgcgccacttttgcagaaataataagcagcatcagccagaacatcccgcgtacaatttttcgcagatgctctttgtctgtattaaaagattgtctctggttaagagtgtgacgaatttttgtcagccattgaatgagataaattcgtgcgtcacgaaaaacaacccgcgccaatttatatctacccgacgttatgctttgactattccacaggtggtacgatccagtttccgctgatactggttacctgtacgtgtatcattaatcgttatgctgtaattaattccctcggtaatcattaatttcaccgttgggtcagcgcacatttgtcgttgatagctggttaaaaaggcgtcaggcgtctgcgtggtctgagtccccgcttcgctgataatggtcatttttaccgtcgtgccgctactttgtgccagcactaaggtatatcccgcagatttaatcggcaggttttggctgatattttgcgcctgttttttcgccagtaaactggcattttcattatggctggcacagccacttaataatcctgtaacgctcaacaatagcgatattaataccctccctggcatttgttttatcgacatggtaaataatctctaaggttattaataagagttaaaatgtcactttgataatgacgttgttatcattaaaacaatgcctgtagataaattgttgctataccgcccagacttaaacacggtccaaaaggcagtgtggttgatcctctttttgtaataacggcatatatcaggccgcagcatgatgcgattaaagcaacattgggtagcgacaacggccccacccaactacctaacgcagcgaacaataatacatcgcccatgcctaatgcttctttacgcagaactattccggctatccagcgcagagagtaaaaagtgataaaccccaccaggacgccggtgactgcatcttgtagcgtgagcgggctctgctgcgcccatgccgcaattagtcccgtccacaatacgccctgagtaaaaacatcgggcagccattggtgatcgaggtcgatgatgctcgcggcaatcagccaggcggataatatcatcaccgccagcgcccatccactttccggccagaccagactcgccagcaaaaaagcgagtgccgtcaataactccaccagcggataacgcttgctgattttcgcctgacagtcgcggcagcgccctttgagcatcaaccaggagagcagcggaatattgtcacgaacgcggatagtctgctgacaatgtgggcagtgcgaacgcggtagcgcaaggcttatttttgactgcgcactcggcatttcaccatgaaactccgccatttgttggcgcagcatgatggggtaacgccaaatcaccacattcaaaaaactgccgatgatcaatcctccgacggtagccagtatgggcatcgccacggggtattgctgaaaaacatcaaaaagcatggttaaaggttgtttgttgtaacttgccggatgcgggcctgcaggtgtatgccatatggctttcctccaggcccgataagctggcgcaacccggtgcgccttatttcatgccggatgcggcgtgaacgccttatccgggttattcagcaggcatcgaatactcggtaaccttgttaatggtttccggcccttgcttcggtttcggcagattgagtgacgccagcgtgttgtacgccgactggctcacaccgccttcgaagctcatctccgtcgctcccggcaactggtaagcattcgcgcccggattccatttcttaaagaactccgaaagatccgtctgggcgacccaggaggcacacagcatcagcgtgtccgctgcgttaccgttggattcagcacagtaattcttgccgccaaacttgtcattgctgacctcatcgccgcgtgctttacgatgcatcaactggaacaggttccagcctttcatcccttcacgctcgctgtaaaactctggcagaggagtgccatctggataccatttcttgatatcaaagtttttctctgcccattccttcagctgtgcgtacatcagcagacggtcacccgcaccgccgcgcgcccatgcctgaccgttgctttcctccagatattccggtgcgacggtaatatcgtcagcgacacggttcatcttgccgagataacgatcctgcatgtacagcgccagcacgttgttagcgacttcagttgcacccggtacagtcaacggcgtttctgcggcgttatgaccgacttcatgccagatcagccagtcgttcagcggcgtcgtcggcagcgtggtgctgttcggcgagaagctgctgttcattaccggataacccgaatgcgcatcaccgatggagatctgcacatcgttggcgaaacgatgtttgtggcccggcaagtttttataggtaaacatccggtgcttaccgtcttcgctatcacggccgtagaagtcattcatcgagctggcaaaggtatccagatcgttagcgaattgctccagtccgccagtgtaattgctggcattcaggttcttcttcggtgtggtatagacgaacgaggcagactccagttcgcccagcggggcaggggagttcagatcgtgttgccacttaccgtctttatagaacggcgcttttactacaccggtaaaggtgaagtcagctgattgcacctctttgctgtcgcccttgatgtaaatcagaccaccgtaagggactttgaacgtcaccttatcattggctttcaggtcataggtttttgtcactctgggtggacgattcaggctaacttcatgcttctctcgtcctgtcaggtcgtcggccagcgcaacagtcacggtcacaggaactgtcgcctttgactcaatgctgacttcctgctgggcaggtgcccacaggccagttgactgcatgttacctgcaaaccatttggttggagctgagtacaagttaatgttttgtgtgacggtttcgccgtttgtattcaccactcccggatacttctcaacatcaactttgatgttcagatcccaccaggaacggcccagcatcaggcgtgtcagcggtttttccatatagttgagcgggtagctcgggttcatcatgcccgctttgctgctttcttcaccataaatcatcttgttatcgatcagcgattttttcagctcagcagaacactgcgtgccaacgtatgcattgttggtgtagcagttcagaaactcagtgaacgttttaaagcccagctcgtcttctttaccctcttcataacgatatttcgtctcgttccacagccagacggacatgttttggtataaacgttccagatcaacgctgttgagacgctcaccctggaggccattggtacggaaataaagctcatgctgatacaggcgctgaatattggtgcctaaatccgcagcctgcagcatcgctttcgcagtgtcagctccaagatccagctgcgtatactgcggaacatacatgccaccggttaccggcacacccgtgcctgggcggtattccagacagttgacctcatagtgatagtcagaatccttacacacttccagccctgggaacgcgtccagaattctctgttttgccgcagccagtgactcaggcgttttgtggtcggcttcatcaataaaggcgaattgggttacctgtttaccctcaacttcttcctgccagctggcaacttccagcttcggtttgtcatcaggtttgttttcttgctgatatttccagataacttctttcgtggtgtcatcaatggtatacggtggtttaccatcgacagccggataacgctcatagacccaaattggcgttgaacgtcgttgacgaacacggtcagggtagccttgcggatcgttatttactaccgacttgttaagcgccatcgacaaacctgcggcatcaagcagacgtacaaagccagatgcgctctcttccttaagattgctcatcacgttttccatgatcagcaccgatccacctttgttcatataggcgatcaaatcggtcacatcctgctgggtcagcttcggtttgctggtatctgcgcgcagaggaatggagtaaggatcgctaccccattgtgtgacgtattcaaagccattgaggatcaacagaggaacttcatctggattcagattgccatagctggtcattggtttgaccgtgatgccagtgaaatccttgtggaacgcaaacggtgcgctatttcccagcacctgaccatgttttttgaaatataccgtgtccaggttagtacccacggtcatactggattttgcatccggcaaccagcgatcatttgacagatagcgcagcacgttctccatgaagttcttcatgtcatccgggtcgctgttgagcgtacactgtccgtctttattaacgcccccgttccagctgtagccgttcgggcaacgcaggatgctgttgtagtgtgggttaccgataaccatcagcttgccatcgcccacttgccccagcgagataaacggcaggttgaaggtggcggtttcgcgtgtcacgttctctggtcgcacaatggaaggcgcttcagtaatgtacgccagctcatttttatcccaggcgcgtttttcgccaaacgccagccagtagtttttatcattacgcgccatcagaatcgggaaggccgcgttggagatattcaccaccgcctgaccgcgcgcattacccgtgctgccatagaagttggtagagtcatggaatacatggaacttactgacagatttgtagttcgtatccacgccccacagcttgttgataacgccctgaatctggccgtcattaacattgcgcgttgtcagcgagaaccagcgagcctcgttacaaccatcggttttcgcacaaatcgcggtatcgatctctttggcctgacccgtcttaaactgctcgataaattcgttaggcagattaacgacttgctcaccttcccccagcgtcgcaccattggataacgagagattgataatctcgttaatcacgttgggatattcagcaaaaaccttgcgcacttcatccggaactacacgcgtgtgattttgtccagccttcgaatagcggtgaatcaactgatcgatatttgccccgcgaacttcatcacccagttcagtcaatgcaatagtcgacttgttaccacgcacagaaccaagctcaaaagtgtcgatgccaaaggagatggtttccccccaactaaaggaaaattccccgttttctccggttacaccacggccggaattggtgtaatagttgacaccaacaacaccatccccctgactatcgaccagtcgaccttcagagagaatgatttcagtgggttgatactgataaaactgttccgcgttagccgacacgaaggaagcgtttagatccggttttgttcccggagtggtggcgggcacgaccggtgaagtatgagtggatggcgctttatcggtcgcggcattgttttccacctcttcattgaccagctttttgaattcttccggtgccagatcgatttgcttatacagcgagtcgaaacgtttactctcgatcaccgaggagaactccaggcacacctgttctgtattcgccgggcaactgttcatggaggtgaccagcgagagcgcattgcttttcttgttgtcggaacccgccagttcttgcgcgtcctcaagactaaacgacactttttcaaccgcacgcaggctacgcgcagcttctgactgggtgtcgaaggtagcaattgtcgtgttgttccctgccacacaggtgactttgtcgcctggtgtaaaggtaaagccatcgctggattcatcattacaggtgatatcaccagttacccgcaggcttccgcccagagtcagataacccgttttcgtaggaacaggttctggctccggttctggtgttggctcaggatcaggtgtcggttccggcgtaggttctgggtccggcgttggctcaggtgtcggctccgggtttggtgttggatcaggtttcacttccggcaaagaccctgttccagaatctacaggcggcgtatcggaggaagatccggagccaccgccatcacaaccggctaacagggttgcactcaaaatagccgctaaaagcgatttcttatatttaaatttcttattcattaataacgcaagtgacaaaacaatgttaaaaaattcgtaactgggagaaatagttttatgctttatcttctttaataatttcctccattcttaagaaaacgacatcattgatagaaaacaggtgaaatttataagaataacccctatttgatgtctggctggctatttttacgaaatttcaataaacaaaaaattaacaacatttcacaacgcaactatataaattcgttggtagttttaacgattaagattgcaaaagcaacagatagaacggtgtttgctcatcaagcgaacataattaatacagacttgttttgcgtgataaaaaaaatagatgttctcacgctcttaattatttagcaggttatctgaacacaaaacattattgccgcatggataataaggcgagaaataattttcaattaataagacagaataatgtaaatgaagccggatgatattaacgatcatccggcattattgatttacgagaccaacattccagtaaacacatacgcctgcaacaacgtgatgacgccgataacgctggcaaaaatcagactgtgcttcacggtgtagcggaatagttcagattctcggcccaccatgcccgtcgcggcgcaggccacggcgatagattgcggggagatcatcttgccagttacgccgccgctggtatttgctgccaccagcagagtgtcagagacgttgatttgctgcgccgtggtcgattgcagtgaaccaaacagggcgtttgaagaagtgtccgagccggtaaggaatacccccagccagccgaggaacggtgagaaaaacgggaacatcacgcctgtacctgccagtaccagcgccaacgtggtggacatgccggaatagttggtgacgaaggcgaacgccagcaccatgccaatcgacaatatcggccacttcagactaattagcgtttcggcaaagacgccaatccctttcttgatgcccacgccgaggatgaagatagagataatcgccgcaataaaaatagcggtgccgccagccgagagagggtcgaatttaaacaccgcatccattggcgttggttgggcgacaatgggtgccgctttcaacacttgttgatgcaaatgagggatctggaaattaatcaccagtgaataaaacgcgccgcccggagcaaataacgctttaaacggcttcatggtccagatggtgaccagcaccgttaagattaaaaacggtgaccacgcacgaatgatttgccccagactatattctgaaggcacgggaccgccagaagatggcttatttaccaccatcgcacctgcggattgccccatgctgattgccgtttcggtatttttcggccgccagactttaaggaataaagcgagtgagacgatactcaccagcgccgaagtaatatccggcagttccggaccaatatagttagaggtaaagaactgagtgacagcaaagcttcccccagcaaccagcgccgctggccacgtctctttcacccctttccagccgtccatcattgctaccagccagaacggcacaagaaccgacaggaacggtaactgacgtcccgccattgcgccaatgtggaacggatcgattcccgttacctgaccggcgaccagaatcggcacgcccaacgcaccaaacgccactggcgcagtgttggcaatcagacacagccccgccgcgtataacggtttgaagcccaggcccaccagcagcgcaccggtaatcgccaccggcgcaccaaagccagccgctccttccagcaacgcaccaaaggagaaaccaatcagtaacacctgcaaacgctgatcgtcggtgatggagataaccgagctgcggataatatcgaactgaccgctggcaacggttaatttatagaggaacaccgccgcgacaataatccacgcaattggccataatccataaataaagccatagcctgcagcagcaaatgccatatcaatcggcattttaaaggcgaatatcgcaatcaggatagataagataagggttattgctccagcgacatgtcctttcagacgtaataccgcgagtgcaacgaagaagaatattatcgggatcagggcgaccagagcggatagccccagtcctcccatcggcatatacatttgggtccaggtaaccatattgttcagtctcttattatctttatatgcttgatatacttaaggttgtaataagcaaaagaggactgaactgtaaaatataggcgttatactttacagcaacagtacgccgctaacgcaattgctacctctggcataacaagtatatcgggtaagggtttctgttccgcacacgcaggcgcagagtatcgttaagatgtccatattgttgttataggcccgctagtaatgcgctacgggtatttaatattgttaaaccctgataatcgctccggttaattccgggataaatgtactaccgcagttactatcatagccccgacaataaaacttgccggggctttttttgacgctattaatgactttctttttcgcgtaaacgccaggcgtgtaataacggttcggtatagccgtttggctgtttcacgccgaggaagattaaatcgctggcagctttaaaagcacacgagttagcgaaattccccgccatcggacgataagccggatcgccagcgttttgctgatcaaccactttcgccatattctccagcgacgcctgcacctgttctttggtcagaataccgtgacgtaaccagttggcgatatgctggctggagatacgcagcgttgcgcggtcttccatcagcgccacattgtgaatatccggcacttttgaacaaccaatcccctgctccacccagcgcaccacgtaccccagaatcccctgcacgttgttatccagctcttgttggatctcttgcgccgaccagttagcgttttcagcaaccggaatagtcagcagctcgtccagcagcggttcaaattcagcattgaactcggtctgggcaatgttggcttgcacgctctgtacgttggtttggtggtagtgcagcgcatggagcgtagcagcggttggtgacggaacccaggctgtgtttgccccggcacgcagttggtcgcccttctggctgtacatgtctgccatcaggtccggcattgcccacatgcctttaccaatttgcgctttaccgcgcagcccacagaacagaccggaaagcacgttattacgctcgtaggctttgatccacggcgtcgatttcatctggtttttacgcagcatcgggccagcttccatcaccgaatgcatttcatcgccggtacggtcgaggaaaccggtattgatgaacgccacgcgattgcgcgcctgagcgatacagctacgcaagttcagcgaggtccgacgttcttcatccataatgcccattttcagggtattcggtgccataccgagcattgtctcaatgcgggtaaacagtttgttggcgaacgccacttcctgcggaccgtgcattttcggtttcacaatatagacgctgccagtgcgcgagtttttctgcacttttaaatcatagagggcgatcgcgccagtcatgacgccatcaagaatgccttccgggatttcattgccttcgctgtcccaaatcacaggaatggtcatcaaatgacccacgttgcggataaacagcagcgagcgtccgtgcagagaaatttcagagccatcggcggcggtgtaatgacgatcgtcattcagtttacgcacgatttgtcgaccgtttttctccattttctcttgcagagtcccctgcatcaggcccagcagattgcggtacagcaggattttatcttccgcatcaaccgccgcgaccgaatcttcgcagtcgagaatggtactgatagcagcttcgacgataacatcgttgatgtgcgccggatcgtctttgccaatccgcccgttggcatcaatttgcagttcaatatgcaggccgttatttttcagcaaaatgcaggtcagcgcagcggcatcgccacggtaaccgacaaactgcgccggggtacgtaacgtggtttctttaccatttttcaactggatgcgtaattgtttatcgaccaccttaaacgccaccacatcctgatagctgccgttttccagcggtagagattcatcgaggaaacgccgaacccaggcgataacctgctcaccgcgttgcggatcgtagccgctgaccaccgccccttcctgcgggatgatgtcgctgccgtataacgcatcgtacagtgagccccagcgagcgttcgccgcgttcagcgcgtagcgggcgttcattgccggaaccaccagctgtggccccgcctgactggtgatttcgctgtcaatgcccgtggtttccaccgtcacgcgctccggttgcggcaccaggtagcccagttcacgcaggaaagatttataggccgctttatcttttaccggccccggattgctgcgatgccactcatcaagcgccgcctgaatgcgatcgcgttctgccagcaactgacgattttctggtgccagatcgtgaacgatctcatcaaaattgcgccagaacgccgcagcgtccagccctgttcccggtaaaacttcttcatccacaaaacgtttaaaattggcgtcaatgcgtaaacggccctgggttatggtttgactcattgtttatctcctcgttttcgcttatttcgccaacaccgctgctgccgctttcgcgacctgcgcatcctgtgctccggttaaaccagaaacgcccacggcaccaataatttgcccatcaacaacaaccggtacgccgccttccagcgacgttaataacggcgcagtcacgaacgcggtacgtccgttgttcaccatctcttcatagcccttagtttcacgacgccccagcgcggcggtacgcgctttctcctgggagatgtaagccgcaatcggcgcgcaatcgtccatgcgacttaacgccagcagatgaccgccgtcatcggcaacagcaatggaaaccgaccagttatttttctgcgcctcttcctgacctgcggcaataattgcactcgccatttgctggctaagaatgactttagttttcattttgttattccttttcaagggcttgttctacaatttcaatccagtgacgcacagaggtacgaccggcgctcgccagatgcgtctggcaaccaatgttggcggtgacgatcatttccggtttgccgctttccagcgcattcattttgttatcccgcagctggcgtgccagatcgggatgcgttaacgcatatgttcccgctgaaccgcagcacagatggctgtcgggaacgtccgttaaggtaaatccaagacgaagcaacactttttccacttcgccgttcagcttttgcgcatgttgtagggtacacgggcagtggaaggccagttttttatcgccgcgaactgccagtttttccagcggttcctcgcgcagaagctcgactaaatcgaccgccagttcactgacttgacgcgctttatcggcatataacgcatcgtttttcagcatctgcccgtactctttgacaaacgcgccgcaaccgctggcggtttgcaaaattgcctcagcacctgcttcaatcgcgggccaccaggcatcaatattattgcgcgcccgtgccagccctttctcctgcgcattaagatgatagtccaccgcgccacaacagcctgcttcgttagctgacatgacgctgatccccagacgatccagcactcgcgcagttgccgcgttggtgttgggcgaaagcgtaggctgggcgcagccttccagcattaaaacccgacgcttatggcgcagcggcggacgcggtttagctttcaccgtttcagcaggcagttttgctctgacctgttccggtaaaaacggtcgcagcaccagccctacctgcgtcagcgcacggaagaccgccggacgcggcactacctggcgcaatccttcgcgcagcattcgctccggcagtgggcgtttcactttctgctcgacaatatcacgcccgatatccagcaaattgtgatagcgcacaccagaaggacaggtggtttcacaattgcggcaagtgaggcagcgatcgagatgctcctgtgttttaagcgtgacttcgttgccttccagcacctgtttaatcagatagatgcgcccgcgcggcccgtccagttcatcgcccagaagctgataggttgggcaggttgcggtacaaaatccgcagtgaacacaggcgcgcaggatgctgtcggcttccagcgcgcgcgcgttctgccgcatctcttcagttaattgggtttgcatagcctgctcctcaaagttccgcgtacatgcgaccggggttaaacacgccgcaagggtcgagctgctgtttaagctgctggtgatagcggaataaaggagccgatagcggggcaaagccaccatctccggcactaaagcgggtcgcatgaccgccagcgttgcgggcgatgcgatggatttgattgtcctcggctgtcgatttcagccagcgtaacgctccgccccagtcgatcagttgctcgccgggtaaatccatcatcggcgcatcgctgggtaatgaaatgcgccataaggtacctggtaacgagaagaacggcagttgttgttcacgcaattgctgccagaactgacccgcaacctcttcgccccccagcagttcacgcgccgcttttaccgatccttcgccgccctcaaggcggatccacaacgcattgtcgaagtaacataagccactaatgggtagcggctggagttgccactgggcgatttcgttcatggcttcttgcaggctgatttcccgacgcaggctcagggaggcgcgcggtcgcggtaacactttcatcgagatttcagtgagcacgccaagacaaccgtagcttccggccattaaccgtgagagatcgtatccggcaacgtttttcatcacttcgccaccaaaacgcagatgttttccagcgccggtaatgatgcgcgtgccgaggacaaaatcgcggaccgaaccgctccacgggcgacgcggccccgccagcccgcaggcgaccatcccgccccaggtggcttcttcaccataatgcggcggctcgcaggggagcatttgcccggcgctctccagcgccgcttcaatcgccaccagcggcgttccggcacgcgcggttatcaccagctcggtcgggtcgtaattaacaatgccgcgatgacaacgcacatccagcgtttgcccggtgacagggcgacctaaaaaggctttgctattgctgccctgaatcaccagcggcgttttatcgctaattgcctgattcacctgctccagcagcgcctggctgtaatcacactcgcgtagcatcagaaacgctccagttcagggaaaggtaaatgaccgtgatgcacatgcatggcaccaaattcagcacagcggtgtagcgtgggaatgtttttcccagggttcagcaaaccatcggggtcaaacgccgccttgaccgcatggaaggtcgtgatttcatcgctgttgaactgggcgcacatttgattgattttttctcgcccgatgccatgttccccactgatgctgccgccaacttcaacgcagagttcgaggatcttcccacccagctcttccgcgcgggcaaattcaccgggttcgttggcatcgaaaaggattaacgggtgcatgttgccatctccggcatgaaagacgttggcaacacgtaaatcatattgctgcgataaacgggcaatgccttccagtacgccaggcagggcgcgacgcgggatggtgccatccatgcagtagtaatccggggagatacgtcctaccgccgggaacgcatttttgcgaccggcccagaaacgtacgcgctctgcttcgtcctgtgccagacggacgtcagtcgcgcccgctttcaacaagatgtcgttaacccgctcgcagtcttcctgtacgtcagactccacgccgtccagctcgcataacaaaatcgcttcggcgtcgacgggataaccggcatgaataaaatcttccgccgcgcggatcgacaggttatccatcatctccagcccgccggggataatgccattggcgatgatgtcaccaactgcaagtccggctttttctaccgagtcaaagctggctaacagaacccgcgccacgggcggcttcggcagcagttttaccgtcacttcggtggtcacgccgagcataccttccgatccggtgaacagcgccagcaggtcaaaaccaggtgaatccagcgcgtccgatcccagcgtcagcgcctcgccgtccagcgtttgcacttcaattttcagcaggttatgtacggtcagaccatatttcaggcagtggacgccaccggcattttccgccacattgccgccaattgaacaggctatttgtgaggaagggtccggtgcgtagtagagattatgcggcgcaacggcctgggagatcgccaggttacgcactccaggctgcacgcgcgcgcggcgaccaacggggttaatgtcgaggatctctttaaagcgcgccatcaccaacaacacacctttttccagcggcagcgcgccaccagaaagcccggtgcctgcaccacgggtcaccaccggtacacgcaggcgatggcagacagccagaatcgctgtcacctgttccatttgcttaggcagaacaaccagtaatggacgcgtgcgatacgcgctcaacccgtcacactcgtaaggaatgatctcctcatcggtatgcaggatctcaagtccagggacatgctcacgcagtgccatcagtaccgatgtgcggtcgacatcgggtaaagcgccatcaagacgctcttcgtacaagatgctcatgagtaggcttcgctttgttgtgttgtgtggcagctgatttttgcgcgctgcttctgtgaacagttattaagcgggcttttcgttttcgtctatctctttagctaccggtcagaccattttttttccagctctgtgaccttgccttggttaactcaatgttaaattgatgtaacataatcacttacgtgatgtgcgtgttttgcgagttaagaacagaaaaattggtcctacctgtgcacgaggtccgggaatgaaagatgaacgtcgccctatttgcgaagtggttgcagagagtatcgaacggttaattatcgacggcgtactgaaggtcggtcagccacttccctcggaacgtcgactgtgtgaaaagctcggcttctcacgctccgcactgcgtgaagggctgaccgtgctgcgcgggcgcgggattattgaaacggcgcagggtcgcgattctcgtgtcgcacggcttaatcgggtgcaggacaccagcccgctgatccatctgttcagtacgcagccgcgaacgctgtacgatctgctcgacgttcgcgcattactggagggcgaatcggcaaggctggcggcaacgctgggaacgcaggctgattttgttgtgataacccgctgttatgaaaaaatgctcgccgccagtgagaacaacaaagagatttcgctgatcgaacatgcgcagttggatcacgctttccatctcgccatttgtcaggcttctcacaatcaggtgctggtgtttacgctgcaatcattgaccgatctgatgtttaattcagtgtttgccagcgtaaataatctctaccatcgaccactaatgactccaacttattgatagtgntttatgttcagataatgcccgatgactttgtcatgcagctccaccgattttgagaacgacagcgacttccgtcccagccgtgccaggtgctgcctcagattcaggttatgccgctcaattcgctgcgtatatcgcttgctgattacgtgcagctttcccttcaggcgggattcatacagcggccagccatccgtcatccatatcaccacgtcaaagggtgacagcaggctcataagacgccccagcgtcgccatcgtgcgttcaccgaatacgtgcgcaacaaccgtcttccggagcctgtcatacgcgtaaaacagccagcgctggcgcgatttagccccgacrtagycccactgttcgtccatttccgcgcagacgatgacgtcactgcccggctgtatgcgcgaggttaccgactgcggcctgagttttttaagtgacgtaaaatcgtgttgaggccaacgcccataatgcgkgcastkgcscgrcatccaacgccattcatggccatatcaatgattttctggtgcgtaccgggttgagaagcggtgtaagtgaactgcagttgccatgttttacggcagtgagagcagagatagcgctgatgtccggcggtgcttttnccgttacgcaccaccccgtcagtagctgaacaggagggacagctgatagaaacagaagccactggagcacctcaaaaacaccatcatacactaaatcagtaagattsgcagyatttccattcctattaatattctgctggatgtcaaaacccctgcgcaattaatggaaactctacttccatggctggagaataaataatggggctatacgataaatatgcgcgccttgctggcgagcgactgcaatttagtgacaacgggttaacaccgtttggcacctgtattgatgaagtgtattccgccaccgaaggccggatcggcaataaaaaagtgattctggccgggaccaataattatctcggtttaacctttaatcatgatgccatcagcgaaggtcaggccgcgttagcggcccaaggtaccggcaccaccggttctcgtatggcaaacggcagttatgcgccgcacctggcgttagagaaagagattgccgagtttttcaatcgccctaccgctatcgttttttcaaccggttataccgctaatttaggcgtcatcagcgcacttgccgaccataacgccgtggtgttactggatgccgacagccacgccagtatttatgacgcctgttctctcggtggcgcggaaattattcgtttccgccataacgatgctaaagatctggaacggcgcatggttcgcctcggtgaacgggcgaaagaggcgattatcatcgttgagggcatctacagcatgctcggtgacgttgcgccgctggcggaaattgttgatatcaaacgtcgtctcggtggttatttgattgtcgatgaagcgcattcgtttggcgtgttaggcgcaacggggcgcggactggctgaagctgtcggcgttgaagatgatgtggatattatcgttggtactttcagtaaaagtctggcctcgattggcggttttgctgtcggttcggaagcgatggaagtgctgcgctacggcagccgcccgtatatttttaccgcctctccttctccgtcctgcattgcgaccgtgcgctcgtcgttaagaactattgccacacaaccagagctgcggcaaaagctgatggataacgccaaccatctgtatgacggtctgcaaaaactgggttatgagttaagttcacatattagcccggtagtgccagtaataatcggttcgaaagaggaaggtttacgcatctggcgcgagcttatctcgctgggcgtgtatgtgaatcttatcctgccgcctgccgcgcctgcaggcatcacgctgctgcgctgtagcgtaaatgctgcccacagtcgtgagcaaatcgatgccatcattcaggcatttgctactctgaagcagtaatgtgagcccgccgtggtgttgtgccacggcgggtttaatgttgcctatcaaatagatacaccagaatcaacgccgccagcacaaatgccataggtaaaccgagtgcagcaacgggcgcactcagcgcaaataataatcccagattgaccattatttggtagcttatccaggtaagtaagccaacgatgacgcctacagcaagacggctgcccatccccggcgagcgcggggcgctaaaggtaaaaggcactgccagcaaaatcatcgccagggttaaaatgggatgccccagcttttcccacaatgccaggcgatactcactgctcggttgtccggtttcctgcaagtaattgatgtaatggttgagctgacgaacggaaaagctattgcccggcatcgacagttcttcaagattcatactggtgaatgtcgattgccaggcaagattatctaatatttccagcgtttctttgccattcagccattttttatgattcacaccatgcagaatccacgttttgtcgtcttcaatggtggcactgcgtgcataaatgtaggattcgagcgagagatcgtcgcgataatgaaatatctccacgcccacaggctggccctgttcattcagcaatttcaccgtcacaaattcattaccgcgcctggcccacagcatattgccggtaatatcatcgtcctcccccaacgcggtggcggtcgatttgatttgcaacgcctgttgctgcaatggcgacgccacccactcatctatcgcgcctaacgaaacagtccacaatatcccggcaaccagcgccaccagtgcaatacggaagatagaaaaccccgtgctgcgaatggcggtaagctcactgtttttcgataactgccccagtccaacaataccacccaataacgcgataaacggcgaaagttcgaccagtgtgcgcggtaaggtcattagcaccaccagcaccgcctgagtccagcgataaccgcccgggttgacatcatccagttcgttaatcaggttgaaggtggtaaaaagcggcagcaatagccctgcggcggcggcaaaaccgagaaagagatgacggattaaatagcgactgaaaacattcatcgggaaaatttctgcagcaaagagaagtcgcgtgcgaccagcatcagcaggcccattagcatgagtccgggtactaaccacaaaccaggaatgaggggaatcgcgccgttagccaccagcgtacggcagacgtcgccgccataaaaaatggcaataaacagcaacgtcagtggcaataatgttgaaaatcgcccttgccgcggttttacccgacttaatgaaatggccagcagcgccatcaacaatgctgtcaggccacggctttgtcgccattgcagttcggcatgatcggcaggaaaggcggagcgcgccagctccgtgaccgattttgctttgcgtttgacgttagggctttgatccagcggattcagatgtaattgcagattacggtagatctgttcgttgtcgtcacgcccctgatgatcgagaagataggcagtgccgttgtgcaacataacggtcggtttctcgggtgatgggtcaaccacatcaaccgaacgggcgcggaaaatgcgggttcgattggcagtagaagtataaatcagcgcgtcagtcaggcgattattatcctgatcaaccgtctgcgaaaggatcattcgtccgttatcgttagtgttaaatttctttgcccgcaactggcgaacatccagctccgactgcgactgctgctccagttgataaatctgcgtataagcccacggacgaccatacatcgacagaagggtgacaaaaatacttagcggtatcgccagataaagaacggctttgtacaagcgtcccggactgcccccgccgcagagatagcggtaatttccgagtcggtatacatctgccctagcgtcacgccaactgacacatacagaccaacaggtaacaacatctccagtgcaatcagcactttgtagaaaacgatatccagcacaacatcaagagctaatgtcccatttgccgcttcggtcagataacgctgtgcggagtagctggcgaaaataaagatcagaaaaccgacgataatcagcaccagacggcgcgtaccacgcatgatgtagtgttcaaccagcttcatctcactaacgccctcaatcctttgaattttttattcattgatcagtttctgcgccagcgcaatgacatgatctacctcttccggcgtcaggctgccgtcctttgcccactgaatttgcccggctttattcagcaccagaatggttgaactctgctccggcaagcgccaggcaacgcgtccctgtccattgccgtcaataatgaattgcgcccacggatagcggcgtttatttttttcgattttgccaacaacaaaatagccagtaccaaagatggcatcatcggtgttcacaatggtggtgggctgaaaacgatcctgcggaaagtttgccgcttcaaccgctttaattaacagtgagttctttttcttcgccgacttacgcccggcgatatactgaataatgcggacttttcccgctaattgtgtgctgttccacttttggtagtgaatttcgtcgtcgctattcagaagcagctcgccgccttcctggatataaacaggggtaaccgttttgccagtgacgaaattgtgtgcctgcacacccggggctaaaagcatgataatcagcgcaataatcaaacgagatgacatcattgctccggttatagcggaaaacgcgaaatcagcagctctaagcgctgacgaatatcgctatccagcgccaccggtgcatcatacgactggcggttttccatatcatccgccaccatgtcgtcgtgtttatctcccatcaggccattaatggcggcgaggaaacgggaaatctgtaacgcctctttattttcaggatcaagcgatcttaaggtgtcgtaataagaaacctgttggctgatgatttttcgcacatcatgaaattccctgccggttagtcgcggtttggcaataatctctttcagggtatgcatttgcttttgccgataggcaataaaactgcttacgctttctaactggctatggcgtaatgaatagttcaccaacgaccagaccggagagcttaaataaatccgtaacaggttgccgtaatacgacacaatatttttcttaccgttacgaaagccgtcctgaaaacgccccagaaaaacggtcgttttgccgaataaaaatccggcctgatgcttctttaaatacagccgttgcgcaaaacgcaggtgcttgtagcgcgctcgcatgtatttaaattgtttgcgctcatcagcagtcagctcatcgcctttggcttgtttgcgaactaaacgcagtaattcctgacgatcaacgccattgagccagaattgcaggcataacgcgtaattatcatgaatgatttcggtggtacaacttagtgcaatagtcggcggcaaactaacctgtgcatcaacgacatcatcttcttcaatcgcaacaaatagacgctcgctcgcctcaagcgggaaatattttctcatcatcaggatttctctccggctgcgttataaagcaaggaatggcgctgaaaaaatgcctttaaggttggaattaacgagagcgccacgtccagacattgcccaccgaagtaagcaaacgctgctcccagcacaccaaacagatgacagaacatgaacagcaatacgatgtagccgattgaggcgatggtttgcgccacgagaaaagcgcgctgttttcccgccatcaatagcaatgactcctgagggaagcccagcatcgaaatcacaattgcgcccagcatcacctgaatcaggtcatacgcttcgagatacttaacgccaaacaccagcgaaatgagcggcttgccgacgataaacaccgcgagcgccaccagaataccgattccgcccgccagtaaaccggacttcacacctaacaaccacggtctggtggtgcgcggatctaaacgcatcacctctgggtaaaaacttttacccagcaaacccgctggcgttccggcggcgtcgaagaatgtcatggcgattttaaataacccggcggcagcgggtcctaacacgatccccaccagcactgtgctgcacgagttacgcgccgaccagatggagtgggcaatgttggttgaccagacaaaactccacgcgcctttgatgtgtcgggcagactcaaacagattcaatttgaaggcattatggatatttctgcggcgtaattcgcgcgctgcaaaccaccagtacatggtgccgccaaccagattcgacacgtaccaggcaataacaaaacccgcaaaaccaaagtcaaaataccaggctacgacgctccccgctgcgcgcagaaaaggtttcgtcgcctgctgtacagcaattaaatcgaagcgatctaccgcacgcagaatgccggtcggcgtggaggaagccattgaaggaatgagcgtgcaatacagcgccgccagccaaaagctttggtcatccagacctaatgaatgggaaaggaatggcagtaaggcaatgccgccgacaatcgccaccgcgccgctgacgatatccagcgagaaggaaaatgagacgacattgcgaaattgctgcggattattgttggtcaaggctggcgttccgtactgaaccaccagttgccatgtctgaaacttaataaaatcgctgatcgacttggcgtacgattgcacaatcaccagtacgccaaacatggcgggcgtcatccctttaccggcacacgagagcgccaacagacccagcaaggcgctcacgacattactggagcctaaccaggcgctattgcgaataatggtgcgaaacgcgccatctgcaaaccaatgtttgatgttaaaacccgccaattcagcctgaccttatcgttgatagtaaaaagtatcccgccagccttaagttaaacttcggcggtcagaaacgatggcaaccagagaaaccgccttctgtgcctgttccagcacttcgctgtagggcgctctggaatcaatctcaagaatttttgtgccgttatagccaatcgtcgacatgacgccgattttgtcctgcagctcggcatagtcatggtcaggcttgcgggagatggcagtctcaatatcaatgcccaggcgaataattaattccgggcgatattgcgccatttgttggtataaacgccgttcgcgctgcgccagaaacatgctgattttcccggtcgcacgttcgacgccaatccccggtccatcataataaaagcccgaaatttcagcctgcgggaagcgatcgctgaccaccagaacgccactttgcgccagtcgctgaaccttgcgtagattcgccattcttcgcagcgagaagcagtacataatcaccgccgcccatagcgccggagatttggttttcatgctttgggttttcgaggatttggccgccagtcgccgttccagccagacgccaaccaacggcaatcgtttgattttgtcgccgtcttcgccggagagcagccccagatagcgccgctcggtttgccagtgttgttgcagcgatttcaccaggtcggtggtcagtgtggatttaccggtgccatcacacccgaccaccgcaatcagccccggaatgtagttgggctgcggcgcggttgtactattaacagtttgagtttgtagtgcatccattcgttaaatcatcccctatccattttggtgatcaggaaagcgcggcgtgaattgcgcgtagtgacgcttgcagaatttcatcggcggggtgtcgcccatccagttcaaggatctttgcgccattgaatgtcagttgcggcgtaacggcgattttttcctgtaacgctgccagttggtggtcaggtttacgcgcaaacgcggtttgttcatcaatgccaagacgaatcaacaatacgggcaaataagatgccatccattggtacagcttcagctcgcgctgccttaacatttttatccaaccgttaccgcccgtggtttttgccaattgcgggccatcaaagcgaaaacccggcacttcaacctgcgggtagcggtcggtgatgagcagaaagccttgctggcttttacacaacattttgcgaaacttgtacgcccgccagcaggaaagcagatagataaccagagcagtaatattgccaggcggtgttgagggcttttcgtgcacatgtgccgctttacttcgcaaataacgcccaaaaggtgcgccaataacagggagctgtgaaatccattcgccaattcgcccggacgattgcccgagataaatgtgttctgctggcattcttgctgccagttcatttaccaggctagccgtgagggtcgatttacctgaaccatcacatcctacaatggcaataacacgcactggcgtggaattaattattgacatatcacgttgattcacgaaaaacccggcagtaaataatgtattgaatattacgtggtccgtgctcagaatatccgttcaaccttattgtgacaatggttaattgtgacattgacctgaattacgctttcataaaaacatattaaccaaataaatattttggatggatatttaaatttaaggatatattcatgcagtcaataacacctccattaattgccgttattggtagcgatggttcaggcaagtcaacggtgtgtgaacatcttattaccgttgtcgaaaaatatggtgctgccgaaagagttcatttaggaaaacaggccggaaatgtcggtcgtgcagtgacaaaattaccgttgatgggaaaatccttacataaaacaattgaacgaaatcaggtgaaaacagcaaaaaaattgccaggaccagttccggcgctggtaattacagcgtttgtcgcccgtcgcttactgcgctttcgtcatatgcttgcctgtcgtcgtcgcgggttaattgttctaaccgaccgttatcctcaggaccaaattcctggcgcttacgatggtacggtgttcccacctaacgttgaaggtggtcgttttgtctcatggctggcaagccaggaacgtaaagcgtttcactggatggcgagccataagcctgatctggtcatcaaactcaatgttgaccttgaagttgcctgcgcgcgtaagcctgaccacaaaagggagtcgctggcaagaaagatagccataacgccacagttaacctttggtggtgcacaactggttgatatcgatgccaatcagccactggaacaggtgttggttgatgcagaaaaagcgattatggattttatgaccgcgcgtggttatcactagccaaaaatggaaatgcccgatcgccaggaccgggcattttcaggaaggttaaatcaactgcaatgctatccagtacagcccaccagaaagaaaaatcgccgccggtaaagtaaatacccacgccatcaggatgctggttaccgttttacgctgtaacccaccgccgtccaccaccatcgtccctgcaactgcagacgagaggacgtgtgttgtggagacgggcatcccaatataactggcaagaccgatagacactgccgccgtcatttgtgccgccatgccttgcgcatacgtcatgccgcgcttaccaatcttctcaccgatggtcatcgctacacgacgccagccaatcatggtgccaatgccgagcgccagtgctaccgccatgatgatccacaccggagcgtactcaatggtgcttaacatatcgctgcgcagttttttcagcaggttctggtcttctttactgacgcctggcagtttcgccagcttcgcggaggtatctgagatgcacagcataatgcggcgcagctggctgcgctgactcacgcttaacggctcgtaactttccatattgcctggcagcatcgttttaacgcgcgcaatcgcatcaaaggtatttgccggatgacagtgaaactctgttacttgcgcgccatcagtcgatgccgcaggcaatggaggttccatcgcaatcaacttctgcggcagttcaggatgctgttgcagatagtgttcgaagttggagacggcatcgcgagtacgggtaatttcatagccggacgcgttcatattgacgacgaagccagcaggggcaatccccaccagtaccagcatcaccaggccgatccctttctgcccgtcgttcgcgccgtgcgaaaacgccacgcccgcagcggaaacaatcagcgcaatacgcgtccagaatggcggtttacgtttgccttttttctttttgcgatcttccggaatgcggtgaatacggtcacgctttttcgtcccgctccagaaacggcgcagcaggaaaatcagaccacccgcaatgaccaggccgacgataggggaaacaatcagcgaggagaaaattttggtcacttcacgcaggtttaacgcatccatcaccgatgagccggttaacagcgcgttggttaaaccgatgccgataatcgcgccaatcaaggtgtgcgaactggaggccggtaaaccgaagaaccacgtccccaggttccatataatcgccgccagcagcatggaaaagaccatcgccagaccgtgggttgaccccatattcagcaacaaatcggttggcaacatatggacgatggcataggcgacgctaagcccgccaagcaacacaccaaaaaagttaaaaaacgccgccattactaccgcaagatgcggctgcatggcacgagtataaataacggttgccaccgcgttcgccgtgtcgtgaaaaccattgattgcttcgtagaacaacacaaatgccagagcaagtaataacaaaagccccgtatatatatcaaggccaacaaataaatttagcatatattagattacgccattttgaatttacgaacggacgcattatcagtgactttcacggcgtgggcaaagtgaaatatcatcttttaacgataaaaagagtgttatttcttgtgtatcagacaataagcattcattcaaaatctttagaaataatcaaaacacaggtattccactggttaatatattcacatatgaaatgaataaatattggaatatataaatattgaatattttgattaatccccgtactgattattcttcataatcagtacggggttgctacaacatgtattactttttcaccacaattaacggttcaatatcactctcttttttgatgaccagtgattcatcaccgcgcaaacacgtcccaccgtagttgccgccaacggtgaaggtacatacctgaatgtatttaccgtccactttcggcaaacaccacagttgctgatagatgtttttctgctcggcaaatttaccgctggttttgtccagcacctcttcatgatggctgacgaggtcgatattgctgccacagcgaccggcgatcggtttcactgcgtaacctgttttcaccagttcatcattaacagtgaaatcggtatccagcaggtaacgatggtgcgggaacagcgaccagaggatcggcagaatcgctttgttgccggggatcaccgtccacagcggctcaaagaccagcacttccgggcgcagcaatacgtcgataagacgcacttcgttttgcggatgaccggtacggattggcaccgcagcaaactcacggtcgctaacttcacgaatctgatcaaacgcggtttcccacgcccaggttttccacacgcagttaaccagccgtccttccccatcaatcagttgcccggcagcatcccagcccagttcatccagcccgcgcaagatacgcgtttcaaagcccgcctggtgcagcgcctgctccataaactgcgcgtgatagttttcctcgatatctttgtcctgcatgatatggacaaacggacgtgcacgactgtgtttccaggcaccagccagttcgttaatcagcccttccgccggattgaagccgttgcctttatagccctgctccgcccaacgttcgaggatcaagcccgcttcggtatgacatgaggcagagtcggcgttgtactcgtaaaccttcagaccacgctcatccatgcagaaatccatacgaccggtgatcatatggtgacggcgacgctgccaggagagacgcaaacgtggccagaggattttcgggatgtcgaacagcgctagcaggttgtcatctttcagcaccttgtcggttgcgtgaagatacatcaggtgcagctcgttggtggctttaattagctcctgctcggcactctcggtaatggtgtagtaatgataaggatcctgattgatcacctgaccgttggcctgcacataggcgttttgcagcggatctttttcatccagccatttaccgtcaaactggcctttgttttccaggcgcgctccgctgattttcagcagctcgcctgcaatttccggctgcggtaagctgtattcagtatcttccgtctggatcatccagcccagaatggtggtgtcatcaaaagtgtctttcagggtatagcagccgttttcgaccaccatctccagctcacgcgtccactgttgcccttgcggcaacggggaatgaatcacgttctgttccgcaatacggactttgttgccatgcaattgggtaatgatggcgacatggccagtgtctttaaattcaccgcctttatcccagataagaagcgcacccgcgaccggcgcacgcggcgagccgttaggaaatgcctgcaatggcaggatgttgtcattaaccacttctcgcaggaagcgcagcgagaaaatctcccacgccatacccacgtcagtaaagaccacaccgtaattcagaaagagaaaacggcgagcaaattcaacgcattgccacttgtggcccatatattcgtcgtcgatatagctacggaatacggcgtcatcttcgtattcctgcggatcgagagaactgtaatctgaagagtagattgctaccccacctggggcgtagcccaataatgtcccgaacggggcatcctggctggtcgttcctttgctcatcactttacctttaacaatacaacctaagcagttggcgtaattgttgtgctctgattacctgctcagcgacattaaccggacagaggtcagactaatcatacacctcatcgcagcggctggcgcaaagggttaaaaaattcacattctgtacagcaagtgacctgctacactgcttcaacactaccactcagaaggcaactcactatgacagacaatacttatcagcccgcgaaagtctggacgtgggataaatccgctggcggcgcgttcgccaatatcaatcgcccggtttctggtccgacgcatgaaaaaacgctgcccgttggcaaacacccattgcaactttattcgctgggaacgccgaacggtcagaaagtaacgattatgcttgaggagctgctggcgctgggcgttactggtgcagagtacgacgcctggctgattcgtattggcgatggcgatcaattctccagcggctttgtcgaagtgaacccaaactcgaagatcccggcgctgcgcgatcatacgcataatccgccgatccgcgtgtttgaatctggttcgatcctgctttatctggctgagaaatttggctacttcctgccgcaggatttggcaaagcgtactgaaacgatgaactggctgttctggttacagggcgcggcaccgttcctcggcggtggttttggtcacttttaccattacgcgccgatgaaaattgagtacgccatcaaccgctttaccatggaagccaaacgtctgctcgacgtgctggataagcaactggcgcagcataagtttattgcgggcgatgagtacaccattgcggatatggcgatttggccgtggtttggcaacgtggtgttaggtgatgtgtatgatgccgctgagtttcttgatgcgggcagttataagcatgtacaacgctgggcgaaagaagtaggcgaacgtccggcggtgaaacgtgggcgtattgttaaccgcaccaacggaccgctgaatgagcagttgcatgagcgccatgacgccagtgatttcgagacgaatacggaagataagcgtcaggggtaagggttggtgttcgtcgcagcaagccatccaggccggataaggcgttcacgccgcatccggcaatcgtgcacaatgcctgatgcgacgctgccgcgtcttatcaggccttgtattatccctccagtgcagagaaaatcggccagttttctctgcctgcagtccgcatgccgtatcgggccttgggttctaacctgttgcgtagatttatgcagcggactgcctttctcccaaagtgataaaccggacagtatcatggaccggttttcccggtaatccgtatttgcaaggttggtttcactatggaacatgaacttcattatatcggtatcgacaccgctaaagagaaactggatgtcgatgtgttgcgtcctgatggtcgtcatcgcaccaaaaaattcgctaacaccactaaagggcacgatgagctggtgagctggctgaaaggtcacaagattgaccatgcgcatatctgcatcgaagcgaccggcacctatatggaacctgtcgctgagtgcctttacgatgctggctacatagtgtcagtcattaatcctgcgctgggtaaagctttcgctcagagtgaaggactgcgtaacaagactgataccgtggatgcgcgcatgctggcagagttctgtcgtcagaagcgccctgcagcctgggaagcgcctcacccgcttgaacgcgcgttgcgtgccctggtagtccgccaccaggcgctgacagatatgcacacgcaggaactgaatcgcactgaaacggcgcgggaagtccagagaccgagcattgatgctcaccttctgtggcttgaagcagagctgaagcgtcttgagaagcagataaaagacctgacagacgatgatccggatatgaaacaccgcaggaaactgctggaaagcatcccgggtatcggagagaaaacatctgcggtattgctggcttatatcggtctgaaggaccgcttcgcccatgccagacagttcgccgcttttgcgggtctgacaccacggcgttatgaatcaggtagcagtgtgagagggcgagccggatgagtaaggccggacatgtgtcgcttcgcagggcgttgtatatgcccgcaatggtagccaccagtaagactgagtggggacgggcgttccgcgaccgtctggcggctaatggcaagaaaggaaaggtgattctcggcgcgatgatgcgcaagctggcacaggtggcgtatggagtgctgaagtcaggcgtgccgttcgatgcgtcacggcataatccggtagcggcgtaaaaatcgcggaagggatgaaaaaaacagcgcctgacggcgctgtgtctggcatgcctgcaatccgggaaaccggaccaggaaaaaacttgcaggccataacagtatctacgaaagctaatcatcatgcgctggtaatgtcgtaatccatttggcgcagtgcgtctaatgtggctttggcttcatcttcgtcgatgatgctcatggcaaatccgacgtgtaccagcacccactggcccagtagatcggcagggttaccttcacaaatcagggcgatattcacatcgcgcttgataccacatacttcaacctgcgcaagctggtgaatatcttcaccgacagccagcacctggcctggaacgccaatacacattattaactccggttattcaacttcaatacttttgacgatcagcgaatcgccggtatcgacacgcaaccgctcgccgtgacagagcggacactgcgcatcgtgctgatgaatctccaccacctggctgcaatcccagcaccaagcctgggcgggtttatagacgatatgtaaatcgcacccttgcgccaccgttccgtggcagacaatttcaaaactaaaacggacggcactctcctcaacgcaggagagcgcgccaatttccagccacacggcggtgacgcgcttaacatcgtgctgctccgcctgccgttggataatttcaacggcgctctggcaaagcgacaactcatgcattttcgccactcctgcgaccaaacagcagggcgcgacgccctgcgtgtggtacatccggattcgtgactggcagcgaaaggatcattcgtgcgcagtcatccgtcaggcgttggccctcttcaatcgacatactgtgcgaaagcggtgacatcagcgaacaggagaggtattgcgaaacaccgtccagttcgccaacggtaaaggtcatggtgccatacggcagttgcagaccaattttttcactcactttgcgcagcggccagagttgatccgggccggggaagataactgcactcagcatccacggggtgatcacacaccccgtccactgaccttcgaacagcgtaaaatcagaaacatacaccggcattgaaggatgcagaaaagagagatcgtgcatcgaacgccgggcaatttcttcaaacgctgcctgtacttgcgccttcggggaggtctggaaacctgctatctcttcagtcatgaatcgcctcccgtgggatggcttccacgcctgattcgcgcagcgcagccagaacctgctcaagcgcaggttcaatcattgcttcaaccgtcggcgttaagccgatgtgtggctccagcgattccgggatcacgccgaccagggtcagctttttcggaaactcgccggtgaagcgcagggccgacaagacgtcggccaggccaagctgatgcggagagattttgttggtaaacaacgccggaacttcttcatcccgcaggatcatcatcgttcccggcgcgctcttcttcgacacaatggcatccgcaataatcagatgatcgcgatttgccatgtcgccaagcagctccattcccgccgtgccgccatcgaggatctcaacataatccggcagaatgtatcgttgctctaacgcttcgacaatccgcacaccgatggcttcatcggtcagcaaaatattgccgacccctaagactaaaatacgcattacagaaccttcactgaaaccacttcgttgccgtcggcatccactacgtgtaccgcacaggccatgcacgggtcgaaggagtgaatggtacgcaccacttccagcggtttattcggatcagcaaccggtgtacccaccagcgactgctcgtaaggaccgacgtcatcattgaagttacgcggaccagagttccaggttgatggaacaactgcctggtagttgctgatgataccgtctttgatcaccatccagtgagagagcataccgcgcggcgcttcgaggaagccaacacctttgaactcacccgttgccggaatgttcggtttcacaaaggtggtgtgatcgcctttgccgatattggtgatcagtgcactgtattggttttgcaggatatcctgcaattcacagcagtgaacggtacgaccaataatacggcccagcgtggagtgcagctgtgccacttccagcgtgttgccagtcagtttctgataaatcgcaacgatttcattcagtttgttctgggtagattctcgacctgccgccagtttcaccagcatattagccagcggccccacttctaccgttttgccgtagaaagtcggtgatttcacccaggaatatttcccgtcgtcagaccaaccatcataagccggaatggtggtaccttcccacggcgcctgtggcgcttcgtctttataccaggagtgcttcgcgctttcctgaatgcctttgatcaggtattcatcggaatgagaagtgatcggacgatacgaggacagatccgcattctcaatgtagccgcccgggaacaggaagctgccgtttttgctgtcggtcgggaattccggcacgctcaggtagttcaccgcacctttaccgcgcgtcagccattccgggtagaacgcggcgataaccgcggtatcaaccttataaacctgctcaacaaagtcgctcagtttgtcgatgaaagacttgatgtacatcaggcgctcaaggttcaacacgcccaacccgtcgaggttgattgggttcgcgacaccacccactgccaggttctgaatgtgcggcgttttaccgcccagcagcgccacgacgcggttagcgtcacgctggcactccagcgcctgcaggtagtgcgctaccgcaatcaggttcacttccggcggcagtttcatcgctgggtgaccccagtagccattagcgaaaatacccaactgaccgctggcaaccagatctttgatcttgttctgaactttagtgaactcttccggactgttcagatgccaggtcgaaacgcctttcagcatttcggaggctttggttgggtcagcttgcagtgcagaagtgatgtccacccagtccagcgccgaaagctgatagaaatgaacgatatggtcatgcgtggtgtgcgcagccagaatgatgttacggatgtattgcgcgttaaccggaacgtcgatattcagcgcactttctgccgcacgaacggaagacagcgcgtgagtggtagtacatacgccacagatacgttgcacaatcatccatgcatcgcgcggatcgcggtttttcacgatctcttccatgccgcgccacatggtaccggaagcccatgctttcgaaacgacgccattttcgatttcgcaatcgatgcgtaaatgcccctcaatacgggttaccggatcaatagtaattctctggctcatgctttgctcgcctcatgacgattatgatcgttttgttttaaaggaggaagtatcggcagtagacgaatgagtacgatgtaagcgcaaatctcaatagccacaaaaccaatagaaatcaacagttcttcccaggtcgggaagtaggcgtaaccgccgcccgggttgaatgccaccagcgaataggtcagacgccaggttgcacaacctaacagtgcgctcagtgctgacaggaacagcatgcgggaatcattacgcagcttcgccacacgcagaacgaccagcgggaagagcatcagcaggacttcaatccagaacatcacggagtagaagtcaccggcaaacgctaacgacagcttgtcgcgatagataagctcgccaaagcgcagcacgatgaaaatcgccagcaacacactgatggtgttggtcagcttaacaaacagactcttttcatccggaccgttgccacgcagacccgcctgcaccagcgaaccttcaaagatgacaatcgagaagcccatgatgaacgccgtcagcagcgagaacagcggcaacatttcatagctctgccacaacggatgcaccttgtagcccgccgagatcatcagcgaccccattgaagactggtgcatggtcggcagcagcgcaccgagcgcgatgatgaagaacatcaccttgtttagtcgctgtagcgacaccttccaccccagacgttcaaacagtgccggagcaaactccagtgccatcacgccgatatagatggtcatacagaccgccgtctcgaacagtaccgagttcacgttgaagtgacccggaatgtagaagtacggcaggttccagtagcgacccacgtcgatagtgatcgacaagccacccagtgagtaaccaaacagactcgccaacagcgccggacgcaccagcggatggtattgcccacggttaaagacgtataccgcccacgccagcgcccagccgccacaggcaaagccggtgccaatcagcaggtcaaacgcgatccacacgccccacgggaagccgccgttcaggtcagagacagagcccagaccgaacaccagacgcttcacaatcaggagcatacagatgacgattaacggtccaaaaatcatgaccggtttactgatgattttgccgcccagcggttgtggatcatgactcatgatcgtctcctccgtcgtgatggtcgtttttggtgttgcgacgaaccagcacggttaagcccgccagcacagccagtggtagcatcatgcctttatacagggtgtgttgaatattttcggaacgcgcaccggtagaaagatcgtccagtttcggcaggtcgagattttcataaggcacacccgtcagtaccagaacctgagtaccgccgccctctttctcgccgtacagatgcggataatatttcggcaccgtatgcaggtaagtgtcgccagatttcagcgtctgacgcggatagtggtattcgctgccaggcttcagcgccagacgttttttcgcctccgccatcagctcttcacgcgtaccgaaaatcaccgcgcccgccgggcacacttctacgcagccaggcagaccgcctttatcgagacgttccacacctttctggttgcacagctcgcacttatgcagcgcaccaaacgggttgttgtagtcgtacttcggcacgttgtatgggcaggcgaccatgcagtaacggcaaccggtgcacacatctttgtcgtaatggacaatgccggttttcggatcttttttcagcgcagagaccgggcacacagagacacagttcggatcgacgcagtgcatacactgtttcttaatgtacgcgtagccgttctcctcctggtctttgttgacccctgtgccgctggtccacacctgaatgatgttattggtatacggcgacagtttgtcgttgttcgaccaggtctgttccccttgcgggttacgttcagggaagttgatatcctgacacttggtgacgcaagcctggcagcctacgcacaaggtcgagtcgtacaacatccccagcgatcccggaattggcgggcggttttcagcagccgcatgactgacagacggcagcgcgcccgtcagcaatgccccgcaggaggctgctttaataaaattacgtctgttcacggttattctccccgtgagtcagcgttatctttcttttgctgacgacccagttcacgcaccgccatcacgctgacaccggcaaccagcccaaccacaccgccgagcaaaccaatagcgcctgcagagacgttgccgccctctttagcgttaacatccggtttctgtgaacgcggagtctgattttcgacgttggcaagctgatggatgcctttatggaagccgataccttcttcgttacagccatagcatgggtgaccaatcgctaccggccacacgccgccaacatcgcagaattgcagcgttgagcagttgccgtaagtttctggccctttacagccgaggtggtacaggcaccagccttcacggtggccttcatcaccgaactctttggcaaaacgaccagcatcgaagtgcgggcgacgttcgcagtgttcgtgaatcagacggccataggcgaaggtcggacgatttttgtcatccagtttcggcggtttgccgtaagtgatgatgtgcgcaacggtcgcgaggaagttgtgcgggttcggcgggcagcccggaatattgataacggttttgcctggcagaacttcttgcaggctgactgcgccagttgggttaactccagctgcggcaacaccgccccacgcagagcaggaaccgatagcgataatcgctgctgcgccttctgccgctttgcggatgtgatccacaatcggctcaccagcaaccatgcaataaataccgttatcttttaatgggatggaaccatccacaaccaacacatactgccctttgtacttctcaagtgcgttatgtttgttctcttcgacctgatgaccgaaggcggcggaaagcacttcgtgatactccagagagatagtctccagcacgaggttttctaccgttggatgcgttgcacgaagcagagattccgtacaaccggtgcactcctgcgcgccaatccagataactggcggacgctgcgggttagtaaccgattcggccatctctgcagcggctttgctacttaaccccatggtggcggctaatgctgcacaaagcttcatgaaatcacgacggttaatgccgtgagaatggatgagggtgttatctccagtcatttatagttattccgttgcgaagacctggcatatattttgcctcaatcgcaaaatcaataatgcgatcgatgcgccatttaccacacatttattatggttatcgatatcatgatactgcggcggggcgctaaaacgaagggaagaagcattagtgtaattaattaaagcaagataatacgtatgtttgatcaattttcgaggcgataaccggccataaaaaagcgcaacgtagaacaggaattattctcacgaaagaaatccattaccatctctttatccagtccatagcggcgcgtcagaatacccgcttcccaggcgctaagctggcgatctccggtcttttcgtacatccggtgtgagtagcctaatacaaaaccgcgtttataatcggcacagaattttgtcacattaaccgcactgtcggcatgcgttgcttttaatcccgccattaagcctttaccaaaatggttattcatcgttcacctcattcgttatatatagccatatatagcgatattttaggcaaagaacgacttttgcgcacgctattttttcatgcttgtttaagacgtaatccagtaagagataaacctatcaggagagatatttatcgaaccatttcagtgtcctttgccaggcaagatcggcggcagatttgtcataacggggcgtggaatcattatggaatccgtgattaacccccggatagatatacgcctcataaaccttattattggctttcaacgccgcctcgtaagcaggccagccctcgttgattcgggtgtccagttccgcgaagtggagtagtaaaggcgcttcaatcttcgccacatcggcagtgggtgcctgacgaccataaaacggcaccgcgcaggccagttccggatacgcgacagccgccgcgttcgatacgccaccgccatagcaaaatccggtaatacccactttgcctgccgcttgcggatagcgttgcataaactcaattgcggcaaagaaatcattcatcagtttggttggatcaacctgctgttgcagctcacgacctttatcatcatttcccggataacctccaacggaacttaagccgtcaggtgccagggcgatataccccgccttcgccactcgccgtgccacatcttcgatatacggattcagtccacgattctcatgcaccactaccacggctggcgttttgccgctcatttttgcgggtttcaccagataaccccgtacctcgccgtgaccatttggcgaaggatacgtgatgtactcagcaacaatctccgggtcggtaaactctacctgagtcgccagcgcataatttggcttgagcaaatcaaacaacgctaatgccgtcatcccgcccaccgcatacttcgccgcaaggttgaggaactcacgtttcgagattttcccgtgagcgtaatagtcgtagtaatccagcaactcttgtgggaaatctttggcggttaaacgcggcatcgttgcactcctcaattggtgtttttttaagcaaagcataagcgcgtgtttttgcccagtttttcgtcactctgtgagccagactacgggatacgcgctggcgaatcgctaaactagaaacattgtttcgaaattgaacggtggaaaggagaggtcatggtctggttagcgaatcccgaacgttacgggcagatgcaataccgctattgcggaaaaagcggtttacgcctgcccgcgttatcgctcggtttatggcacaatttcggtcacgttaacgcgctggaatcacagcgtgcgatcctgcgtaaagcgtttgatttgggcattacgcactttgatttagccaacaattacgggccacctccaggaagcgcagaagagaactttggtcgcctgctgcgcgaggattttgccgcttatcgcgatgaactgattatctctaccaaagccggatacgatatgtggcccggtccgtacggctctggcggctcacgtaaatacctgctcgccagcctcgaccaaagcctgaagcgtatggggcttgagtatgtcgatatcttttactctcatcgcgtcgatgaaaatacgccgatggaagaaaccgcctctgcgctggctcatgcggtacaaagcggtaaggcgctgtatgtcgggatctcctcttactcgccagagcggacgcaaaaaatggtcgagttgctgcacgagtggaaaattccgctgttaattcatcaaccttcgtacaatttactaaaccgctgggtggataaaagcggcctgctggataccctgcaaaataacggcgtgggctgtattgcctttactcctctggctcagggattgctgaccggaaaatatctcaacggcattccgcaagattcacggatgcatcgtgaagggaataaagttcgtggtctgacgccgaaaatgcttaccgaagccaacctcaacagcctgcgcttattgaatgaaatggcacagcagcgtggacaatcaatggcgcaaatggcgttaagctggttgctgaaagatgatcgcgtgacgtcggtattgattggtgccagccgcgcggagcaactagaggagaacgtgcaggcgctgaataatctgacatttagcaccaaggagctggcgcagattgatcagcatatcgccgatggcgagctgaatctgtggcaggcgtcgtccgataaatgacctgttaataacgggcgcgcgaaccgcgcccgaatcagatcagtgattatgacgagtcagtcggtcaagatagcccatcacaaatgcagaaagcacaaacgtcagatggataatgacgtaccacatcagtttgttatccgggacatttttcgcatccataaagacgcgcagtaggtgaatggaagaaattgccacaatcgacgctgctactttgtttttcagcgacgttgcgtccattttccccagccagttcagcttctctttgttctcggagatatccagctgtgagacgaaattctcataaccggaaaacatcaccatcaccagcaaaccgccaaccagcgtcatatccaccagcgacagcaacacgaggatcaaatctgattccgccatcgagaagatattcggcagtacgtgaataatctcctggaagaacttcagcgccagggcaactaacgccagcgaaaggccaaagtacacgggggcaagcagccagcgagaagcatacattgcattttcaagaaaacgttccatacattcctgtcgtgtagttaaaacgggcaacagtatatcgcaattgagtaaacagcacgcaacagcaaatcaacatatacgttaaacctttgtcgcataattctgaggtttagggatcttcctggttcccttatcaacgcatcgagagcgtctacccttaaaggacgttgaacctgaagggagaaaaacgatgtctcatttaaaagacccgaccacgcagtattacactggtgaatatcccaaacagaaacaaccgacgccaggcatccaggcgaagatgacaccggtaccggattgcggcgagaaaacctatgttggtagcggtcgcctgaaagatcgtaaagcactggtgacagggggcgattccggaataggtcgcgctgccgccatcgcttacgcgcgtgaaggggctgacgtggcgatcagttatcttcccgtggaagaagaagacgctcaggatgtgaaaaagatcattgaagaatgcggacgcaaagccgttctgctgccaggcgatttaagcgatgagaaattcgcccgttcgctggttcacgaagcgcacaaggcgttaggcgggctggatattatggcgctggtcgccgggaaacaggttgccattccggatattgcagacctcaccagcgaacagtttcaaaagacctttgccattaacgttttcgcgctgttctggctaacccaggaagcgatccccctgctaccgaaaggtgcaagtatcatcaccacttcgtcaatccaggcataccagccaagtccgcatttactggactatgcggctacgaaggcggcgattctgaactacagccgtggcctggcaaaacaggtcgcggagaaaggtattcgggtgaatattgtcgcgccaggcccgatctggacagcactgcaaatttccggcggacaaacgcaggataagatcccgcagtttggtcagaaaacgccgatgaagcgtgcggggcaaccggcggaactggcccctgtatatgtttatctggcaagtcaggagtcgagctacgtcaccgcagaagtgcacggtgtgtgcggcggcgagcatttaggttaaaaaaatgcccggttgtgaaaagcaaccgggcatcatttttatttcgctttggcggtttcttcgccgaccagacctatcttcaggtaacccgcctgatgcagcgtatccattaccttcatcaacgtctcgtaatcgacggttttatccgctcggaagaagatggtggtgtctttcttgccttcggttaacgcattcaacgccgtaatcattgtttcatcggtgaccggatcgttaccgataaacatcgagttgtctgccttcaccgacagataaaccggtttttccgggcgcggctgcggcgtgctggtagaagcaggcaagttcaccttcacatctaccgtcgctaacggtgccgccaccataaagataatcagcagaaccaacatcacgtcgataaacggcgtcacgttgatatcatgcatttcgccgttatcgtcgaggttttcgttaagatgcattgccatcggatattatcctgcgcgtaatttttgtgcgacacgaaccggatgcgcagcggcgctggcttccagatccaggtcacggctttgcagcaacaatacctgcgctgcaacatcacccagcatcgctttaaagccgccaatctggcgtgcaaatacgttatagataacgaccgcaggaatcgctgccacgaggccgattgccgttgctaacagagcttctgcgatacccggcgcaacgactgccaggttagtggtctgcgtttgcgcgataccaataaagctgttcatgatgccccagaccgtaccaaacagaccaacgaacggagaaatcgcgccgatggttgccagatagccgttaccgcggcccatttgacgacccactgcggcgacccgacgctccagacggaagctggtacgttctttaataccttcgttatcgtcgctgccttctgacagttccagctcattctgcgcttcattgagcaaatgcaggcttaagcttttgctaccaaaatcagcggcgatatcgttggcctggtttaaggaacgcgcttcagccagcagttgctgctcgcgcttaaggcgacgcttctgattgaagaactctacgctcttactgaagaagattgcccaagtgactacggaggccaaaataagcccaatcatcacgcacttaacgacaatatcggcgtgctgatacataccccagacggaaaggtccgtctgcattaaattattacccactgtgtatctccaggacgcaagtcacaaaatctgcgcataataatatcaaaatgacgtcgaattgatagtcgttctcattactatttgcatactgccgtacctttgctttcttttccttgcgtttacgcagtaaaaaagtcaccagcacgccatttgcgaaaattttctgctttatgccaattcttcaggatgcgcccgcgaatattcatgctagtttagacatccagacgtataaaaacaggaatcccgacatggcggacaaaaagcttgatactcaactggtgaatgcaggacgcagcaaaaaatacactctcggcgcggtaaatagcgtgattcagcgcgcttcttcgctggtctttgacagtgtggaagccaaaaagcacgcgacgcgcaatcgcgccaatggcgagttgttctatggacggcgcggaacgttaacccatttctccttacaacaagcgatgtgtgaactggaaggtggcgcaggctgcgcgctatttccctgcggggcggcagcggttgctaattccattcttgcttttgtcgaacagggcgatcatgtgttgatgaccaacaccgcctatgaaccgagtcaggatttctgtagcaaaatcctcagcaaactgggcgtaacgacatcgtggtttgatccgctgattggtgccgatatcgttaagcatctgcagccaaacactaaaatcgtgtttctggaatcgccaggctccatcaccatggaagtccacgacgttccggcgattgttgccgccgtgcgcagtgtggtcccggatgccatcattatgatcgacaacacctgggcagccggtgtgctgtttaaggcgctggattttggcatcgatgtttccattcaggccgctaccaaatatctggttgggcattcagatgcgatgattggcactgccgtgtgcaatgcccgttgctgggagcagctgcgggagaatgcctatctgatgggccagatggtcgatgccgataccgcctatataaccagccgtggcctgcgcacattaggtgtgcgtttgcgtcaacatcatgaaagcagtctgaaagtggctgaatggctggcagaacatccgcaagttgcgcgagttaaccaccctgctctgcctggcagtaaaggccacgaattctggaaacgagactttacaggcagcagcgggctattttcctttgtgcttaagaaaaaactcagtaatgaagagctggcgaactatctggatagcttcagtttattcagcatggcctactcgtggggcgggtatgaatcgttgatcctggcaaatcaaccagaacatatcgccgccattcgcccacaaggcgagatcgattttagcgggaccttgattcgcctgcatattggtctggaagatgtcgacgatctgattgccgatctggacgccggttttgcgcggattgtataacattgccacttttggacaattttgcagacattttattgtgaaaagtcttaaattgttgcgtccgggatcaaggcgtcccggacgattcaggagtacaataggcaaataaaggcttaaacgctgttccacaggaaagtccatggctgttattcaagatatcatcgctgcgctctggcaacacgactttgccgcgctggcggatcctcatattgttagcgttgtttactttgtcatgtttgccacgctgtttttagaaaacggcctgctgcccgcctcatttttgccaggcgacagcttgttgatactggcaggcgcattgattgcccagggggttatggattttctgcctacgattgcgattctgaccgccgcagcaagtctgggctgctggctaagttatattcaggggcgctggttagggaataccaaaacggtgaaaggctggctggcacagcttcctgctaaatatcaccagcgcgccacctgcatgtttgaccgccacggtctgctggcgctgctggctggacgttttcttgcatttgtccgtacgctgctgccaaccatggcgggaatttccggtctgccaaaccgccgtttccagtttttcaactggttaagcggattgctgtgggtcagcgtggtaaccagtttcggctatgccttaagtatgattccgttcgttaaacgccatgaagatcaggtaatgacgttcctgatgatcctgccaattgccttgttaaccgctggcttgttaggcacgctgtttgtggtgattaaaaaaaaatactgtaacgcctgacgattttccctgttcccggttgctgtaccgggaacgtatttaattcccctgcatcgcccgcattcttgccgcatcttcccccggcgtcacaccgaagtaacgtttaaactcacggctaaattgcgatgcgctttcatagccgacgcgcatcgctgctgcgctggccttcatgccgtcatggatgatcatcatccgcgccttatgcagacggtaattcttcaaatactgcaacggcgaggtactggtgacagacttaaaattatggtggaacgccgatacgctcatgttggcttctgccgccagttgctcgacgctcaggttttcggtgtatttattctcaatccgtttcagcacgcggctaatcagactgaagtgagtctggcgactgaccagcgccagtaacgcgccgccgcaaggtccggtcagcacgtagtacagaatttcgcggatgatctgtttgccgagaatacgcgcatccagtggtcgctccatcacgtcgagtaaccgctccgccgcgcataaaatctcttctgataacgtggcggagttaatcccgctggctgccaccgacggctggaaatgctcatcttcgccaatgtccatcaacagttcctgtaactgcaaaatatcgacattgagacgcaaccctgccagcggcacctctgacgtggcataggtttcgcactcaaacggcaacggcaccgtcagcagcaggtattcattggcatcataacgaaacacgcgttcattgatataaccgattttatgcccggaaaagagaattatgatgccaggctcgtacatcaccggtgtacgtgcgaaaggcgtctcgccatacaacaaacgcacatcgggcaacagttctgacaaactattttctttatttttcagtttattaactttatccgccagcaagcggcaaatctcttcacgtttcatatcgcgtaatttcttaggaataatgcggcaatttgattgtgcgcaattttgtagcatttctccagcactctggagaaataggcaagacattggcagaaatgagcattgagagccagggcgctggcgatcacaatgaaaaacatcaggcagatcgttctctgccctcatattggcccagcaaagggagcaagtaatgaacaactttaatctgcacaccccaacccgcattctgtttggtaaaggcgcaatcgctggtttacgcgaacaaattcctcacgatgctcgcgtattgattacctacggtggcggcagcgtgaaaaaaaccggcgttctcgatcaagttctggatgccctgaaaggcatggacgtgctggaatttggcggtattgagccaaacccggcttatgaaacgctgatgaacgccgtgaaactggttcgcgaacagaaagtgactttcctgctggcggttggcggcggttctgtactggacggcaccaaatttatcgccgcagcggctaactatccggaaaatatcgatccgtggcacattctgcaaacgggcggtaaagagattaaaagcgccatcccgatgggctgtgtgctgacgctgccagcaaccggttcagaatccaacgcaggcgcggtgatctcccgtaaaaccacaggcgacaagcaggcgttccattctgcccatgttcagccggtatttgccgtgctcgatccggtttatacctacaccctgccgccgcgtcaggtggctaacggcgtagtggacgcctttgtacacaccgtggaacagtatgttaccaaaccggttgatgccaaaattcaggaccgtttcgcagaaggcattttgctgacgctaatcgaagatggtccgaaagccctgaaagagccagaaaactacgatgtgcgcgccaacgtcatgtgggcggcgactcaggcgctgaacggtttgattggcgctggcgtaccgcaggactgggcaacgcatatgctgggccacgaactgactgcgatgcacggtctggatcacgcgcaaacactggctatcgtcctgcctgcactgtggaatgaaaaacgcgagaccaagcgcgctaagctgctgcaatatgctgaacgcgtctggaacatcactgaaggttccgacgatgagcgtattgacgccgcgattgccgcaacccgcaatttctttgagcaattaggcgtgccgacccacctctccgactacggtctggacggcagctccatcccggctttgctgaaaaactggaagagcacggcatgacccaactgggcgaaaatcatgacattacgctggatgtcagccgccgtatatacgaagccgcccgctaagctttttacgcctcaaactttcgttttcgggcatttcgtccagacttaagttcacaacacctcaccggagcctgctccggtgagttcatataaaggaggaacgtatggctaatccaaccgttattaagctacaggatggcaatgtcatgccccagctgggactgggcgtctggcaagcaagtaatgaggaagtaatcaccgccattcaaaaagcgttagaagtgggttatcgctcgattgataccgccgcggcctacaagaacgaagaaggtgtcggcaaagcctgaaaaatgcctcagtcaacagagaagaactgttcatcaccactaagctgtggaacgacgaccacaagcgcccccgcgaagccctgctcgacagcctgaaaaaactccagcttgattatatcgacctctacttaatgcactggcccgttcccgctatcgaccattatgtcgaagcatggaaaggcatgatcgaattgcaaaaagagggattaatcaaaagcatcggcgtgtgcaacttccagatccatcacctgcaacgcctgattgatgaaactggcgtgacgcctgtgataaaccagatcgaacttcatccgctgatgcaacaacgccagctacacgcctggaacgcgacacacaaaatccagaccgaatcctggagcccattagcgcaaggagggaaaggcgttttcgatcagaaagtcattcgcgatctggcagataaatacggcaaaaccccggcgcagattgttatccgctggcatctggatagcggcctggtggtgatcccgaaatcggtcacaccttcacgtattgccgaaaactttgatgtctgggatttccgtctcgacaaagacgaactcggcgaaattgcaaaactcgatcagggcaagcgtctcggtcccgatcctgaccagttcggcggctaacatgcaaattctcccggtggcggtaatgttccgctaccggacttttcagaaatcatttattcccctcgcgtcccgcccgttgttactcttccttgttcaggaatgccaaatataaggacatcatcatgcagagccggaagctcttaaaagaacaactcatctatatccgggataaacgcaacggagaggtgaaaaacagatgaaaataatacttctgtttttagcagccctggcaagttttaccgtacacgcacagcccccctcactgaccgtagaacaaacagtccggcatatttatcagaactataaatcagatgccactgccccttattttggtgaaaccggagagcgggcgataacttctgcgcgtattcaacaggcgcttaccctgaacgacaatcttacgctgccgggcaatattggctggctggattatgatccggtttgtgattgtcaggattttggcgatctggtgctagaaagcgttgcgataacccaaactgacgccgatcatgccgatgccgttgtgcgctttcgtatctttaaagatgataaagaaaagaccacgcagacactgaaaatggtggcggaaaatggtcgttgggtcattgacgatattgtcagcaatcatggcagcgtcttacaagcagttaatagcgagaatgaaaaaacgctggccgctttagcttcgttgcaaaaagaacagccggaagcctttgttgccgaactctttgaacatattgctgattatagctggccgtggacgtgggtggtttccgactcttaccgccaggcggttaatgccttctataaaaccaccttcaagacggccaataatcccgatgaagatatgcaaatagaacggcaatttatttacgacaatccgatctgttttggcgaagagtcgctattttcacgcgttgatgaaattcgagtcctggagaaaaccgccgattccgcccgcattcatgttcgttttacgctgaccaatggcaacaacgaagagcaagaactggttttacagcggcgcgaaggcaagtgggaaatcgctgattttatccgcccgaacagcggcagcctacttaagcagattgaggcaaaaaccgccgccagattaaagcaatgagctgaattaaataacaattagccggaacaataaataaaagggaacactatatgaaaacgattttcaccgtgggagctgttgttctggcaacctgcttgctcagtggctgcgtcaatgagcaaaaggtcaatcagctggcgagcaatgtgcaaacattaaatgccaaaatcgcccggcttgagcaggatatgaaagcactacgcccacaaatctatgctgccaaatccgaagctaacagagccaatacgcgtcttgatgctcaggactattttgattgcctgcgctgcttgcgtatgtacgcagaatgataaaaaaatccccggcagcatgtcagttgccggggattttttttaacgtccaaccgccgctttagggcgtttcttcgcaccagcattcaccggacgagattgcgtagacgacgctttttttgccgtagcaggcgtctgacgctgggtcgccatcggcgtatgtttcgtcaacgccggacgggtattgcggttctggcgacgagcttcacgcatctcttcaatggttggcgcaggcactaagcaatcgcgacggctgccaatcagatgctttttgcccatcgcttccagcgcctggcggattaacggccagtttgccggatcgtggtaacgcaacaacgctttatgcaaacgacgctgtttgtcgcccttcggtacgaagacgtcttcgctcttataaccaatcttcgccagcgggtttttcccggtgtaatacatggtggttgagttcgccagcggcgatgggtagaagttctgtacctggtcgagacggaaacgatgctttttcagccacagcgccagattcaccatatcttcatcacgcgtaccggggtgcgcggagatgaaataggggatcagatactgctctttacctgcctgttttgagtaagtatcgaacagctctttaaagcggtcatagctgcccatgcccggcttcatcatcttcgataacggcccttcttcggtatgttccggggcaatcttcagataaccgccgacgtgatgggtcgccaactctttgatatagcgcggatcttccacggcgatgtcataacgtacgcctgaggcgatgaggatttttttaatgcctttcagatcacgcgcacggcgatagaggttgatcgtcggttcgtggttagtgtccatgtgcggacaaatatccggataaacgcacgacaaacggcgacaagtttgttcagcgcgtggcgatttgcagcgcaacatatacatgttggcagttggcccaccgagatcggaaatcacgcccgtaaaacctggaacggtgtcgcggatcgcttcgatctcattaatgatcgaatcttccgaacggctctgaataatgcgcccttcgtgctcggtaatagaacagaaagaacagccgccaaagcagccgcgcataatgttgaccgaaaaacggatcatttcgtaagccggaatacgggcattgccataggccggatgtggcacgcgcttgtacggcagcgcaaaaacgctgtccatctcttcggtagaaagcgggatagcaggcgggttgatccacacatagcggtcaccgtgtttttgcatcaatgcgcgggcgcagcctgggttggtttcgtggtgcagaatgcgcgaagcatgggcgtacagcactttatcgcccttcactttctcgaaagaaggcagcaacacgtaggttttttcccacggtttcgggcgcggtggctgcacggttacggctttggcttcctgctttttcggtgccaccggtttgttatccgcgcacggcaaatcttcaccatacggatgcgggattgggtcgatttttccaggggtatcaagacgggtggaatccacgccgctccagccaggcagcgcctctttcacgataatcgcggtattacgcacatcgcggatttcactaatcggctcgcccatcgccagacggtgcgccacctccaccagcggacgctcaccgttaccaaacatcagcatgtcggctttcgaatccaccagcacggaacggcgcacggtatcggaccagtaatcataatgtgcggtacggcgcagactagcctcaataccgccgaggatcaccggtacatctttccacgcctctttacaacgctgggtataaaccagtgtggcgcgatccgggcgcttacccgcgacgttatccggcgtgtaggcatcgtcatgacgtaaacggcgatcggcggtataacggttgatcatcgaatccatgttgccagcagtaacaccgaaaaacagattcggtttacccagacgcatgaaatcgtctttgctgctccagtctggctgggcgatgatcccgacgcgaaagccctgtgcttccagcatacgaccgcaaatcgccatcccgaagcttgggtgatcgacatacgcgtcgccagtaaccaaaatgatgtcgcagctatcccagccaagttgatccatctcttcacgagacatcggcaaaaacggtgccggtccaaaacaggcggcccagtactgcggccaggagaacaggtcgcgatccggttggatcagggagatagagctcattttgcttccagaaatgataaaaaataatcaaaggccggggattataagccggaacgaaagagaaatcgaaaggtattccatactcgccctcctcgggcgagtatgaagattacggtaccggattgaccaaaagttgccctatcgagccacggtccgccatttccagcgtctgactgttgaagtagaacgggaagtgcgcccaggaaggctgaccgaaataaacaagcagctccacttgtccgtcaacccaaacggtatctttccagcctctgtcttccgggaacggcatcgcgccattcacgttacggatctggaacattacgccttcaatatggaacgcttgcggctcgtccgcgcgtaccgtccagcgttcccacgttccttgctgcgcggtgacatcaatacggttgacgtcccacagctgtccattaatacccgggtcatcacccagactgatatcgcgactgcgaattggcgaaccagccatgatttcagttggcagcaagcgcatcggaagactgtctgtgaccagcggcagaaggccggttgggcgcagcgttagcaccagggtagaaaccagaatactggatggctcaaagaagccgcgaatacgatcaacaatgctcgccgcttcgccacaggtgatcgacacttcatcgccgttgctcatatccaccagaatctcgcggcgctcgcccggtgccagcgaaagttgcttcaccgatacaggagcaggcaggaatccctgatcgccagaaatcacatgtaacgggcgaccatcgctcatctgtagttgatagcgacgagagttcgacgcgttcagcagtcgcaagcgcacccagccacgcgagacttcaacgtacgggctttgtacaccgttaaccagcagcgtatcaccaacaaagccgccgcttcccggttcgttgtattctggcgtaccaaagttatccagccgtttatcctggataatgaccggaaaatcatccacaccataatggttggggataggcagcgacttgctgacttcatcttccaccagccacattccggcaaggccgttatagacctgctgagccgtgcggttgggagtattggcgtgataccacagagtagctgcgttctggcgaatgggcagtacgggtgcccagtcagcgtttggcgacatcatccgtgccggaccgcccatcagcgggcctggtacctgtagcccggccaccgtcattgagacattttctgtcaggcggttgctgtaaataagcttaacatcgtcgcccttccagacgcggatagtcggccccaggtaacgaccattgattccccagaccgacgcgcgtgtccctggcgtaaatgaccagtgcgcacgttgtacagtcataaacagcggttgcccacggcgagattcaagtagcggcggaacgggtagcggttgctgttgcccggctgcgctggccttcaggggaacagcgcctgcacaaagtgcaatccccgatgcctgaatgaactgacgccgactgagtgacatatttgctccatgtaaaactggctaaagtaataccgtgcaggaaagtgttccccgcaaaaatacagattgccgacttaaacttttccggcggcttcgcgttctgcgacttctttatcgagctcggcgattttttgttccattatcgaacgacaatgggcagccagctcacgaacctgatctttgccatactgactgacgtcaattggcggcagcatttcgacaatcaccagaccgttgtgcagtcgattaagattaatcttattcgaagttgtagagacgcacacgggaataatcgggacgcccgccgcaattgccgcgtgaaatgctccagtcttgaacggtagcaggccgcgaccacggctgcgggttccttccgggaacatccagatggaaatacggcgttttttgaaatgattcacgacttccgcaatggtgccgtgagctttagtgcgattgtttctgtcgatcaataagttgccggttaaccagtacaactgcccgaagaaggggatccacagcaagctctttttacctaccgtcaccgtcggcggttgcacaatgttcgatgctgtcaccatgtcatagttgttctggtggttagcgatatagatagcattgccgtagctttcagcatctgcaggtttgcggcactcaactttcaggccgaacagcggcgcaagacggccaaacatatgcccaaaggtggccacatgtttcgggttacgcgggctgaaaaggcagtaaatggagccgaatacacagactaagatgctgtaaatcaaggtaataataagacgaaagatatatagcataacaccctctgaaggtctgagagactggcattgtacgtcacctgaaatcaggttagggcattgttaaaagccgctctctggaaaagcgtattgttaatcgcaacgcatgaataaacaacggtttcaagggaatttttatcgtttccgggggttgaatacgctgccggatgacgacttaacgtttcatccggcgttccttgcaagcgggaggaaacaggccctccccggcatattactcttcgctatcaccgctgctggcacggcgaggagagtcgatctcaacacgatcgatacgctgcaaaccgcgcatcaacgtaccgcggcgtccacgttcgccagtgactttctgtaactcttccgggcgcagtttaattttgcgtttcccaacatgaatggtcagcgtgctttgcggcggcagaacgtacaattgcgccagaccatcttctccacgcgcggcttctgccgatggaatgttgataatcttgttgcctttgcccttcgacagctgcggcagatcgcttaccgggaacatcaacatacggcctgcctgagtgattgccagcagcatatcggaagcatcttcaatcaccaccggcggcataacatgggcattttccggtaaggtgatcaaagccttacctgcacggttacgcgccaccagatcgttaaaggtgcagacgaaaccgtaacccgcatcggaagccatcagcagtttctgatcgtcgctttccatcagcatatggtcaacggtcgccccaggcggcaacgttaatttgccggtgagtggttcgccctgaccacgcgccgacggcagcgtaatcgggtcgatggcatagctacgaccggtggaatcaacaaacactaccggttggttgctcttacctttcaccgccgctttgaagctatcacccgctttataattcaggcccggcgcgtcgatatcatggcctttagcgctgcgtacccagcccatctgcgacagcacaatggtgacaggttcagacggcagcatgtcgtgctcgctcatcgctttcgcttcttcgcgttcctgcaacggcgaacgacgatcgtcaccgtaggcttgcgcgtctgcctgcagttctttcttcagcaggttattcattttacgctcggaagccaaaatgccctgcaactggtcgcgctctttttccagctcactctgctcaccgcgaatcttcatctcttccagtttggcaagatgacgcagtttcagttcgaggatcgcttccgcctgggtttccgtaaggccaaaccgcgacatcagcgccggtttcggttcatcttcgttacgaatgatctcaatcacttcgtcgatgttgagaaacgccaccagcaaaccttccaggatatgcaggcgcttgaggactttctccagacgatagttcagtcggcggcgcacggtatcgcgacggaacaccagccattcggagaggatttccagcaggtttttcaccgccggacgaccatccagaccgatcatattgaggttaatgcgatagctcttttccagatcggtggtagcgaagaggtggttcatcacctgatccatatccacgcggttggaacgcggcacaatcaccagacgggtcgggttctcgtggtcagattcatcgcgcagatcgtcaaccatcggcagctttttgttgcgcatttgcgcagcaatttgctccagtacgcgcgcacctgaaacctgatgcggtaatgcgctgataaccaccgcgccatcttctttcttccacaccgcgcgcatacgcactgaaccacgtccgttctcgtagattttacggatctcggcgcgcgaagtgataatttccgcttcagtcggataatccggcccctgcacgatatccagcagctgatcgagcgtggttttcggctggtcgattaatgcgattgccgcctgagctacttcacgcaggttatgcggtggaatatcggtcgccatgccgacggcaataccggtggtgccgttaagcaaaatgtttggcagacgagcaggcagcattttcggctcctgcaaagtgccgtcgaagtttggcacccagtcagccgtcccctgccccagctcgctcaatagcagctcggaatatttcgacaaccgggattcggtgtaacgcattgccgcgaacgatttcggatcgtccggcgcgccccagttcccctgaccatcaaccagcggataacggtaagagaacggctgcgccatcaggaccatcgcttcataacaggcgctatcgccgtgcggatggtatttacccagtacgtcaccgacggtacgggccgattttttaaatttggcgctggcattcaggcccagttcagacatcgcatacacaatgcggcgctgaacaggtttcagaccatcaccaataaacggcaacgcacggtccatgatcacgtacatggagtagtttaagtaggcgttttccgtaaattcatgtagcgcaaggcgctctgccatatcgctcattaattctgattcctcaacttattcgccagccttcaaaggggctatattgccggagatactacattatctgccgcgtcgagtcacaggagatcagcgtgaatagcgccgccggacgtgctccgacggcgataaaggcatcaatgtgccttgatatacaactctttgctgtagacttgatcggcatagagggcagcacaaggttgcgcccatgccacaccactcggcatgggggtccgctccgggcgattcgagaagttgaggttatgcgagtccagggaagcctaaagcatcaaagtagtcgactgtaagtatacggttcagcccagtttagctgtgtctccaccagtgccccgcgcctcctgccataagtgcggcttgctcatgggtacccccgagacggcttacggcgcaccggataataaatttcgcgtatacatggtattccttaccggagaaattataagcccaacaacaatacgcctgtggcattgttcgctcaaacttatcgcgagtgatttggctcacactccggtaaagattccccatcacgccaacggcacataaacatccgtttccagtcgctgctctgtcaccccttcggcaagattggtgtagtgaaacagaatcggtgctttacgcattttctcgccgcttgcaggcagccagtggcgaataatgccccatatcgtgtgtgaaatatcgtccagctcgccaacgtggcgggccacggcataacgtccaccggtaagttcaccattgctcacaccataacgattatcgggaatcggttcgctaacgctgccgcagatatcaaagcgaaacgcttccggtgcggtggtggcagggtcgtcccaggcgacgccaaaagtctggctttggttaacaggagaaagccccgtctctttacgccacatgataaatttcgccacactgtagttgagcaactcagggctacagcggtgcggcaacatcgccacagggattgatgggaaatcgataatgtttacatccagtgtcaggtttgtcattttgcctccctgcgaaattattcccgggaacgcgtcccgggagcggtaacaattacggatttactttgcggatctgtttgacgtcaatttcaacagaattccagtctttatcgacttcaccctgaatctcaaccgtatctttcggcgtcaccgtcacaccgttccagcgtttgtggtcgatatcaacattgatagtaccgctggcatctttaaacacgtagagatcgtcagagatgcgttcaacgatattgccgcgcagggttacccaggtgtcgtcacgcagggattttgcgctttctacggtcgttacgctgccgttcggcccctggaatcctccggcctgactttgcgttgccgatgggccagaaaaaccgccctgctctgctgccatcaccggtgcgctgcacagggccattactgcgattactgctgcgaattttttcatgtttattactccctttaatgtctgtttccgagcatttaacaagatagtccttaacaacttcttaagggaaaaaaataaaatttagtgctgtacagagcgcgttacaacacggtttactggcagcaaatacggttatcgcagggatgaaaaaatgcgaattttactgatagaagatgacatgctgattggcgacggcatcaaaacgggccttagtaaaatgggttttagcgtcgactggtttacacaaggtcgtcagggaaaagaggcgctttatagcgcgccttatgatgcggtgatcctggatttaaccttaccaggcatggatggtcgcgatattttgcgcgaatggcgagaaaaggtcagcgtgagccggtactgatcctgaccgcgcgcgatgcgctggaggaacgtgtagaagggctgcgtctgggagctgacgattatctgtgtaaaccttttgcgttgatagaagtcgccgccaggctggaagctctgatgcgccgaaccaacggccaggccagcaacgagctgcgccacggtaacgtcatgctcgaccccggcaaacgtatcgccacgctggctggcgaacccttaacactgaaaccaaaagaatttgccctgctggaattactgatgcgtaacgctggtcgggtactgccgcgcaaactgattgaagagaaactgtatacctgggacgaagaggtcaccagtaatgccgttgaagtgcatgtgcatcatctgcgacgcaaactcggtagtgattttattcgtaccgtgcatggtattggctacacattaggtgagaaatgaaatttacccaacgtcttagtctgcgcgtcaggctgacgctaatctttttaattctggcctcggtgacctggctgctttccagctttgtcgcctggaaacaaacaacggataacgtcgatgaattgttcgacacccaactgatgctgtttgccaagcggttaagtacgctcgatctcaacgaaatcaacgcggcggatcgcatggcacagacgccaaataaattaaaacacggtcatgttgatgacgatgcgctgacctttgccatctttacccacgacggcagaatggtccttaacgatggcgataacggagaagatattccttatagctatcaacgggaaggttttgctgacgggcaactggtgggcgataaagatcaatggcgttttgtctggatgacctcacctgatggcaaatatcgcatcgttgttggtcaggaatgggaataccgtgaagacatggcgctggcgattgttgccgggcaattgatcccgtggctggtcgcactgccgattatgttaatcatcatgatggtactattgggtcgtgaactcgcgccgctgaacaaactggcgctggcgctgcgtatgcgtgaccctgactcggaaaaaccactaaacgcgactggcgtacccagcgaagtgcgtccgttggttgagtcgctaaatcaactgttcgcccgcacacatgcgatgatggttcgtgaacgacgctttacctccgacgcagctcacgaactacgtagcccgttaacggcgctgaaagtgcaaaccgaagttgcgcagctttctgacgatgatccgcaagcgcggaaaaaagcgctgcttcaattacattacgggatcgatcgcgctactcgtctggttgatcaactgctcactctatcgcggctggactcactggataaccttcaggacgtcgcggagatcccgcttgaagatctcctccaatcgtcggtgatggatatttaccacacggcgcagcaggcgaaaattgacgtgcgactgacactcaatgcccacggcatcaaacgcaccggacaaccgctattgctaagtttgttggtgcgaaatttgctggataacgccgtgcgctacagtccacagggcagcgtgatagacgtcacgctgaatgctgataatttcatcgtgagggataacggccccggtgtgacgccagaggctctggcgcgaattggcgaacgcttctatcgcccccccggacaaaccgctaccggcagtggacttgggctatcgattgtccagcgaatcgccaaattgcatggcatgaatgttgagtttgggaatgcggaacaaggtggatttgaggcgaaggtaagctggtaacttctctgtctatgagagccgttaaaacgactctcatagattttactaatagcaaaatataaaccgtccccaaaaaagccaccaaccacaaaccagacaaataccgagcgaaaatacatatacccaaaactcgaacatttcccgcataaagagttttcttaagataagaataataagtggcgtaagaagaaaaaatgctgcaatcattgcttgcaatatacgatcttcgcctgaaacggaaggtatactgcaaatattgtctcccgactcaagcatccagtcatacttattgaaagcaaaaaaagcatctattaaccaataagtaagcattatgtataacagagcttcaaatattgtttgaattttatgctttaacatatatcagtacgctcataaaaatccatttataattatcaacatgacacgttgatattttcatcttttacttattcaaagccatattttcaatcccaaaaaaaaccgaaccaaacgtgtaaattattccggtgcgagtaagaattatgaggaatggctatcagtattgtcattttcagaaaatatttatcctgcatcggtgagtcagagcaagatcagacttttgctaaattcgcaaaagactttgcacattttgctaatttcaccgtaccgctctgtgacgtactatagtcggcaaacgtctcaccttgaggttaaaaaatgagcaacatcctgattatcaacggcgcgaaaaaattcgcccactccaatggtcaactgaacgacaccctgaccgaagtcgcggatggcacactgcgcgacctcgggcatgatgtccgcatcgttcgcgccgacagcgactacgatgtcaaagcggaagtacaaaactttctctgggctgatgtggtgatctggcagatgccaggctggtggatgggcgcgccgtggacagtgaaaaaatatattgatgatgtattcaccgaaggtcatggaacgctgtatgccagcgatggccgtacccgcaaagatccgtcaaaaaaatacggttccggcggcctggtacagggcaaaaaatatatgctttctctgacctggaacgcaccaatggaagccttcaccgaaaaagatcaattcttccacggcgttggcgtcgacggtgtgtatctgccgttccataaagcaaaccaattccttggcatggaaccgctgccgacatttatcgctaatgacgtgataaaaatgcctgatgttccccgctatactgaagaatatcgcaagcatcttgtggaaatttttggttaactagagctcaggctttagaaggagttaaccatgcttaccgtaatcgcagaaatccgtactcgtcctggtcaacatcaccgtcaggcggtattggatcagtttgctaaaatcgttccaaccgtactgaaagaagaaggttgccacggctatgcgccaatggtggattgcgctgctggcgtgagtttccagtctatggcaccggattctatcgtgatgattgagcagtgggaaagcatcgcgcatcttgaagcgcatctgcaaaccccgcacatgaaggcgtacagcgaagccgtaaaaggcgacgtgctggagatgaatatccgcatcctgcaacctgggatttaaacctgccttgtttgcccggccatcctgaccgggcaatgttctttcctttaaacctcaatctccgccatgtcgcctttctcttgcaaccagttgcggcgatcttccgagcgtttcttcgccagcagcatatccatcatcgcgtcagtacgctgatcgtcttcatcatcgatagtcaactgcaccagacggcgagtgttcggatcaagcgtggtttcacgcaattgcatcgggttcatttcccccagacctttaaaacgctggacgttcggcttgcctttcttgcgttttaattgctcaagtacgccctctttctcttcttccgtcagcgcgtaataaacctctttcccgagatcaatacggtagagcggtggcagtgcgacgtaaacgtgaccgtgtttcaccaacgcgcggaagtgttttacgaacaaagcgcagagcagcgtggcaatgtgcagaccatcagagtccgcatccgcgaggatacagattttgccataacgaagctggctcagatcgtcgctgtcaggatcgataccgatcgctaccgaaatatcatgcacttcctgcgaggccagcacttcgtcggaagaaacttcccaggtgttaaggatcttacctttcagtggcatgatcgcctgatattcgcgatcgcgcgcctgcttggcagatccgcctgcggagtcaccttccacaaggaacagttcggtacggttaagatcctgcgcggtacagtcagccagtttgccaggcagtgctgggccgctggtcagctttttgcgcaccacttttttagccgcacgcatacggcgctgggcgctggaaatcgccatctccgccagcagctccgccgcctgaacgttctggttcagccacaggataaaggcatctttcaccacgcctgaaacgaatgccgcgcattgacgcgaagagagacgctctttggtctgcccggcaaactgcggatcctgcattttcaccgacagaacataggcgcagcgatcccagatatcttccgccgacagcttcacgccgcgcggcagaatgttgcggtattcacagaactcacgcatcgcgtccaacaggccctgacgcagaccattaacatgggtaccgccctgcatcgttgggataaggttgacgtagctttcggtcagcagttcaccgccttccggcagccacagtagcgcccagtccacagcttcagtatcgccagcgaaattaccgataaacggtttttctggcagcgtcggtaaaccgtttaccgcttccgccaggtaatcattcagaccgtcctgatagcaccagcgctgttcggtgttgttgatctcatctttaaaggtaatctcaacgccggggcacagtactgctttggccttcagcacatgcgtcaggcgtgaaacagaaaaacgcgggctgtcaaagaaggtttcatccggccagaagtgcacgctggtaccggtattgcgtttaccgcaagtgccgacaacctgtaaatcctgcaccttttcgccattttcaaaggcgatgttataaacctgaccatcgcggcgcacgttaacttctacgcgcttcgacagggcgttaaccaccgaaatccccacgccatgcaggccgccagagaactggtaatttttgttagagaatttaccgcctgcatgcagacggcaaagaatcagttcaaccgccggtacaccctcttccgggtgaatatccaccggcatcccgcgcccatcgtcaataacttctaacgactggtcagcatgtaagattacatccacgcgttttgcgtgacccgccagtgcttcatcgacactgttatcaataacttcttgccccaaatggttagggcgagtggtatcggtatacatccccggacggcggcgaaccggctcaagcccggtgagtacctcaatggcatcagcgttataagtttgcgtcatggtttaagttagcaattcgagttgatcgtcagagatggtgcagaccaagaaaatcgacgatcgggttgaaataatcttcgaagcccgtgaatgcgtggttgccgccttctatgacagtctggcggcaggaagcgtagtacgccaccgcctggcggtaatccagcacttcatctcccgtctgttgcagcagccagatcaaatccggcgcttccagcgggtcaatctgcatgactttgagatcgtaaatatggcgtgactctagcacatattgctgcccggtgtaggggttctcgttctgaccgagatagtccgtcagcagttcaaacgggcgcaccgccgggtttaccaccactgcgggcagcataaaacattgtgacaaccaggtggcgtaatatccccccagtgacgaaccgacaatacccagcgaatcgccgccatgttccaggacaatggattccagcagctctgccgcgtcggaaggatacggcggcaactgcggaatgatcatctcaacgtcagggtgatgttccgccagccagttttttaacaagctcgcttttgcagagcgcggcgagctgttgaaaccgtgtaaataaagaagcgtagacatcagtagccttctgaagcggtatcaggttggaaacgtgtgtccgccaggcgatgcacctcggtggtcagcgtgccatcagcatgtaactcgagagtacgccagccgggcgcgatagtatccagcgtaaagttggaacagtgcggcttaaactgcacacaggtcgacggcgttgccagcaggcggcgaccgttccagtcgagatccagctcctgatgaatatgaccgcacagcaagtatttgacgtgcggaaacttcgccagcacggtatccagttcgcccgcgttacgcagactgtgttgatcgagccaactacaacccgcaggtagcggatgatgatgcagcagcagcaacgtatggcgttctggcgcatcggccagtttacgttccagccactcaagctgaaactcgctcagctcaccgtgcggcacgccaaacacctggctatccagcaacaggatttgccattgctcaccaataaacacgcgcttcgccggggagatacccgcatcctgtaacgcgctgtacatcgcgggctggaaatcgtggttgcccggcagccagacgcagggcgcacgaaaacttgcgatgccttcagcgaaatgctgataggccgcagaggattgatcctgcgctaaatcacctgtcgcgacaatcaggtcgaattcgtgctgatgtggacgaatcgcctccagcaccgcctggtagctttcccaggtgtttacccctaacagggcttcgtgcttttgtgcaaacaggtgagtatcggtaatttgtaaaatcctgactctggcctcaccagccagaggaagggttaacaggctttccaaatggtgtccttaggtttcacgacgctagtaaaccggaatcgccatcgctccatgtgctaaacagtatcgcaaccagtccgctaaaaactggttaatttgatgcttttcgtcgcgttgatgcaactttttattaggataatcataccgcgctttgaagcgaaaaatctgctggcttgaacacacttcagccaccatcgcgtcatgatacagacgcaccgtcattgacggaaggctccagtaactgatcgcgggcgcagtctgttctattgtcaccagggtagtgtatcgggtcgattccacaatcgtcagccgatattgtgcgtttgccacctgatagcttacagtttcgccgggtgcgtcattgcgcggtaacaaacggcgcaattgtgaaaagttcatctcgcacaggcgcatcatttcaggaaagtcaggtgtgtaacgcttcatttatgcccactcattttttaacgcttgatgatgcagctgcagccattgcaaagcgatgaccgacgctgcgttgtcgattttcccctcttctacccactggtatgcctgttcccggcttaccacatgaacgcgaatatcttcgttttcatcagccagaccatgaataccgcttgcggtcgtggcgtccacttcgcccaccataattgacgaacgctcactggtgccccccgggcttgccaggaaacttaacaccggtttggtccgtttgactatcagtcccgcctcttcaatcgcttcgcgacgggcaacatcttccacactttcaccctcttcaatcatcccggcaaccatctccagtagccagggggtttcgctggtgtcgtacgcggcaatccgaatctgctcaatcagcacaacttcatcacgcactgggtcaaagggtagcaagactgcggcgtgaccgcgctcaaaaatttcccgccgtacctcatgactcatttgcccgttgaatagacgatgacgaaatctataaagatctaatgaaaaaaagccgcgataaagtgtttctcgtgcaataatttctacatcgtttttgccaaatgtaacgggcaggttgtctggcttaagcattgttaatgtcctggcactaatagtgaattaaatgtgaatttcagcgacgtttgactgccgtttgagcagtcatgtgttaaattgaggcacattaacgccctatggcacgtaacgccaaccttttgcggtagcggcttctgctagaatccgcaataattttacagtttgatcgcgctaaatactgcttcaccacaaggaatgcaaatgaagaaattgctccccattcttatcggcctgagcctttctgggttcagttcgttgagccaggccgagaacctgatgcaagtttatcagcaagcacgccttagtaacccggaattgcgtaagtctgccgccgatcgtgatgctgcctttgaaaaaattaatgaagcgcgcagtccattactgccacagctaggtttaggtgcagattacacctatagcaacggctaccgcgacgcgaacggcatcaactctaacgcgaccagtgcgtccctgcagttaactcaatccatttttgatatgtcgaaatggcgtgcgttaacgctacaggaaaaagcagcagggattcaggacgtcacatatcagaccgatcagcaaaccttgatcctcaacaccgcgaccgcttatttcaacgtgttgaatgctattgacgttctttcctatacacaggcacaaaaagaagcgatctaccgtcaattagatcaaaccacccaacgttttaacgtgggcctggtagcgataaccgacgtgcagaacgcccgcgcgcagtacgataccgtgctggcgaacgaagtgaccgcacgtaataaccttgataacgcggtagagcagctgcgccagatcaccggtaactactatccagaactggcagcgctgaatgtcgaaaactttaaaaccgacaaaccacagccggttaacgcgctgctgaaagaagccgaaaaacgcaacctgtcgctgttacaggcacgcttgagccaggacctggcgcgcgagcaaattcgccaggcgcaggatggtcacttaccgacgctggatttaacggcttctaccgggatttctgacacctcttatagcggttcgaaaactcgtggtgccgctggtacccagtatgacgacagcaatatgggccagaacaaagtgggcctgagcttctcgctgccgatttatcagggcggaatggttaactcgcaggtgaaacaggcccagtacaactttgttggtgccagcgagcaactggaaagcgcgcatcgtagcgtcgtgcaaaccgtacgttcctccttcaacaacattaatgcatctatcagtagcattaacgcctacaaacaagccgtagtttccgctcaaagctcattagacgcgatggaagcgggctactcggtcggtacgcgtaccattgttgatgtgttggatgcaaccaccacgctgtacaacgctaagcaagagctggcaaatgcgcgttataactacctgattaatcagctgaatattaagtcagccctgggtacgttgaacgagcaggatctgctggcactgaacaatgcgctgagcaaaccggtttccactaatccggaaaacgttgccccgcaaacgccggaacagaatgctattgctgatggttatgcgcctgatagcccggcacccgtcgttcagcaaacatccgcacgcactaccaccagtaacggtcataaccctttccgtaactgatgacgacgacggggcttcggccccgtctgaacgtaaggcaacgtaaagatacgggttatctgccgcattcttcccccttctcgcttcaatttcgaccagccatcctctattctgatgggtatttaccactggtcccggaagacaaaaatgaaacggacaaaatccatacgccacgcatcgttccgcaaaaactggagcgcgcgccatctgacaccagtcgctctcgcggttgccactgtttttatgctggctggctgtgaaaagagtgatgaaacagtgtctctctatcaaaatgctgacgactgttcagctgcaaacccaggcaaaagcgccgaatgtaccaccgcgtacaacaatgcgctgaaagaagccgaacgtactgcgccgaaatacgccacccgtgaagactgtgttgctgaatttggtgaaggtcagtgccagcaggcaccagcccaggctggcatggcaccagaaaaccaggcgcaggcccagcaatccagcgggagtttctggatgccgctgatggccggttacatgatggggcgtctgatgggcggcggcgcgggatttgcacagcagccgctgttctcctcgaaaaacccagccagcccggcttacggtaaatataccgacgcgacgggtaaaaactatggcgcagcccagccaggccgcaccatgaccgtaccgaagacagccatggcaccaaaaccggcgaccaccactaccgttacccgtggcggttttggtgaatctgttgccaaacaaagcactatgcagcgtagcgcaactggcacctcttctcgttcaatgggtggctgataccgatggaaagagtcagtattaccgagcgcccggactggcgtgagaaagcccacgaatacggtttcaattttcacaccatgtacggcgagccgtactggtgtgaagatgcttactacaagttgaccctcgcccaggttgaaaagctggaagaagtcaccgccgaactgcaccagatgtgcctgaaagtggtggaaaaagtgatcgccagcgatgagctgatgaccaaattccgcattccaaaacacacctggagttttgtgcgtcagtcatggctgactcaccagccatcgctttattcgcgtcttgatctggcatgggatggcactggcgaacctaaactgctggaaaataacgccgatacaccaacgtcactatacgaggcggcgttctttcagtggatctggctggaagatcagcttaacgccggtaacttgccggagggcagcgaccagtttaacagtctgcaagaaaagctaatcgatcgctttgtcgagttgcgtgaacagtatggcttccagttgctgcatctcacctgctgtcgcgacacggtggaagatcgcggaaccattcagtatttgcaggactgcgcgacggaagctgaaatcgctaccgagttcctctacattgacgatatcgggttaggtgaaaaaggtcagttcacggatttacaggatcaggtaatttccaacctgttcaagctgtatccatgggaatttatgttgcgtgagatgttctccaccaagctggaggatgcaggcgtacgctggctggaaccggcgtggaagagcattatctccaacaaagcgcttctaccgctactgtgggagatgttcccgaatcacccgaacctgctgcccgcttattttgcggaagatgatcatccgcaaatggaaaaatatgtggttaaaccgatcttctcccgtgaaggcgcaaacgtgtcgatcattgagaacggcaaaaccattgaagcagcggaaggtccgtatggcgaagaagggatgattgttcagcaattccacccgttaccgaaattcggcgacagctatatgctgattggtagctggctggtgaacgatcaacctgccggaattggcattcgtgaagaccgtgcgttgatcacccaggatatgtctcggttttatccacatatttttattgaataatcaatgatgccggatggcattcgccatccggtaattgttaacctatctgcaccgacagcatactcaggctgcccatttctataccatcgaccggaatggtaattggctcctgcccatcccacgcacctaagacatacaacaacggcagatagtgctccggcgttgggttcgataacgcgccaccttcatggtcgaggtaattcaccagaggatgctgctctaccgccccttgccacgtcagattcgctttcacatactcattaaacgacatcgcccaaggatatggtgaactatcaccgtgccacttcactgtacgcaggttatgcaccacgttgccactggcgaccaacattattccttcatctcgcagcgctgccagtttgcgccccatttcgaaatgccaggcggcaggtttgctactgtcgatactcaactgcaccatcgggatatcggcgtcaggatacatcttaatcagcacgccccaggaaccgtggtcaaagccccaggcttctttatccagcgtcaccgggaccggcgctaacagctcaaccagatgctgtgccagcacaggcgaacccggagcaggataatgcgtatcgtacagcgcctgcgggaagccaccaaagtcatgaatcgtgggcggcgtctccatcgcggtcactcctgttccacgggtaaaccagtgagccgaaaccaccacaatcgcttgcgggcgtggcaatgtcatccccaacttctgccagctgcgggtatacaaattatcttccagcacgttcatcggactaccgtgacctaaaaacaatgctggcatacgtgttgaagacatgatgatatccttaactaaaggtgtcattttgatatcctcacaatacgcttgttcggcggagtaagaacccggataacaatgatgatgatcatcagttattttgacgatctgcctgaaggtgaagatttataaggagttgtcgatgtcagtacctctcattctgaccatactggcggggcagccacgtttattggcgcgtttctcggcgttctcgggcaaaaaccctcgaaccgcttactggcgttttcgctaggatttgcggcggggatcatgttgctcatctcattaatggaaatgcttcctgccgcactagcagctgaaggaatgtcgcctgtgttgggttatggaatgtttatcttcggtctgcttggctattttggcctggaccgcatgttgccacatgcgcatccgcaggatttaatgcaaaaatcggtgcagccgttgccaaaatcgatcaagcgcacagccattctgctcactctcggcatcagtctgcataacttcccggaagggattgccacctttgtcacggcgagcagcaacctggagctgggatttggcatcgcactggccgtcgctttgcacaatatccctgaaggtctggcagtggcaggcccggtttatgcggcaacggggtctaaacgcaccgcgattctgtgggcggggatttctggactagcagaaattcttggtggtgtgctggcgtggttaatcctcggtagcatgatttccccggtggtcatggcggcaatcatggcggcggttgcaggaattatggtggcgctctcggttgatgaattaatgccgctcgccaaagagattgaccctaataataaccccagctatggcgtactatgtggaatgtcagtgatgggattcagtttagtgctgctacaaacggcgggaattggttaaaaacaacatcagaagttgtccagcacatggacaacttctgccagcttcacgaaagccttattctaccttttcggctgtctcttctctcgtactgtttaagtatttgttccgcgcttcaagcagtgcgtctctgtcctggcgaaacgcccgacaataacgtttcaaatgcaggaaataacccaccacaaccagagcaatcaatacaatccagtaccaggcgataaacatccttttacccttaatatttaacaatactaaacatttagcgcataaatttcacatatcctttttcggatatattcatatggtcgcataataacggaacaattatatgattttgatcataatgaaaaagaatgcctgatattaatgaaattttctcatagaaagagaagcggaattaacatcttgcatagcggggcaaaataaaaaccgaagccagctacaacttcggtttcttgattaaggcagtaattaagcagcggttttcagctggctttacgctcatgtgcctgacggtatgccaccaggtcttcaatagtcacgagcgccatattgtgtttattggcaaactcaatgcactctggtgcacgcgccatcgtgccatcgtcattagtcagctcacacagcacaccagccggtttaaagcctgccagcgtcatcaaatcaatagtcgcttcagtatgaccgccacgcgtcagtacaccacctgcctgcgcgcgaagtgggaaaacgtggcccgggcgattcagatcagaaggttttgcgccatcggcaatcgctgcgcgaacggtcgtaatacgatcagcggcagaaacaccggtagtcacaccttcagccgcttcaatggtcacggtaaaaccggtgccataggcgctggtgttattttctaccatcattggcagatcaagttgtttacggcgatcttcagtgatgcacaggcaaacaataccgctaccgtggcgaatggtcagcgccatctgctcaacggtcatggtttctgccgggaagatcatatcgccttcgttttcacggtcttcatcatcaagcaccattacaccgcgtccttcacgcagcgcagccagtgcattttcaacacgttcgaaaggcgtaccaaaagaggaaagtagcgtctgattcatggtaaaaaaacctcactaaaattatggttaccagaatcagggcagtcttaggagtggcggcatatagccaaaataacgtgagcgggtccatgcccgacagaatcgttactctctcccatccggactctaaccgtcggccccggaattacaccggatctgctgtcctttgagttcgcacccaaagcgctcgcgggctttcaactgagttgatttaccgccggtggggaatttcgccccgccctgagaataagcggattcactataacgctaatgattagcggcagcaacgcatagcttcacataattctggtttatgacttacccttatcgcactacaatggcactcaacacctatcagtacagggaaactacaatgattgacccgaaaaaaattgagcaaatcgctcgccaggttcacgaatcaatgcctaaaggaatcagggagttcggggaagatgtggagaaaaaaatccgccaaaccctacaagctcagctgacgcgcctcgaccttgtaagccgtgaagagttcgacgtccaaacgcaagtcctgttacggactcgtgagaaactggcgctgcttgaacaaagaatgagcgaactggaaaatcgcagtactgagattaaaaagcagccagatccagagactctccccccaacgctgtaaacatttgtctttaatgcactgtaaattatgaattaatcctctaatttacagtgctttctattaccttatcgcttaattccattcagaatatcatcacaaaaatgaatgagtgcaattgaaaatataattgttatgtattttttaagttttactnaannnnta

SEQ ID NO: 200 - DNA, 70954 bp, Escherichia coli
  modified_base (52481)..(52482): a, c, t, g, unknown or other
  modified_base (52488)..(52488): a, c, t, g, unknown or other
  modified_base (52491)..(52492): a, c, t, g, unknown or other
atgattagcaatccttaaataacagttactaatcattcattttctacttatatttatataaaggaatattatgtctgcttttaaaaagtcacttcttgttgctggcgtagcaatgattctttccaataacgtatttgctgacgaaggtcacggcattgttaaatttaaaggtgaagttatctctgctccatgttcaattaaaccaggtgacgaagacttaactgtaaatctgggtgaagtagcagataccgttctgaaaagcgaccagaaatctttggctgagcctttcactattcacctgcaagactgcatgttgagccagggtggaaccacttattcaaaagcgaaggttactttcaccacagcgaatactatgacgggtcagactgacctgctgaaaaacaccaaagaaactgaaatcggtggtgccacaggcgttggcgtacgtattctggatagccagagcggcgaagtgactttaggtactccggtagtaattacattcaacaatactaacagctatcaggaactgaacttcaaagctcgtatggaatccccaagcaaagatgctaccccgggcaacgtttacgctcaggctgactataagattgcttacgagtaatcacattaggccgggttcgcccggccacatcattaacggattaatgataagtggaacagatgtataaaaaattaaaattaaccacaataagcgaattgattaaaaatatttattgttcattatccgttctcatcattggttgtgcgtcagcttatgccgttgaattcaacaaagatttaatcgaagccgaagatcgtgaaaacgttaacctttcccaatttgaaactgatggccaattacccgtaggtaaatactcattaaacgctcttattaataataaaaggacgccaatccatctggacctgcaatgggtattaattgataaccaaactgcagtttgtctgactccagagcaattaacattattaggctttactgatgagattattgaagaggctcagcaaaacctgatcgatggttgttaccctatcgaaaaagaaaaacaaattacaacttatctcgataaagggaaaatgcaattatccatatctgcacctcaggcatggttaaaatacaaagatgcaaactggacgcctcctgaactttgggatcatggtattgctggggcatttcttgactacaatttatatgcctctcattatgcaccacatcagggcgataattcacaaaatataagttcctatgggcaggctggggttaatcttggggcctggcgcctgcgtactgattaccagtacgatcagtcatttaacaatggcaaaagccaggcgaacaacctggattttccgcgtatttatttgtttcgcccaatcccagcaattaatgcaaaactaactataggtcaatacgatactgaatcctctattttcgactctttccatttttctggcgtttcgttgaaaagcgatgagaatatgttgccgcctgatctacgtggttacgcaccgcaaatcacgggtgttgcacaaacgaatgcaaaggtcactgtctcacagaacaaccgtattatttatcaagaaaatgttcctcctggcccatttgctattactaatttattcaatacattacaggggcaactggacgtcaaggttgaagaagaggacgggcaagtcacgcaatggcaagttgcatctaatagtattccttatctgacgcgtaaagggcagattcgctacaccactgctatgggtaaaccgaccagcgttggtggtgattccttacaacaacccttcttctggactggtgaattctcatggggttggctgaacaatgtatccctgtatggtggttcagttttaacaaaccgtgattatcaatctctggctgccggcgttggctttaaccttaactcattgggttcattatcttttgatgtcacacgatctgatgctcagttgcataatcaggataaagaaacgggttatagctaccgcgctaactattcaaaacgttttgaatctaccggtagccagctcactttcgctggttaccgtttctctgataaaaactttgtgacaatgaatgaatatatcaatgacactaaccattacacgaattatcagaatgaaaaagagagttatattgtcacgtttaaccagtatcttgaatcattaaggttaaatacatacgtaagtttggctcgtaatacttactgggacgccagcagtaatgtgaattattcattttcacttagccgcgattttgatatcgggccattaaaaaacgtctccacttctctaacatttagccgaataaactgggaagaagacaaccaggatcaactgtacctaaatatttcgattccctggggaaccagtagaacattgagctatggtatgcaacgaaatcaggataacaagatttcgcatactgcttcgtggtatgactcttccgatcgaaataattcctggagcgtttctgcttcaggcgacaatgatgaattcaaagatatgaaagcgtcactacgcgccagttatcagcataataccgagaacggtcgtctctatctctccgggacatcacagcgagacaattattattctctgaatgccagttggaatggttcattcacggcgactcgtcacggagccgctttccatgactatagtggtagtgctgactcgcgttttatgatcgacgcagatggtgcagaagatattccgttgaacaataaacgcgcggtaactaatcggtatggcatcggagttattccatcagtcagcagttacataacaacatcattaagcgttgatacccgaaatcttccagaaaatgtggatatcgaaaactcggttatcaccaccaccttaaccgaaggtgctattggctacgccaaacttgatacccgcaagggctatcaaatcatgggggttattcgcctggcagatggtagtcacccaccactggggattagcgtaaaagataaaaccagccataaagaattaggactggttgctgatggcggctttgtatacctcaacggcattcaggatgacagcaaacttactttacgctggggtgataaatcctgttttattcaaccacccaatagcagcaacttaaccaccggaacggttattttaccgtgtattagccaaaattaattcaggatgaaactaatgcgctacttaaacacaaagaatctcattgcagcaggagtattactcgcctgcatgagcagcattgcctggggtgccatcatcccggaccgtacccgtatcataatgaatgagtcagataaaggggaagcattaaaacttactaatcaaagcaaaaatctaccctatctggcgcaaacatggaaagaagatacgaaaggcaataaatcacgtgactttattgtcacggttccccctatggtacgtttaaatcccagtgagcaaattcaaataagaatgataagtcaggaaaaaattgctcaactgcctaatgacagagaaacgctcttctattttaacgtgcgagaaataccgccaaaaacagataaaaaaaatgtgatgcaagtcactatgcagcacgcattgaaactattctggcgaccaaaagctattgaattagaagatgatggggtaatgtcttacgaaaaagttgaaatcatccgtagaaatgatggttcgatccgctttaacaataagatgccttatcacgttacgctgggttatatcggaacaaacggaatcacaatgttgccacaaacgcaaagtttaatggtaaccccttatagccatgcagatacgcagtttaaaaatgttccgtcagcttttcaggttggttatatcaatgattttggtggattaagtttttatgaaataaactgcccgacggttaataactcttgtaatgtttccgtagccaaacgagataaataatatgcgctacttattaattgtaattatatttattataggttttagtgcattacctgtatgggcaatggactgctatgctgaacatgaagggggaaataccgtagtcattggttacgtaccaagaatttctatccccagtaatggtaaaaaaggtgataagatctggcaaagcagtgagtattttatgaatgtcttctgtaataatgcattacctgccccatcacctggagaagaatacccatcagcctggactaatataatgatgtttttaccaggcggtcaggacttttataatcagaactcctatatttttggcgtaacatacaatggagttgattatgattcgactgcccctaatgctatcgcagcaccagaatgcattgatataaaaggagcgggtacctttaataatcactataaaaaccccgctgtctgtagtggaggtcctgagcctcaattatcagtaacctttccagctcgcgtacaactctatattaaattagcaaaaaatgccaatagagttaataaaaacctggtgttacctgatgaatatatcgctctagagtttaaaggtatgagtggcgcaggagctatagaagtagacaaaaatttgaccttcaggattcgtggattaaataatattcatgtccttgactgctttgttaatgtcgcactggaaccagctgatggcgttgttgactttggtaaaataaattcccgaacaattaaaaataccagcgttagtgagacgtttagtgtagtcatgacaaaagatcctggtgcggcctgtactgagcaattcaatattttagggagctttttcactacggatattttgagtgattatagccatctggatatgggtaatggactgctattgaagatatttcataaagatggaacagcaacggaatttaaccgcttctcacaatttgcttctttttcatcgtctagtgcaccttcggtcaccgcaccattcagggcagaacttagtgcgaatccggcagagactgttgttgagggaccgtttagtaaagacgtcatcctcaaaatcacctataactagcatctaatacaaacactaaaacgggccatcaggcccgttatatcagtgctctaactccagctctcttgcctgcatcatctgttgacaataccaggcataacgtgcgcaaaaccaggttctatgttcttcatccatgttaccagtaacggcaagaatatcgaccgggcgaccttctgcgtgcattctggcaaaactacgcgccaggaaatcgaaattatttaaagaattaagactatgatccataagcacatcctccggttatcgcataccttttaaggccatatgctttttctgatttcagtattccccaatcagtgtagtgcctttaaacataacgtgcgtaaatatattgtccccgatcacactttttagtgaaaaataaaaaaccatattaaaaaactttctcttccagaacttctctaacatgtgttattattaacaaagataaatgtaagcaaggaaactatcctaaagtaaatattgcgtcactaaatggacattggagtgacatatgattttattcgccgactataataccccttatcttttcgctatttcctttgtactgttgatcggccttttagaaattttagcgcttatctgcggtcacatgctctccggtgctcttgatgcacatcttgaccattatgattccataaccacaggtcatattagccaggcacttcattatctcaatatcggaagattgccagctctcgtcgttctctgcttgctggctggttttttggtcttattggcatcctgttgcagcatgcctgcatcatggtctggcaatcaccactgtcgaacctgttcgtggttcctgtcagtttactgtttacgattattgcggtgcattataccggtaaaatagttgcgccctggattccacgcgaccatagttcagctattacagaagaagaatatattggtagcatggcattaattaccggtcatcaagccacttcaggtaatccctgcgaaggaaaactcaccgatcaatttggccaaatacattatttactactggagcctgaagaaggaaaatttttcactaaaggagacaaagtgttaattatttgccgactttctgcaacgcgatatttggcggaaaacaatccctggccacaaatattgtaatttattaatcaaaaggaaatttaataatggatgatattgttaattctgtgccctcctggatgtttaccgcgattattgccgtatgcattctgtttattattggaattattttcgccaggctctatcgtcgcgcttcggcagagcaagcttttgttcgtactggtttaggtgggcaaaaagtggtgatgagcggtggcgcaatcgtgatgccgatctttcatgaaataatccccatcaatatgaatactctgaagctggaagtcagccgctcaaccattgatagcctgattacgaaagatcgtatgcgtgttgatgtagtagtcgctttctttgtacgggtaaaaccgtctgtagaaggcatcgccactgcggcgcagacgttggggcaacgcacgctatcaccagaagacttacgtatgttggttgaagataaatttgtcgatgccctccgtgcaacagctgcacaaatgaccatgcatgagttacaggatacccgcgagaacttcgtgcagggagtacaaaatactgtcgcagaagacctgtcgaaaaacggtcttgagctggaaagcgtttcacttaccaactttaaccagacctcgaaagaacatttcaatccgaacaatgcctttgacgccgaaggtttaaccaaactgactcaggagacggagcgccgtcgtcgcgaacgtaacgaagttgaacaggatgtagaagttgcggtgcgtgagaaaaaccgtgatgcactttcgcgcaagttggagattgaacaacaagaagcgtttatgacgcttgagcaggagcagcaggttaaaacccgtactgccgaacagaatgcacgtattgcggcttttgaagctgaacgtcgtcgtgaagcagagcagacgcgaattctggcagaacgacaaattcaggaaacggagatcgagcgcgagcaggccgtccgctcaagaaaggttgaggctgaacgtgaagttcgtattaaagagatcgaacaacagcaggtcaccgaaatcgccaaccagacgaaatctatcgctattgccgccaaatcggaacaacagtcccaggcagaagcgcgtgctaaccttgcactcgcagaagcagtaagtgcgcaacaaaacgtagaaaccactcgccagaccgcagaagccgatcgtgctaaacaagttgccctaatcgctgccgcgcaggatgcagaaaccaaagcggttgaactgaccgtgcgggcgaaagcagaaaaagaagccgcagagatgcaggcggcggctatcgttgagttagccgaagctacacgtaaaaagggtctggcggaagcagaagcacaacgtgcgctgaacgatgctatcaacgtactttctgatgaacaaaccagccttaaattcaaactggccttgttgcaggcgctacctgcggtaatagaaaaatccgttgagccgatgaaatctattgacggtatcaagattattcaggtcgatggtctgaatcgtggcagcgctgcgggtgatgcaaacacgggtaatgtggggggcggaaacctggcggaacaagcattatcagccgctctctcttaccgcacacaggcaccgctgattgactccttgctcaatgaaattggcgtttcaggcggctcactggcggcattgacttcacccttaacctcaacaactcccgtcgccgaaaacgtagaataaattttcagctatgaacgtccctggcacaaaaagccggggattttttatatctgcgttccgctaaaaactgcaaatgatcaggtcgttgcaacgttttgcgtgaccgctcggggaaggcaaaactgcctctgggaaagcgttgcgcgaggtccggcgctcatcaacaatcggggagtcagcaaagggctgaaacgggaaagcccctcccgaggaaggggccttacagaaggaaagggttatgatgaagctcgtcatcatactgattgtgttgttactcgtaagtttcgcagcttattaacagccaatcagaggggggagaaatcctccctcacccttgttcctttactttaggttgaaaaaaaatcagcgtcaagaaggtttcattaacacatatccctggcccaaaaagccggggattttttatatctgcgttccgctaaaaggtgcaaatgctcaggacgttgcagcgttttgcgtgaccgctcggggaaggcaaaactgcttcagggaaagcgttgcgcggggtccggcgctcatcaacaatcggggagtcagcaaggggctgaaacgggaaagcccctcccgaggaaggggccttatagaaggaaagggttatgatgaagttcgtcatcatactggttgtgttgttactgttaagtttcccgacttactaacaactgatcagaggggggagaaatcctcccttacccttgttcctttactttaggttgaaaaaacaacagcgtcaataggcctgcctgctacgaagcgagatctgtgaaccgctttccggttagccttttttatcctgttggatcttcttgatgatgttagtggtcgagcaaccgtcttcgaagttgagcaccagcacttcgccgccgttggcccagacttctttactcccggcaatttcttctggtttatagtcgccgcctttcaccagcagatctggcaggatcccggcgatcagacgctgcggcgtgtcttcttcaaacgacactacccagtcgaccgcttccagtgcgcccagcacaatcatacgctgctcgagtgggtttaccgggcgggaatcccctttcagccgtttggtggaggcatcgctgttcacagcgacaatcagacggtcacccagtttgcgagcatttgccagataggagacgtgcccggcgtgcaggatgtcaaagacaccgttggtcattaccaccttttcgccgcgtttacgcgctgccgctacagcaagcttcagttcctcttcggtcatcacaccaaagccggtatctgcgcgcccacgcactgcattttccagctcgatcggcgaaaccgtggaggttcccagtttgccgaccaccacgccagccgccgcattggcaaagaagcaggcttcttccagcgaattacccgctgccagcgttgccgccaggacgccaatcaccgtgtcgcccgcaccggtaacgtcatacacttcctgcgcctgggttggcatatgcagcggcgctttacccggttgcagcagcgacataccctgttcggaacgggtcactaacagagccgagagttcgtaatcggcaatcagtttcatgccgcgctcaacaatctcttcttcggtcttacatttaccgacaacagcttcaaattccgagagattcggcgttaacagcgtagcgccgcggtagcgctcaaaatcggtaccttttggatcaatcagcaccggaacgcccgctttacgcgccagttggatcatctgctgtacgcttgccagcgcacctttggcgtagtcagaaagcaccagcgcgccaatcgaactcagcgcctgattaatccgctcgtgcagcggctgcggatcaacaccttcgaaaccttcttcaaaatccaggcggatcagctgttggttgcgggaaagtacccgtaatttggtgatagtcggatgcgtcggtacagaaacgaagtcgcatttgacgttgacgtcggccagagatttactcagcgcacgcgccgcatcgtcaatgcccgtcagcccgaccaggcgagcattggcaccgagagaagcgatgttcattgccacgttagccgcgccgcccggacgttcttcgatggtattgactttaaccacgggcaccggcgcttccggcgagatacggctggtgggaccgtaccagtaacgatccagcatcacatcaccaaccaccatcactcctgcacgttcaaactctggcagcgttactttcattcctgtctcctgagagattcaaaatttgcgcgcgataataccatacttcattcttccaccagccacttctgccagcttgcccgcaccagttcacgctctgcggtgaagcaatcctccggcacatggcccggcaattcctgtaatgccagatgatgaagttcatcgcgcagcgtagtataagcacgggtcagcgccatcgcttcctgctcttccataatgtcgttttgcgccagtagttccagaatgcgcacgttgtctgaccagcgcgttaacttcggtttttcatgagcgtagcgcaacaccagatattgggtaataaattcgatatcggtaattccgccttcatcagctttgatatcaaagcgatcgcgatgtttattgccgagatgagcgcgcattttctcgcgcatttcccgcacttccgtttgcagagttttaccttcacgcggcagcgtcataatctcgcgacgcaccgcgtcaaagtgcgcggtgagctgcggatcgccgtacactacccgcgcacgcaccagcgcctgatgttcccacgtccaggcctcgtttttctgataatcggcaaatgcttctgcggatgtcaccagcattcccgcggccccggacgggcgtagccgtgcatccacttcatacaaaatgccggaagaggtacgcgtactgaacagatgcataatgcgttgcgccagacgcagataaaactgtcgcccgtcgatttcccgctcgccgtcagtcatcgcatccattgggcaatcatggaggaagatcaggtcaagatcggaactgtagcctaactcccagccgcccagcttgccgtagccgaccaccgcaaaaccacggccttcgcgatcgttgaggtgatttggcttaccgtagcgggccaccatttgaacccacgcctgctgaacgacggcatctatcatagcctctgccagccaggttaagtgatcgctcactttcatcaccggtagcgtaccagcgatatccgctgcggcgatgcgtaacagctgcgcctgtttgaactgacgcagcgcctcaagctgttgctcttcgtcatcttccggcacgcgcagcaaatactggcgcaactcatcgcggtaggcatcggtcgccgtcggctggtaaagggtgtttggatcgagcaattcatccagcaataatggataacgcgccagttggctggcaatcatcggcgacgcggcacacagagaaatcaaatgtttaagcgccgcggggaattcactgagcaattctaaataggtggtgcgggtaacaatccccaccagcaaggcggtaatgcgcgacagcgtaacggcagcgtcttcacgcgcacagacatcacttagcagatgcggcatcagatggtcgagcacctgacgtcctcgcggcccgatggtgcgcttatccagctctttgcggaaatcggcaatcagcgttagcacctgtttgcgatcatcctcgctaagatgcgccagcactggcgtagtgtcatcttcctgcaacgcatcctgccacagctcacgccactgttccgacagcgactcttcctgagtttcactttcgtcgtcgccaatcaattcattaaacacccggcgcacattggtcatatgtgcggtcagcgccccggtcagttgcggccagtcagcaaagtccatcgcccacgccagccgcgcacggttaagctcatcagaaggaagcgtctgggtttgttcgtcgttaatgctttgcagcaggttttccagacgccgcaggaacagatacgccactcgcaattgttcagcatcgttttcagaaagcagatgcagcgcggcaatgacgctgagcgttggcagtaaagagcgcgactgcagcgacggttcgcgcccaccgcgaatgagctggaacacctgaacgataaattcaatttcgcgaatgccgcctgcgccgagtttgatattgtcggtcaaaccacgtcgacgcacttcacgggcaatcatccctttcatgttgcgcagcgactgaatcacgctgaaatcgatgtaacgacggaaaacaaacgggcgcagcatcgcacgcaactcgttagcatagacgccttcgctatcgcccataatccgcgccttgaccatcgcgtaacgctcccagtcgcgcccctgctcctggtaataatcctccaacgcggcaaagctcagcaccagcgggccactttcgccaaacggacgcagccgcatatccacgcgatagacgaagccatcctgcgttggttgatccaacactttaatcagccgctgccccatgcgggtaaaaaactgcgcgttatccagttcccggcgtccgccctgcgtacaaccatgttccggccaggcaaaaatcagatcgatatctgaggagaaattcagttccccaccgcccagcttacccatgcctaaaatcagcagcggttgcgcttcgccctgcgcattgcacggcgttccccactcgcggcagcaagcgtcatacagccagtcacgcgcggcgacaatcagcgtctccgccagatggctgagctgctgcaatatgctctcttcagtaaccaaagccagcgtttgcgcccaggcgatgcgcaccataatgcgccgccggaatagccgcagctcgcgcattaacccggcttcgtcactcacattactgagcgcctcctgcaaccatgccgcgtaatgctgccattcgtcggcctgcggcggttggctttccagttccgtcagccactctggatgcacaatcacgctgtcctgcacaaaatcactaaaagtaagtactgacttcgcctgtgcgctaagtgattcctcggctaaaggctctggcagccgctcaacaacggtctgccagtactgctgtaacggtgaagagagcggcttcataagcgattttatccttgcctgattaacgttttccgctgtgcaaccagaacggttcctgattgtttgcctcattacggaaatgttcaatttcaatgcgttgcccggtcgcaatagcgtgacgcagcccctgccagttctccagccaggcttgcgcgacgacaggatcatagtaacctgccagcagcagtattgagtcaatatcacgcgtcaggcgtggcaactgatcatggtagcgatcgcctaacggctggcagaaaacgcttttcagttcagcggcatggcgggaaagatggatatcggcaaagcgtttgaaggaatcgctgattttaccctgcgctttggcatctaaaaacggctgccaggctttgcttaccaaccattcggtcaacgccagctttgccattgccgtttcggtagagtagaccgccgtcacggcagaaaccgcagaagcgatggtcgcttcgcattgagtcagcaaatcacgtaagtgagtgctcgctttacgcggcacaatgccaccgaacagcatcagtgcatggcgaacaaggccaatggctgccagcacctgctctttcgccgcatcgttgccgcgtacccacagttcttcatgatactgccattgcgctaacgccagctcgaacgccgcttccagcccctgttccacatcggcttttgccgcaacatgcaaaatggtggtcggtttgatttcacgcgccggattgccctgcgccagatgatagccacgcgccgctttgctcaggctgccctggcgtaatccggtttgcgataccagttggttcgccagtttcagcaccgcgcgcgtgtcgccgctaagcagttccagttccagctcacagataggttcagcaaattcccccgctttcacctccccctgatcgagagcgatttcaattcggctgtcatcgaccgccaccagccatttttcgcgataaaaatcggtgctgaacagcggttgtacgcgggaagcgagatcggcgggcaattcgccgttcggccagacttccgtcggtaactgcgccaggtcgagcgtcggttcgctcaacgccacgttatattccgggcgctggtgtaagccgcctgtcactcttcctgcaactttcatggtcatctcatagcgaccgttttcgccacgaatacgtaagcccatatcgtgcccacgcagccagttatccggcgtttcgtagtaaatattcagcaactgcacggggtcatggtgctcgccgcccagcgtattgagatggtcacgcaacgcctcaacggcactgtgattaacaataaactttaattcgatttcctgagccatggcctttacttatcggttatgtcacataagtgacgatgaacggcgaacttaatgcgatcttttttgtcagtagatagtattttgcgccaaattgccatgcaacgggcaatttgacgggcgtaaaagtttgaagcagtggcaagacctgacacagaggattccgattgatgtcgaatgctttgcgtagcgacactgatgccactactatcgttccactttccatgacaataacgacagcctgatgccaaaattacgcctgatcggattaactttactcgcacttagcgccactgccgtctcacacgctgaagaaacgcgctatgtttctgatgaactgaatacctgggtccgtagcggtccgggagatcattatcgcctcgtgggcacggttaacgccggcgaggaagtgaccttattacaaactgacgccaacaccaattatgcccaggtgaaagacagctctggccgtaccgcctggatcccgttgaaacaacttagcactgagccaagcctgcgctcccgtgtgccagatctggaaaatcaggtcaaaaccctgaccgataaactcaccaatatcgataacacctggaatcagcgcaccgcagaaatgcagcaaaaagtggcgcagagcgacagcgtgatcaacggattaaaagaagaaaatcagaaattgaaaaacgagctgattgtcgcgcagaaaaaggtcgatgccgccagcgtacagttggatgacaaacagcgcaccatcatcatgcaatggtttatgtatggcggtggcgtgctggggcttggcttgctgctcggtctggtactgccacacctgatcccaacgcgcaaacgcaaagatcgctggatgaactaaatcgccttcttcgttgcactgtcttattattaggaattgtgtatttgacgaagggatgatggcgtgaagatttatctggtcggtggtgctgttcgggatgcattgttagggctaccggtcaaagacagagattgggtggtggtcggcagtacgccacaggagatgctcgacgcgggctaccagcaggtaggccgcgattttcctgtgtttctgcatccgcaaacgcatgaagagtatgcgctggcacgtaccgaacggaaatccggttccggttacaccggttttacttgctatgccgcaccggatgtcacgctggaagatgatcttaagcgtcgcgatctgaccattaatgcgctggcccaggacgataacggcgagattatcgacccgtacaacggtctgggcgatctgcaaaatcgtctgttgcgccatgtttcccccgcttttggcgaagatccgttacgcgttctgcgcgtggcgcgttttgctgcgcgttatgcccacctcggttttcgtattgccgatgaaactctgacgctgatgcgcgagatgacccatgcgggtgaactggaacacctgacgcctgaacgggtatggaaagagacggaaagcgccctcaccacccgcaatccacaggtgttcttccaggtactgcgcgattgtggcgcactgcgcgttttattcccggaaattgacgcactgtttggcgttccggcccctgccaggtggcatccggaaatcgacacgggtattcataccttaatgacgctctcaatggcggcgatgctgagtccgcaggtcgatgtccgtttcgcaactttatgccacgatctcggtaaaggactgacgccgccagaactttggccgcgtcatcatggtcacggtccggcgggtgtgaaattagtggaacaactctgccagcgtctgcgcgtgccaaatgaaattcgcgatttagccagactggtggctgagtttcacgatctcatccacaccttcccaatgctgaacccaaaaactatcgtcaaattgtttgattccatcgatgcctggcgtaaaccgcagcgtgtcgagcaactggcgctgaccagcgaggctgacgtgcgcggcagaaccggttttgaatcagcggactacccgcaaggccgttggttgcgcgaagcctgggaagtggcgcagtcagtgccgacaaaagcggtcgttgaagcgggatttaaaggtgtggagattcgcgaggagctgacccgacggcggattgcggcgatagccagttggaaggaacaacgttgcccaaagcctgactgagtataaaactaaacgttaacacgaaccatcccctcgccccttcggggagagggttagggtgaggggaacagaccagcaccggtgcgaacaatcacccccaccccggccctctccctacagagcgagggagaaaaccaggcctgctcccgaaccttttctcaatcaaaagaacacgacgtacaccgcagccgccacaataaagcgataaatggcgaacgggataaacgaaatgcgcttaatcaattgcaggaaggttttaatcgctatcagcgccaccacaaaagcggtgataaacccaacggcaaacatcgggatatcgccggttgtcaggaagccccagcttttgtagagatcgagcgccgttgcgcccatcatcatcggtaccgccagcaggaacgagaactcggaagcagcgtaacggctcacgcccatcagcatcccacctgaaatggtggccccggaacgggagaaacccggccacagcgccagacactggaaacagccaatcataaacgcctgacgataggtcatatcatcaagacccggcgcacgcggctctttcggcttcaggcattcggcggcaatcagcaacaaaccgccaacgaccagcgcatacatcacatttatcgggttaaacaatgacttaatcgtgtcgtggaacaatagccccagtaccaccgccggaatcatccccagcaaaatgtggatcagcgttaaacgacctttgctttcaccttcgtgctgcaacgggcggccaaagtggatgccaatcaggccaaacagacgccgccagaacatcactactaccgccagaattgatcctaactggatcacaacttcaaaggttttcgccgtgtcgccctcaaaccccaacaagtgaccgacaataatcatatggcccgtgctggataccggcagaaattctgtcaatccttcgaccacacccaatattgccgctatcagcagcgagtgcatatcgctcatcaataaacccctaaattattaaaatgtaccgcttgtccggactactgcagtaagaccaggttataaccgtttggtttaacagctgtaaaattaattattttctttcagattattgccacgctcaatgattacgccaacattctccgcccgcgccactgcgcctggcttgctgagtttgatacgcacccacggcgagttgaagcgtgctaacagcagctccgccacctcttcagccacgcgttccaccagcgcaaaacgcgccccctcgacgtggctgaccaccgtttctgcaatgtcagcgtaactgaggcaatccgccacatcatcacttttcgccgctttacggttatcccatgccatttcgatatcgaacactaacttctgttcgatggtctgttcccagtcgtaaacaccaatagtggtgattaccgaaagttgctctataaatacaatatccatcacgtcctgcctgctttttggctaaccggataccacttccggcgaaatgtgcgtattatccacagattcatcgttgaacacgaattttcaaaacggaacagcttatgagtgcaatcgcgcctggaatgatcctcatcgcgtacctctgcggctccatttccagtgccattctggtttgccgcttgtgtgggctgcccgatccgcgaaccagcggctccggcaatccaggcgcaaccaatgtgttacgtatcggtggcaagggagcagccgtagcagtactgattttcgacgttctgaaaggaatgttgcccgtctggggcgcgtatgaattaggtgtcagccccttctggctaggcttaattgccatcgccgcctgtcttggacacatctggcccgttttcttcggatttaaaggaggaaaaggcgttgctaccgcttttggtgccatcgcacccattggctgggatctcaccggagtaatggcgggaacctggttactgaccgtgctattgagcggatactcgtcgctgggagcgattgtcagtgcactgattgctccgttttatgtatggtggtttaagccacaattcaccttcccggtttcgatgctctcttgcctgatcctgctgcgtcatcatgacaacatccagcgtctgtggcgtcgtcaggagacaaaaatctggacgaaattcaaaagaaagcgcgaaaaggatcccgagtgatttctggtggatctacatgacctgatagccttcatcgggcttgcccagccgttgctggcaccatgccgccagaaattccacgcagacacgtaatttcatgctgcgatagagcggctcccggtaaacagcccagatattggcgctttgtgcatactccggcaatacttgcaccagtttgccactctccagaaacggcaacacatcccactcggaacgcagcataatccctttgccctccagcgcccattgcaacactatctcgccgctattggaggaaagatgcccgctaaccttcaccgattttttctcctgaccgttccccaactcccatattccgtgggtcatatcgcgctctttggtcaccagacagtcatgacgacttaattcctgtaatgattgtggctgcggatatttttgcagatactcaggtgctgcgcataatattcttttatttttcgttaacagatgcgcaatataataatcaggaatttcgtcattaatacgaatatccagatcaatattatcctgcactaaatcaatttgccgatcgaacaattcaaaatgcacctgtaactcaggataattgcgcataagttcggtaatggctggcgcaatatggctgcgcccaaaaccaaaactgcaaccaatacgaatcatcccctccgggcgcgttttgatttgcgtgacgtcatcgaccagtcgctgatattgggtgaggatttccagcgcatgttcgtaacaacgttggccactttcagtcagcgccacgccgcgagcggagcggttcagcagcgttgttgccagcgtattttcaaggatttggatccgcttggtgacaaatgcaggcgtttgcccaagcgtcgccgctgcagcactaaaactcccgctgtggacgatttctaccagtacctgcaagtctttggctaaaggccagctattcagcatcgttaattatccgcagttgtgataagcgcagtgtatttcgcaaaacattgccattccctgctctggcgcaatattcattcttattttcgcgttgattcacgaactgttaattacatattcacggtggcaaaaaatataaaaccacatttttagtggtagtttgtggcggtgaatttttccagacaaatacaaaaactggagttgccatgatgagcgaaagtaataagcaacaggcagtgaataagttgacagagattgtcgctaactttaccgccatgatttctacccgaatgcctgatgacgtggtggataaactaaaacagctaaaggatgccgaaacgtcgtcgatggggaaaattatctaccatacgatgttcgacaacatgcaaaaagcgattgacctgaatcgtcctgcctgtcaggacaccggggagattatgttcttcgttaaagtcggttcccgcttcccactgcttggcgagctgcaaagcatactcaaacaagccgtggaagaggcaaccgtcaaagcgccactacgtcacaatgcggtagaaatttttgacgaagtaaacaccggcaaaaataccggtagcggcgtaccgtgggtcacctgggacatcatccccgacaatgacgatgcggaaatcgaagtttacatggcaggcggcggctgcacgctacctggccgctcgaaagtgttaatgccgtcagaaggctacgaaggcgtggtgaaattcgtcttcgaaaatatctccaccctcgccgtaaacgcctgtccaccggtactggtgggcgtgggcatcgccacctcggtggaaaccgccgccgtactctcgcgtaaagccattttgcgtccgattggcagccgccatcccaatccaaaagcggcagagctggagctacgcctggaagaaggactcaaccgtctggggattggtccacaagggctgaccggcaacagttcagtgatgggcgtgcatatcgaatctgccgcccgccatccgtcaaccatcggcgttgctgtctctaccggctgctgggcgcatcgtcgcggcacgctgctggttcatgccgatctcacctttgaaaatctgtctcacacccggagcgcgttatgaaaaagatcctgacaaccccgatcaaagctgaagatctgcaagatattcgcgtcggcgatgtgatctacctgaccggtacgctggtgacctgccgcgacgtttgtcaccgccgtttgatcgaactgaaacgtccgatcccttacgatctcaacggcaaagcgattttccacgctggccccatcgtgcgcaaaaacggcgacaaatgggagatggtctccgtcggcccgacaaccagtatgcgtatggaaagttttgaacgtgaatttattgagcagaccggcgtgaaaatggtggtcggcaaaggcggaatggggccgctgaccgaagaaggctgtcagaaattcaaggcgctacatgtgattttccctgcaggctgcgcggtgctggcggcaacccaggtggaagagattgaagaagtgcactggacagagctcggaatgccggagtcgctgtgggtctgccgggtcaaagagttcggcccgctgattgtctctattgatacccacggcaacaacctgatagccgaaaacaaaaagctgttcgccgaacgccgcgatcccatcgtggaagagatctgcgagcacgtccattacatcaaataaccctcccggagaggctcgccccctctcctttttcgcaggcataacacgatgaaaccttccactgaatggtggcgataccttgcgccgctggcggtcatcgccattattgctctaattccggttcccgcagggctggagagtcatacctggctctactttgccgtttttactggcgtgatcgttggactgatcctcgaaccgtgccgggtgccgtggtggcgatggtgggtatctccatcatcgccatactctctccctggctgctgttcagccccgaacagctcgcccagccaggctttaaattcactgcaaaatccctctcgtgggcggtttccggtttttctaattcggttatctggctgattttcgccgcctttatgtttggcacaggctatgaaaaaaccgggcttggacgccgcattgcgctgtttctggtgaaaaagatgggacatcgcacgctgtttctcggctatgcggtgatgttctccgagctgatcctcgcacctgtaacaccgtccaactcggcgcgtggtgcggggattatctatcccatcatccgtaacctgccaccgctctatcaatcacaaccaaacgacagcagttcgcgcagcattggctcgtacatcatgtggatggggattgttgccgactgcgtgaccagcgccattttcttgacggcgatggcaccaaacttgctgttaattggactgatgaaaagcgcatctcacgccacgctgagttggggcgactggttcctcgggatgttgccgctcagtattttgctggtgctgctggttccctggctggcttatgtgctgtacccgccggtactgaagtctggcgatcaggtgccgcgctgggcagagacggaactgcaggcaatgggcccgctctgttcgcgtgaaaacggatgctggggctgatggtaggcgcgctggtgctgtggattttcggcggtgattatatcgatgccgcgatggtcggttacagcgtggtggcactgatgctgcttctgcgcattatcagttgggacgacattgtcagtaataaagcggcgtggaacgttttcttctggctggcctcgcttatcaccctcgctaccggactcaacaacactggttttattagctggtttggcaaactgttagcaggcagcttaagcggttattcgccaacgatggtgatggtggcgttgattgtggtgttttatctgctgcgctactttttcgccagcgccacggcgtatacctccgccctcgcaccgatgatgattgccgctgcgctggcgatgccggaaatcccgctgccggtgttctgcctgatggttggcgcggcaattggtctggggagcattcttacaccatacgccaccggacccagtccgatttactacggtagtggttatctgccaacggtggattactggcgactgggggcgatttttggactgatattcctcgtgttgctggtgattaccggcttgctgtggatgcccgtggtgttgctttaagtgaggacggtgccggaaattgctctccggcaccggatagttttacgcagccggtaactctgccagtggccagcgcggacgcacgctaacgccgagatccgccgtcgcgcctgctttaaaccgcaccattccggcataggcgatcatcgcgccgttatcagtacaaaattccggacgcgcgtagaacacttcgccgcggcgttttttcatcatttccgccagcttcgcccgtaacgtgcggttagcactcacgccgcccgccatgaccagtcgcttaaagcccgtctgatccaacgctcgcttacacttaatcatcaacgtatcgaccaccgcatcttcaaaggcgcgggcgatatcagcacgcgtctggtcgtcggtgccgttgtcacgaatcgtgttcgccgcaaaggttttcagaccagaaaagctgaaatccagccccggacggtcggtcatcggacgcgggaaaacaaagcgcccggcagtaccctgagccgccattttcgacagtaacggtccgccaggataatccagccccagcagcttcgcggttttatcaaacgcttcaccggcggcatcatcgatagactcgccgagcagctcgtactgaccaatgccagtcacgctgattaactgcgtatgaccgccggacaccagcagcgcgacaaacggaaattccggcgggttatcttccagcatcggcgctaacagatgcccttccatatggtgtaccgggattgccggaacgttccaggcaaacgccagagaacgccccacggttgcgccaaccagcagtgcgccgactaatccagggcctgcggtataggccacagcatcaatgtcttttgccgttaagccagactcctttagcgccgcctggatcaacggtacggttttgcgcacgtgatcgcgggaggccagttcaggcacgacgccgccgtagtcagcgtgcaatttcacctgactatacaattggttggctaacaaacctttttcatcgtcgtaaatggcgatgccggtttcatcgcaggaagtttcaatacccagtacacgcatgacttgttttacctcgctttattaccgcgcagtgtaggaccaatgcgggttgatgtaaaactttgttcgcccctggagaaagcctcgtgtatactcctcacccttataaaagtccctttcaaaaaggccgcggtgctttacaaagcagcagcaattgcagtaaaattccgcaccattttgaaataagctggcgttgatgccagcggcaaaccgaattaatcaaaggtgagaggcacatgccggtaattaaagtacgtgaaaacgagccgttcgacgtagctctgcgtcgcttcaagcgttcctgcgaaaaagcaggtgttctggcggaagttcgtcgtcgtgagttctatgaaaaaccgactaccgaacgtaagcgcgctaaagcttctgcagtgaaacgtcacgcgaagaaactggctcgcgaaaacgcacgccgcactcgtctgtactaattccccgagagcgttgctctccgatcagaccgagttgtagttgtaaggccgtgcttccgaaaggaatgcgcggcttattttcgtttatgaattgctaaaaatcggggcctatggctggacgaatcccacgcgtattcattaatgatctgctggcacgcactgacatcgtcgatctgatcgatgcccgtgtgaagctgaaaaagcagggcaagaatttccacgcgtgttgtccattccacaacgagaaaaccccgtcattcaccgttaacggtgagaaacagttttaccactgctttggatgtggcgcgcacggcaacgcgatcgacttcctgatgaactacgacaagctcgagttcgttgaaacggtcgaagagctggcagcaatgcacaatcttgaagtgccatttgaagcaggcagcggccccagccagatcgagcgccatcagaggcaaacgctttatcagttgatggacggtctgaatacgttttaccaacaatctttacaacaacctgttgccacgtctgcgcgccagtatctggaaaaacgcggattaagccacgaggttatcgctcgctttgcgattggttttgcgccccccggctgggacaacgtcctgaagcggtttggcggcaatccagaaaatcgccagtcattgattgatgcggggatgttggtcactaacgatcagggacgcagttacgatcgtttccgcgagcgggtgatgttccccattcgcgataaacgcggtcgggtgattggttttggcgggcgcgtgctgggcaacgatacccccaaatacctgaactcgccggaaacagacattttccataaaggccgccagctttacggtctttatgaagcgcagcaggataacgctgaacccaatcgtctgcttgtggtcgaaggctatatggacgtggtggcgctggcgcaatacggcattaattacgccgttgcgtcgttaggtacgtcaaccaccgccgatcacatacaactgttgttccgcgcgaccaacaatgtcatttgctgttatgacggcgaccgtgcaggccgcgatgccgcatggcgagcgctggaaacggcgctgccttacatgacagacggccgtcagctacgctttatgtttttgccggatggcgaagaccctgacacgctggtacgaaaagaaggtaaagaagcgtttgaagcgcggatggagcaggcgatgccactctccgcatttctgtttaacagcctgatgccgcaagttgatctgagtacccctgacgggcgcgcacgtttgagtacgctggcactgccattgatatcgcaagtgccgggcgaaacgctgcgaatatatcttcgtcaggaattaggcaacaaattaggcatacttgatgacagccagcttgaacgattaatgccaaaagcggcagagagcggcgtttctcgccctgttccgcagctaaaacgcacgaccatgcgtatacttatagggttgctggtgcaaaatccagaattagcgacgttggtcccgccgcttgagaatctggatgaaaataagctccctggacttggcttattcagagaactggtcaacacttgtctctcccagccaggtctgaccaccgggcaacttttagagcactatcgtggtacaaataatgctgccacccttgaaaaactgtcgatgtgggacgatatagcagataagaatattgctgagcaaaccttcaccgactcactcaaccatatgtttgattcgctgcttgaactgcgccaggaagagttaatcgctcgtgagcgcacgcatggtttaagcaacgaagaacgcctggagctctggacattaaaccaggaactggcgaaaaagtgatttaacggcttaagtgccgaagagcgatcgggaagcccccgacagccgcactgagaggcagcggcaaatatataagtacgccctcgtaattatcgttggcggtaaacaaccgttggatttcagcgttaacggctgaaggacatcgggtcaatcgcccaacaccaacctcatgaaataagtgtggataccgtcttatggagcaaaacccgcagtcacagctgaaacttcttgtcacccgtggtaaggagcaaggctatctgacctatgccgaggtcaatgaccatctgccggaagatatcgtcgattcagatcagatcgaagacatcatccaaatgatcaacgacatgggcattcaggtgatggaagaagcaccggatgccgatgatctgatgctggctgaaaacaccgcggacgaagatgctgccgaagccgccgcgcaggtgctttccagcgtggaatctgaaatcgggcgcacgactgacccggtacgcatgtacatgcgtgaaatgggcaccgttgaactgttgacccgcgaaggcgaaattgacatcgctaagcgtattgaagacgggatcaaccaggttcaatgctccgttgctgaatatccggaagcgatcacctatctgctggaacagtacgatcgtgttgaagcagaagaagcgcgtctgtccgatctgatcaccggctttgttgacccgaacgcagaagaagatctggcacctaccgccactcacgtcggttctgagctttcccaggaagatctggacgatgacgaagatgaagacgaagaagatggcgatgacgacagcgccgatgatgacaacagcatcgacccggaactggctcgcgaaaaatttgcggaactacgcgctcagtacgttgtaacgcgtgacaccatcaaagcgaaaggtcgcagtcacgctgccgctcaggaagagatcctgaaactgtctgaagtattcaaacagttccgcctggtgccgaagcagtttgactacctggtcaacagcatgcgcgtcatgatggaccgcgttcgtacgcaagaacgtctgatcatgaagctctgcgttgagcagtgcaaaatgccgaagaaaaacttcattaccctgtttaccggcaacgaaaccagcgatacctggttcaacgcggcaattgcgatgaacaagccgtggtcggaaaaactgcacgatgtctctgaagaagtgcatcgcgccctgcagaaactgcagcagattgaagaagaaaccggcctgaccatcgagcaggttaaagatatcaaccgtcgtatgtccatcggtgaagcgaaagcccgccgtgcgaagaaagagatggttgaagcgaacttacgtctggttatttctatcgccaagaaatacaccaaccgtggcttgcagttccttgacctgattcaggaaggcaacatcggtctgatgaaagcggttgataaattcgaataccgccgtggttacaagttctccacctacgcaacctggtggatccgtcaggcgatcacccgctctatcgcggatcaggcgcgcaccatccgtattccggtgcatatgattgagaccatcaacaagctcaaccgtatttctcgccagatgctgcaagagatgggccgtgaaccgacgccggaagaactggctgaacgtatgctgatgccggaagacaagatccgcaaagtgctgaagatcgccaaagagccaatctccatggaaacgccgatcggtgatgatgaagattcgcatctgggggatttcatcgaggataccaccctcgagctgccgctggattctgcgaccaccgaaagcctgccgtgcggcaacgcacgacgtgctggctggcctgaccgcgcgtgaagcaaaagttctgcgtatgcgtttcggtatcgatatgaacaccgaccacacgctggaagaagtgggtaaacagttcgacgttacccgcgaacgtatccgtcagatcgaagcgaaggcgctgcgcaaactgcgtcacccgagccgttctgaagtgttgcgtagcttcctggacgattaatcggtaggccggatcaggcgttacgccgcacccggcactagtccctctgcacaaacgccaccttttcggtggcgtttttatcgcccacgcactaccagcgcctggtccagctcgcgatatgcttcaaccagtttctctagtgaaacgcgacttaaaccgctgggatttggcagcacccaaatctgcgtcgaaccaatggtgagcgtttgtttcccccactgtgcaccgcgctggctgaatccctgttcatatgcttgtttgcccagaatcgccaacgcctgcggctgataatcttcaattttttcaatcagcttacgcccacctgcgtgcagctcctgctttgaaacttcattggcttgcaccgttggacggtctaccagtttggtgacgccacaacgataatccagcagatgctgtgcctcctgcggcttcaactgacggtcggtaaacccggcctgatatatcaccttccagaagcgatttgctggatgagcaaagggaaaaccagtcccagcggatgaaagcccagggttgataccgcaaaacacgacccgtaaccctggagccaaaatatcctcaaccatatttactcctttctaacatcaccaggaaaagtataacggattgaaaatacattgtttataaaaacagcaggcgcacggtaatggctggattgcgacacggagttactttataatccgctaccatggccccttagctcagtggttagagcaggcgactcataatcgcttggtcgctggttcaagtccagcaggggccaccagatatagcaaaggctgacgagaaatcgtcagcctttttctttttatatatcagttactttgcgtgccagtaagccgctgcacgtacccgctgtgggtcatactgttccgcttcaaagcggcggcttaaattcttaacgactttaccttcgccggttatccagatgaagtaatcatcggcagggatttgcatctgcgccagacgcgcatctaccgcctgctcatcatgtgccagccattcgatattaaaaccatcaaggtgcgcgagataatcctgacaggcgttatcccgcacgctaaccagcgcactaacttgcggtttaacggcaagtttgctcaacgtttccaggcggcggcgcagtgcgggcattccggattcatcgcagacatacagctgatacgcgtaatcttccggcaccaccagcgaaccgcgcggacctgccaccgtaagtttatcgcccggttgcgcctgcatcgcccagccgctggcgaccccaccgtcgtgaataaagaaatcgatcgccagttcatggcgtagttcgtcatacagcggcgtatagtcacgcgacggtgggcgtggtccttccggccagacgatgccctcttccgttaccgttggcggcacaaagtgagcgtcaggttgaggaaagaagagtttgctgtgatcgtcaaagccgcgcgatgtaaaaccgtccagcgcctcgccgccgaggacaatgcgctgaaaaccggcgctgatgcgctcaacgcgtaacacagtcagttcacggaagcgcagatcattgcgaacgcgctgcgggtagcggggggagttattcattgttatcgccttcgtgatagtaatcagatatatctaaataattttcgtaaatgataatgattgttaatcatgataaatgcaagcgatttgtagaactgatatatctgaagtatgtgaaggcattcagtgccatagcaatgctgcaggatgcggcgtgaacgtcttatccggcctggatgtgaggtgcttccacgtttaaacatcatttttgtacttgcagtaatgctcacatcagatataaattagatatatctaatcaagcaaaaggaggctgatatgagccatcatcacgaagggtgttgtaaacatgaaggccagccacgccatgagggctgctgcaaaggtgagaagtcagaacacgagcactgcggacacggtcaccagcatgaacacggtcaatgctgcggtggtcgccacggtcgcggcggcggtcgtcggcaacgtttctttggtcacggtgaattgcgtctggtgattctggatattctctcgcgcgatgacagccacggttacgaattgattaaagcgattgagaacctaacccaggggaattacaccccaagcccgggcgtcatctacccaacgctggattttctgcaggagcagtcgctgattaccatccgcgaagaggaaggtggtaagaagcagattgcgctgaccgaacaaggcgcgcagtggctggaagaaaaccgcgaacaggtggagatgattgaagaacgcatcaaagcgcgttgcgttggcgcggcgctgcgccagaacccgcaaatgaagcgggcgctggataattttaaagcggtgctggatttacacgtcaaccagagcgatatcagtgatgcacaaataaaaaagatcattgcggtgatcgaccgcgccgcttttgatattacgcaactggattaatcgccgcatccgccagtggcgcggtgcaattgccggatgcgacgcttgacgcgccttatccggcctacacccgctacacaccccgcaggcctgataagatgcgccagcatcgcatcaggcattgtgctccaaccgccggatccggcataccgattaatgcagcaccgtcaccgcgtcttccagtcggctggcgcggtgtttcaccatcgccgacacctgcgcactctcttccaccagctcggcatttttctgggtgatcaggttaagctcatccactgcacgggtcaggctggaaagcccatcggcctgttccagcgttgaatggctaatctgggcgatcaactgggtgacgtttttcacctgtgccacaatatcttccatcgtccgtccggcggcgtgtacctgctgcgaaccggattgcaccttatcagcactggcatcaatcagcttgcgaatatcgttggcagcattagcgctgcggctggctaaatgacgcacttcccctgccaccactgcaaaacctttgccctgttcgccggcacgcgccgcttccaccgccgcattcagggccagaatattggtctgaaacgcaatatcgttaatcagcgaagtaatggtgccaatgcgctgggtactgtcggcgatatcgtccattgtcttgatcaccgtggtcatcgcctccccaccctgcactgccgcattactggcggtgatagaaagtttatcggcagccgacgccgtggcagagttctgtttcaccgacgccgccatttggttcatggtcgccaccgtttgctgaacgttatcaactgtctgctgggtatgttcgttcagttcatcggtgcctttcgccagcgtctcactgccatttctgacactggacacctggcttgagacatcgttaattagccaacggcacatcaggccaagctgccctaccgcgcgtaatgtcagccccagctcatcgctgcgattcaggtgctcaacactattacgctctccggtcgccaccttcagtgcctgacgggcgacattttctatcgggcgcacaatctgccattcaaaacaagcgcttgccaacaataccactaacacacagaggaaatacgtcaccaccggggcagcaacaaaccaaagcatggccgccagcaagataaacatcagggtcatcactccacgcgcccgccagcgaagcggtaatgaaggcagtttacccagccagcctttacgcaccaccaggcctttatgaatacgcttactggtacgtccggcgttcagcgctttgtacagcggctccaccgccgcaatctcttcatccgtcgcccgggtacgaatcgacatatagccactgatttttccctcgcgcaccatcggtaccgcattggcccgcacccaataatggtcaccatttttgcggcgatttttcacgatgccgctccagggctccccttttttcagggtgaaccacatatccgcaaacgccgcttttggcatatccgggtgacgcaccatgttgtgcggctgcccttgtaactcttgcaaggtaaagccgctcacctgcacaaaagtgtcattagcatgagtgatatagctttgcagatcggtagtggacatcagagtggtatcgtccgccagcggggtattttgctgggtgacatacggatgagaagacatgttcgcgtcctgtgcaggttatatggttgttaacttcttgtcagagtttatgtcggccccgctgcggttatctttaaccgattaatttgatttagatcgcaatttgcgattaaagcacaaatctaattctttgatttaaaatactttcactctgttactatacgaaaacgttaattatcttgcccaaaaatcaggcaattattgccctgaaaacgtgcatttgcgcagcaatcatcaaatccatacccgacaaaaaccgtgcaaaataacaacaaatgttaacagatagcattaaatattgcacaaatgataaccgaatttgtgtttatcccgattttcgcgatcgcagccggagtggcgcaatccctgcaatacttaaatcggtatcatgtgatacgcgagcctccggagcatattttgaacaggttaccttcgagcgcatcggctttagcgtgcagcgcccacgccctgaatctcattgagaagcgaacgctggatcatgaggagatgaaagcacttaaccgagaggtgattgaatacttcaaagagcatgtcaatccggggtttttagagtatcgcaaatctgttaccgccggcggggattacggagccgtagagtggcaagcgggaggtttaaatacgcttgtcgacacccagggacaggagtttatcgactgcctgggaggttttggaattttcaacgtggggcaccgtaatccagttgtggtttccgccgtacagaatcaacttgcgaaacaaccgctgcacagccaggagctgctcgatccgttacgggcgatgttggcgaaaacccttgctgcgctaacgcccggtaaactgaaatacagcttcttctgtaatagcggcaccgagtccgttgaagcagcgctgaagctggcgaaagcttaccagtcaccgcgcggcaagtttacttttattgccaccagcggcgcgttccacggtaaatcacttggcgcgctgtcggccacggcgaaatcgaccttccgcaaaccgtttatgccactgctgccgggcttccgtcatgtgccgtttggcaatatcgaagccatgcgcacggctcttaacgagtgcaaaaaaaccggtgatgatgtggctgcggtgatcctcgaaccgattcagggtgaaggtggcgtaattctgccgccgccgggctatctcaccgccgtacgtaagctatgcgatgagttcggcgcactgatgatcctcgatgaagtacaaacgggcatggggcgcacgggcaagatgttcgcctgcgagcatgagaacgtacagccggatatcctctgccttgccaaagcgctcggcggcggcgtgatgccgattggcgcgaccatcgccactgaagaggtgttttcagttctgttcgacaacccattcctgcataccaccacctttggcggcaacccgctggcctgtgcggcggcgctggcgaccatcaatgtgttgctggagcagaacttaccggctcaggctgagcaaaaaggcgatatgttgctggacggtttccgtcaactggcgcgggaatatcccgatctggtacaggaagcgcgtggtaaagggatgttgatggcaattgagtttgttgataacgaaatcggctataactttgccagcgagatgttccgccagcgcgtactggtggccggaacgctcaataacgccaaaacgatccgcattgaaccgccactgacactgaccattgaacaatgtgaactggtgatcaaagcggcgcgtaaggcgctggcggccatgcgagtaagtgtcgaagaagcgtaatatcaaatcggatggcgatacgacgtcgccatccgatctttttatacgacgcgtacgcccgcaggcatcatccgctccggcgttaacaacacgctttcactgccgtcatcggtttccgcacacaacagcatgcattccgacgtttcaccacgcattttcgctttttgcagattgcataagaccaccaccgttttccccatcagctcttcttcgctgtagtacggcaccaggctggtcacggtttgcagtgttttttcccccacatcaacctgtacgatgtacagcttgtcggcgttttcatggcgtttcacttccacaatctttccgacgcgcatttccagacgtgcaaaatcagcgtaagccacggtttccattgtttcctcccttcgggtaaaattttactaaactatagcaaaagtttttctcaatcctgtaggctaaaaatggagaatgcaggcgtgatcacattcgtgagccgctgtgttaccgttacagcgtcaaagaaacgcgctttatttactgaaaacaggtgacccgataagcacttcctctacaatgggggcgcacatcagggaaagtaaaaaaggtaaacatggcaacactaaaagacatcgcaatcgaagctggcgtatccctggcgacagtatccagggtcttaaatgacgatccgacattgaatgtgaaagaagagacgaaacatcgcattctcgagatcgccgaaaagctggagtacaagaccagtagtgcccgtaaactccagacaggtgcagtcaaccaacaccatattctggctatctacagctaccaacaggagctggagatcaacgatccttactatctggcgatccgccacggcattgaaactcagtgcgaaaagctgggcattgagctcaccaactgttatgaacacagcggattaccagacattaaaaacgtcaccggtattttaattgtcggcaaacccacgcccgccctgcgcgccgccgcctgtgcgttgaccgacaatatctgttttatcgactttcacgaacccggcagcggttacgatgcggtggatatcgatctggcacgcatcagtaaagaaatcatcgacttctatatcaaccagggcgttaatcgtattggttttattggcggtgaagatgagcctggcaaggcggatattcgtgaggtcgcctttgcggaatatggccgactgaaacaagtggtacgcgaagaggatatctggcgcggcggtttttccagttcgtcgggttatgaactggcaaaacaaatgctggcgcgggaagactatccgaaggcactgtttgttgcttccgattccattgctatcggcgtactgcgggcaattcatgaacgaggcctgaacatcccacaggatatttcgcttatcagcgttaacgatatccccaccgcgcgatttacctttccgccgctctccaccgtgcgcatccattccgagatgatgggaagtcagggcgttaacctggtgtatgaaaaagcccgcgatggtcgcgcgctgccgctgttagtcttcgttcccagcaaattaaaactgcgcggcacgacccgttaaatcccccttacacactgtccggcaatcgtttttgccggacagtgctgccgtttattttcgtgatccagttaaagtaaatgcatttacctgctaccttttagtaaaaattttactaaactccccagcaattacacaaactaccatcaccatgaatggttccgatttctctctaccgggaggccctatgaatcgctgggaaaacattcagctcacccacgaaaaccgacttgcgccgcgtgcgtactttttttcatatgattctgttgcgcaagcgcgtacctttgcccgcgaaaccagcagcctgtttctgcccttaagcggtcagtggaatttccacttttttgaccatccgctgcaagtaccagaagccttcacctctgagttaatggctgactgggggcatattaccgtccccgccatgtggcaaatggaaggtcacggcaaactgcaatataccgacgaaggttttccgttccccatcgatgtgccgtttgtccccagcgataacccaaccggtgcctatcaacgtattttcaccctcagcgacggctggcagggtaaacagacgctgattaaatttgacggcgtcgaaacctattttgaagtctatgttaacggtcagtatgtgggtttcagcaaggcgagtcgcctgaccgcagagtttgacatcagcgcgatggttaaaaccggcgacaacctgttgtgtgtgcgcgtgatgcagtgggcggactctacctacgtggaagaccaggatatgtggtggtcagcggggatcttccgcgatgtttatctggtcggaaaacacctaacgcatattaacgatttcactgtgcgtaccgactttgacgaagcctattgcgatgccacgctttcctgcgaagtggtgctggaaaatctcgccgcctcccctgtcgtcacgacgctggaatataccctgtttgatggcgaacgcgtggtgcacagcagcgccattgatcatttggcaattgaaaaactgaccagcgccagctttgcttttactgtcgaacagccgcagcaatggtcagcagaatccccttatctttaccatctggtcatgacgctgaaagacgccaacggcaacgttctggaagtggtgccacaacgcgttggcttccgtgatatcaaagtgcgcgacggtctgttctggatcaataaccgttatgtgatgctgcacggcgtcaaccgtcacgacaacgatcatcgcaaaggccgcgccgttggaatggatcgcgtcgagaaagatctccagttgatgaagcagcacaatatcaactccgtgcgtaccgctcactacccgaacgatccgcgtttttacgaactgtgtgatatctacggcttgtttgtgatggcggaaaccgacgtcgaatcgcacggctttgctaatgtcggcgatatcagccgtattaccgacgatccgcagtgggaaaaagtctacgtcgagcgcattgttcgccatattcacgcgcagaaaaaccatccgtcgatcatcatctggtcgctgggcaatgaatccggctatggctgtaacatccgcgcgatgtaccacgcagcgaaggcgctggatgacacgcgactggtgcattacgaagaagatcgcgatgctgaagtggtcgatattatttccaccatgtacacccgcgtgccgctgatgaatgagtttggtgaatacccgcatccgaagccgcgcatcatctgtgaatatgctcatgcgatggggaacggaccaggcgggctgacggagtaccagaacgtcttctataagcacgattgcattcagggacattatgtctgggaatggtgcgaccacgggatccaggcgcaggatgacaacggcaacgtctggtataaattcggcggcgactacggcgactatcccaacaactataacttctgtcttgatggtttgatctattccgatcagacgccgggaccgggcctgaaagagtacaaacaggttatcgcgccggtaaaaatccacgcgctggatctgactcacggcgagctgaaagtcgaaaataaactgtggtttaccacgcttgatgactacaccctgcacgcagaggtgcgcgtcgaaggtgaaacgctcgcgacgcagcagattaaactgcgcgacgttgcgccgaacagcgaagcccccttgcagatcacgctgccgcagctggacgcccgcgaagcgttcctcaacattacggtgaccaaagattcccgcacccgctacagcgaagccgggcattctatcgccacttatcagttcccgctgaaggaaaacaccgcgcaaccagtgcctttcgcaccaaataatgcgcgtccgctgacgctggaagacgatcgtttgagctgcaccgttcgcggctacaacttcgcgatcaccttctcaaaaatgagtggcaaaccgacatcctggcaggtgaatggcgagtcgctgctgacccgcgagccaaagatcaacttcttcaagccaatgatcgacaaccacaagcaggagtacgaagggctgtggcaaccgaatcatttgcagatcatgcaggaacatctgcgcgactttgccgtagaacagagcgatggtgaagtgttgatcatcagccgcacagttattgccccgccggtgtttgacttcgggatgcgctgcacctacatctggcgcatcgctgccgatggccaggttaacgtggcgctttccggcgagcgttacggcgactatccgcacatcattccgtgcatcggtttcaccatggggattaacggcgaatacgatcaggtggcgtattacggtcgtggaccgggcgaaaactacgccgacagccagcaggctaacatcatcgatatctggcgcagcaccgtcgatgccatgttcgagaactatcccttcccgcagaacaacggcaaccgtcagcatgtccgctggacggcactgactaaccgccacggcaacggtctgctggtggttccgcagcgcccaattaacttcagcgcctggcgctatacccaggaaaacatccacgctgcccagcactgtaacgagctgcagcgcagtgatgacatcaccctgaacctcgaccaccagctgcttggcctcggctccaactcctggggcagcgaggtgctggactcctggcgcgtctggttccgtgacttcagctacggctttacgttgctgccggtttctggcggagaagctaccgcgcaaagcctggcgtcgtatgagttcggcgcagggttcttttccacgaatttgcacagcgagaataagcaatgaggatcatcgataacttagaacagttccgccagatttacgcctctggcaagaagtggcaacgctgcgttgaagcgattgaaaatatcgacaacattcagcctggcgtcgcccactccatcggtgactcattgacttaccgcgtggagacagactccgcgaccgatgcgctatttaccgggcatcgacgctattttgaagtgcattactacctgcaagggcagcaaaaaattgaatatgcgccgaaagagacattacaggtagtggaatattatcgtgatgaaactgaccgtgaatatttaaaaggctgcggagaaaccgttgaggtccacgaagggcaaatcgttatttgcgatatccatgaagcgtatcggtttatctgcaataacgcggtcaaaaaagtggttctcaaagtcaccatcgaagatggttatttccataacaaataacaactacggcggcaaaaggagtttgccgccaccgctaccctacacattttcggagatgtgttatgtctgataccaaacgtaatacaatcggcaaattcggcttgctctcgctgacttttgccgccgtttacagctttaacaacgttatcaataataatattgagcttggactggcctcggcaccgatgtttttcctcgcgacgattttttattttattcccttctgtctgatcatcgcagaatttgtttcgttaaataaaaactcagaagccggtgtctacgcgtgggtaaaaagttcgctgggcggacgttgggcatttattactgcctatacctactggttcgtaaacctgttctttttcacctcactgttgccgcgcgttattgcttatgcttcgtatgccttcctcggatacgaatatattatgacgccggttgccaccaccattatcagtatggtgctgttcgccttctacacctgggtttccaccaacggggcgaaaatgttggggccaattacctccgtcacttcaacgctgatgctgctgttaacgctctcctacattttactggcaggtacggcgctggttggcggcgtacagcctgctgaccccatcaccgttgacgcgatgatcccgaacttcaactgggcgttcctcggcgttaccacctggatctttatggccgcaggtggcgcggagtccgtcgctgtgtacgttaacgacgtcaaaggcggttcgaaatcgttcgttaaagtgatcatcctcgccgggatttttatcggcgtactgtattccgtctcctcggtgctgattaacgtcttcgtcagcagcaaagagttgaaatttaccggcggatcggtgcaggtattccacggcatggcggcgtattttggtctaccggaagcgttgatgaatcgctttgtcggtctggtgtcctttaccgcgatgttcggttccctgctgatgtggaccgcaacgccggtgaaaattttcttctccgaaatcccggaaggcatctttggtaagaaaaccgtcgaactgaacgaaaacggcgttccggcgcgcgcagcgtggatccagttcctgatcgtcatcccgctgatgattatcccgatgctcggttccaataccgtgcaggatctgatgaatactattattaatatgaccgccgcagcgtccatgcttccgccgttattcatcatgctggcttacctgaatttacgcgccaaattagatcacctgccacgcgatttccgtatgggctcccgccgcaccggtattatcgttgtttcaatgctgattgcgatatttgccgtagggtttgtcgcttcgacattcccgactggcgcgaatattctgaccatcattttttataacgtcggcggtattgttatcttcctcggctttgcgtggtggaaatacagtaaatatataaagggattaacggctgaagagcgccatattgaagcgacgccagccagcaatgttgattaagcagaataataaaaaatgagcaggcattttccctcttcctggatgaggagagggaaaatagtttctgcctttatatttttataattacaacgataaaaggctgtactttttctttagctcatggattaacacaatgaaattaatcactgcaccatgcagagcattacttgctctgccgttttgctacgccttttctgcggcaggagaagaagcacgtccggcagaacatgacgacacaaaaacacctgcaattacctcgacatcttctccttcatttcgtttttacggcgaattaggggttggtggatatatggatttagagggtgagaataaacataaatacagcgacggtacctatattgaaggtggcctggagatgaagtacggctcctggttcggcctgatttacggcgaaggctggaccgtgcaggccgaccacgacggcaatgcctgggtgccagaccatagctggggtggtttcgagggcggaattaaccgtttctatggcggttatcgtaccaatgatggcaccgaaatcatgctcagtctgcgtcaggattcctcgctggatgacctgcaatggtggggcgacttcacccccgatctgggctacgtcattcccaatacccgcgacattatgaccgcgctgaaggtgcagaacttaagcggcaactttcgttatagcgtcaccgcgactcctgccggacatcatgatgaaagcaaagcctggctacattttggcaaatacgatcgctatgacgacaaatacacctatccggcaatgatgaacggttacatccagtatgaccttgccgaaggcatcacctggatgaacggtctggaaatcaccgacggcacaggacagctctatctcacgggcctgctaactcctaactttgccgctcgcgcctggcaccataccggacgcgccgacgggctggacgtaccgggaagtgaaagtgggatgatggtgagcgccatgtatgaagcgttaaagggcgtttatctctccaccgcttacacctacgccaaacatcgccctgaccacgctgacgatgaaaccacctctttcatgcagtttggtatctggtacgaatacggcggcggacgtttcgccacggcttttgatagccgcttctacatgaaaaatgcctctcacaatcccagcgaccaaatcttcctgatgcaatatttctactggtaataaggactgtaatttcatgaaaataaaaactattttaacgccagtaacctgcgctctgctgataagtttttccgcccatgccgctaacgccgacaattataaaaacgtgattaaccgtactggcgcgccgcagtacatgaaggattacgattacgacgatcaccagcgttttaatccgtttttcgatctcggagcctggcatggtcatctgttgccagacggccctaacaccatgggcggctttccgggcgttgcgctgctgacggaagagtacatcaactttatggccagcaatttcgaccgcctgaccgtctggcaggacggcaagaaagtcgactttacgctggaggcatacagtattcccggtgcgctggtgcaaaaactgacagcaaaagatgtgcaagtcgaaatgactctgcgcttcgccacgccgcgcacgtcactactggaaaccaaaatcaccagcaataaaccgctggatctggtgtgggacggcgaactgctggaaaaactggaagcgaaagaagggaaaccgctttccgataaaaccattgctggcgaataccctgactatcagcgcaaaatcagcgccacccgtgatggcctgaaagtcacctttggcaaagtgcgcgccacctgggatctgctgacctccggcgaatcggaatatcaggtgcataaatccctgccggtgcagactgaaatcaacggtaatcgctttaccagtaaggcgcatatcaacggttcgaccacgctctacaccacctattcccatctgctaaccgctcaggaagttagcaaagagcaaatgcagatccgcgatattctggcgcgtccggcgttttatctcaccgcctcgcagcaacgctgggaagaatacctgaagaaagggttaaccaatccggatgcgacgccggaacagacgcgcgtcgcggtgaaagcgatcgaaacgctcaacggtaactggcgctcaccgggcggtgcggtgaaatttaacaccgttacaccgtcggtgaccgggcgctggttctccggcaatcagacctggccgtgggatacctggaagcaggcgtttgcgatggcgcatttcaatcccgacatcgccaaagagaatatccgcgcggtcttctcctggcagatccagcctggcgatagcgtgcgtccgcaggatgtgggctttgtccccgacctgatagcgtggaaccttagccccgagcgtggtggcgatggcggcaactggaacgaacgtaataccaaacccagccttgccgcctggtcggtgatggaagtgtacaacgtcacccaggataaagcctggttggcagagatgtacccgaaactggtggcctatcacgactggtggttacgtaaccgcgatcacaacggcaacggcgtgccggaatatggcgcgacccgcgacaaagcccacaacactgagagcggcgagatgctgtttacggtgaagaaaggcaacaaagaagagacgcagtctgggctgaacaactacgcccgcgtggtggagaaaggccagtacgacagtctggaaattccggcacaggtcgctgcgtcgtgggaatcggggcgtgatgatgccgccgtctttggttttatcgacaaagaacagttggataaatatgtcgctaatggcggcaaacgtagcgactggacggtgaaattcgccgaaaaccgcagtcaggacggaacgttgctgggctactcgctattgcaggagtcggtggatcaggccagctatatgtacagcgataaccattatctggcggagatggcaaccatcctcggtaagccagaagaggccaaacgctatcgccagttggcacagcagctcgcggactacatcaacacctgtatgttcgacccgactacccagttctactatgacgtacgtattgaagataaaccactggcgaacggctgcgcgggcaaaccgattgttgagcgcggtaaagggccggaaggctggtcgccgctgtttaacggtgcggcaacgcaggccaatgccgacgcggtggtgaaggtgatgctcgatcctaaagagttcaacacctttgtcccgctgggaacggcggcgttaaccaatccggcttttggcgctgatatctactggcgtgggcgcgtatgggtggatcagttctggtttggtctgaaagggatggagcgttacggttatcgcgatgatgccctgaaactggcggatacgttcttccgtcacgccaaaggattaaccgccgatggcccaattcaggagaattacaacccgctgactggcgcacagcaaggcgcaccaaatttctcctggagtgccgcgcatttgtatatgttgtataacgatttttccgtaagcaataatttgcaactgctggcggatgcggcgtaaacgccttatccgccctacatgtgcaatcctcctggccggataaaacgcgacaagcgtcgcatccggcatctgcaccgtgccactggcggatgcggcgtgaacgccttatccgccctacatgtgcaatcccccaggccggataaaacgcggcaagcgtcgcatccggcgttaccaccgggcgtattctttttgaatcccatcacaaaccccgcactccccttttcccttttctccggcggcggctaaattagaactcatccgaccacataacaattattttacatactggacaattttatgagctacccgtcgctgttcgccccgctggatttaggttttaccacgttaaaaaaccgcgtgttgatgggctcaatgcacaccgggctggaggaatacccggacggtgccgagcggctggcagcgttttatgccgaacgcgcccgtcacggcgtggcgctgattgtcagcggcggcattgcaccagatttaacaggcgttggcatggaaggtggcgcaatgctcaacgacgccagccagatcccacaccatcgcaccattaccgaagcggtacatcaggaaggcggcaaaatagccctgcaaattttgcataccgggcgctacagctaccaaccgcatctggtcgctccctccgcattgcaggcccccatcaaccgtttcgttcctcacgaactcacgcatgaagagatcctgcaactgatcgacgatttcgcccactgcgcgcaactggcacgggaggcaggatacgacggtgtagaggtaatggggtccgaagggtatttgatcaacgaatttctgacgctgcgcaccaatcagcgtagtgaccagtggggcggcgattaccgcaaccggatgcgatttgccgtagaagtagtgcgtacggtgcgcgaacgcgtcggcaacgacttcattattatctaccggttgtcgatgctcgacctggtcgaaggcggcggcacttttgccgaaacggtagaactggcgcaggccattgaagcggcgggcgcgaccattatcaacaccggcattggctggcatgaagcacgtattccgaccattgccacgcccgtgccgcgcggcgcatttacttgggtcacgcgcaaactgaaaggccacgtctcgctgccgctggtgaccaccaaccggattaacgatccgcaggttgccgacgacattctctcgcgcggcgatgccgatatggtgtcgatggcacgaccgtttcttgctgatgcggaactgctgtcaaaagcgcaatcggggcgagccgatgagatcaacacctgcattggctgcaatcaggcctgcctcgatcagatcttcgttggcaaagtcacctcgtgcctggtgaatcctcgcgcctgccacgaaaccaaaatgccaatccttcctgccgtgcagaaaaaaaatctggcggtggtcggtgcgggacctgctgggctggcgtttgccattaacgcggcggcgcgtgggcatcaggtaacattgtttgatgcccacagcgagatcggcgggcagtttaatatcgccaaacagatccccggcaaagaggagttttacgaaacgctgcgctattaccaccggatgatcgaagtgacgggcgtgacgctgaaactcaatcacaccgtgacggcggatcagttacaggcgttcgatgaaacgatcctcgccagtgggatcgtgccgcgcgttccgcctatcgacgggatcgatcatccgaaggtattgagttatctcgatgtactgcgcgacaaagcgccggtaggcaacaaggttgccatcatcggttgtggcgggattggttttgatacggcgatgtatttaagtcagccgggcgaatccaccagccagaatatcgccaggttctgtaatgagtgggggatcgacagcagcctacaacaggctggtggcttaagcccgcagggaatgcagatcccgcgtagcccacggcaaattgtgatgctccagcgcaaagccagcaaaccgggacaggggttaggcaaaaccaccggctggatccatcgcaccaccctgctctcgcggggtgtgaaaatgatcccaggcgtaagttatcagaagattgacgatgacgggctgcatgtggtgatcaacggcgaaacgcaggtattagcagtggacaatgtggtgatctgcgcagggcaagagccaaaccgcgcgctggcgcaaccgctgattgatagcgggaaaactgtgcatttaattggcggctgcgatgtggctatggagctggacgcacgacgggcaattgcccagggaacacggctggcgctggagatttaaatcgttatttgaagcgccggatgcaacgcatccggcacgtcgcgttaatcaataaacaaggcgggagaaatgccgaatcgcgttgccaattttttagcgtgttccagcgttaatttcctcttcccgctcaaaacgcgtgacaccatagatttactgccaatttccggcagatcggaaagggttaaaccatattgatccataagggtacgaatcacggctataccgccaggcatggcttgagccatggcattaaattccgcaaattcgggcgctgattcttcccacgcggttattttggcacacaccagatccagcaaggggttttcaggatcgttgagcagcagatgatctaccagttccagcgcctgggtgtattgttcctcgttctgaatacccgccagaaaaggtgccaccgcagttagcttttctcctgcttgcaagatgtcggcaatcgcaatcattttttccccttagtacgatgaacagcggtaaagaaatcgtattctttatgcgtcataacttcacgtatgtagcataaacgttgaacaacgctaaacaagagaatgtagaggatggtgacagggattttttgttttatggaagcgcgattccagaactgggcagacattgccggatgcgacgcttgccgcgtcttatccggcctgggagtaacgtgctgaacgtaggccggataaggcgttaacgccgcatccggcaggtaactcccaatcttaccgacgacgccccagcttcactgttttcagcaccacaaatttattattcgtggcgatggtggtgcagttgccgaaaatcttcttcagtttatggaagtaatccaggtgacggttggcaacgatatacagttcgccgttgattttcaggcagcggcgggcgtggtggaacatctcccaggcgacgttatcggtcagcgcatgttgctgatgaaacggcgggttgcagagcacagcattaaagcggaaaggctccactccggagagcgcgttgttgatcataaactcgcagcgatccaacgcctctggcatgttggtttcaacattcattcggctggaagcgaccgccatcggcgattcatcgacaaacaccactttcgcctgcgggtttttatcaagcagcgtcaggccaataacgccgttaccacagccgagatcgacaatctcaccttcgagattctctggcagatgttgcataaagaagcgtgcgccaatatccagcccggtgcgggagaagacattcgcatggttgtggatagtccagtcagtaccttccagcttccagctaacggtctgcggcgcatcggccagcggcggttcattgaaagtgcaattaatcaggcgcgcttttttccatgccagcgtagtggtggtcgggccgagcactttctcgaacagctccagcgtggaagtgtgaatgtcacgggctttggcaccggcaataatacgtgtatccgacgtgaccactttgcgcagcgcacgcagttgctgttccagcaatgccagtgttttcggcactttgatcagcaccacacccggctgttgcgggtagtcggcggtgctgtcgagaaacttcacgctcgactcatcaatcccgttgaggcgtaaattctcgcgcgtcgccagttcactgatgtatgagtcgccaatgctgtacggcttatgttccgccagcgcgcagcttaacgcaccaaaggcatcattcaggatcaacaccgggccgcggatttctgtgtcgtccaactgttgcagcaaatattcatccgccgcttcccacgcctgtagcgggttaacgtcatccgtcgccggaaaacgttgtagtgtcagtgaacggaaaccgttgtctaagtggctcatcggccctcctgaatgataaaatttcgacgttgcccctgaaaagggtgcgtgagtataccctttttctctttttcgtgggcggttatgaacaatcttacttatcttcagggttatcccgagcagctactttcccaggtgcgaacgctgattaacgaacagcgtctgggcgatgtgctggcaaaacgctatccgggaacacacgactacgccaccgataaagccctctggcaatatactcaggatctgaaaaatcagtttctgcgtaatgccccgccgatcaataaagtgatgtatgacaataagatccatgtgctaaaaaacgcgctcgggttacataccgctgtttctcgtgtgcagggcggcaagctgaaagcaaaagcagagatccgcgtcgctactgtgtttcgcaacgcgccggaaccgtttttacgtatgatcgtggtgcacgaactggcgcacctgaaggagaaagagcataacaaagcgttttaccagttgtgctgccatatggagccgcagtaccaccagcttgagttcgacacccggctgtggctaacgcagttgtctcttgggcaggacaaaatctgaaaatgatgtcaggcgttatcttttctttctttagcgcctaaaatcgacctcccccctttcgttaaggataacgaccatgcagccccgccttcttctccgtatttgtttttctcgccggactcttaagattggctgtttgttgttgcttatagcaggagcgaccatttttattgccgatcgcgttatggtcaacgccagcaagcagctgacctggagcgatgtcaacgcagttccggagcgtaacgtgggcttattgctgggggccaggccgggtaatcgctactttacccgacgtattgataccgcagcagcgttgtaccacgccggaaaagtgaaatggctactggtaagtggcgataacggacgtaaaaattacgatgaagcctcaggtatgcagcaggctttgatcgctaaaggcgtaccggcgaaagtgatcttctgcgactatgccggattctcaacgctggattcggtagtgcgtgccaaaaaggtttttggtgaaaaccatatcaccattatctcgcaagaatttcataaccaacgcgccatctggctggcaaaacagtacagcatcgacgctatcggttttaacgcgcctgacctcaatatgaagcacggtttttatactcaactgcgggagaaactcgctcgtgtcagcgccgtgattgacgccaaaatcctccatcgccagccgaaatatctcgggccatcggtcatgattgggccgtttagtgagcatggctgtccggcaaaagaataatgcgtatctgcgcacgtcgaagatgaaaaaggcgtgctacattgacgacagaatccctttatggagtatccacgcgttatgatacgtttcgctgtgattggtacgaactggatcactcgccagttcgtcgaggccgcccatgagagcggtaaatacaagttaaccgccgtatattcccgcagccttgagcaggctcagcacttcgccaatgattttctgtcgagcatctgtttacctcgctggaagcgatggcggaaagcgatgccattgacgcggtgtatattgccagcccgaatgccctgcacttttcccagacacaacttttccttagccataaaattcatgtgatttgcgagaaaccactggcgtcgaatctggcggaagtggatgccgccattgcctgtgcgcgggaaaatcaggtggtgctgtttgaggcatttaaaaccgcctgcctgccgaactttcatttgctgcgccaggcgctgccgaaagtcggcaaattgcgtaaagtctttttcaactattgccagtattcctcgcgctatcaacgttacctggacggtgaaaatcccaacacctttaatccgtcattctctaacggttcaattatggatatcggcttttactgcctggcgtcggcggtggcgttatttggtgagccgaaaagcgtgcaggcaaccgccagtttgctggcaagcggtgtagatgcccacggcgtggtggtgatggattacggtgatttcagcgtcaccttgcagcactcaaaagtcagtgattctgtcctggcgagcgagattcagggcgaagcaggatcgctggtgattgaaaaactgtctgaatgccagaaagtgtgcttcgtgccgcgtggcagccaaatgcaggatctcacccagccgcagcatattaataccatgctctacgaagcagagctgttcgctaccctggtggatgagcatctggtggatcatccggggctggcggtcagtcgcatcaccgccaaactgctgaccgagatccgccgccagactggggtgatttttccggtagatagcgtaaaactataattgccaaagtaaaacagtgtaaaaggtatgtaacagaccattgactggctgaatggtctgtcatactttgttacctgcaaaggggagtaacttcattgccggtcgatcgtcattacgatgtgtgaaaaaccacatccggtcaccgggcaacccgaaaggaatacgcagacgtattccttttttgttgtaagtgagaccttgccggaaggcgaggtctatgcataaaaagcagcggctgacgtcttccgacgttggccgtttttttatgtgtaaggaacttctatgaatactgtcggcacgccgttgctatggggcggattcgctgttgttgtcgccattatgctggctatcgacctgttgttgcaggggcgtcgtggggcacatgccatgaccatgaaacaggctgcggcctggtcgctggtctgggtgacgctgtcgttactgtttaacgccgctttctggtggtatctggtgcaaaccgaaggtcgcgccgttgccgatccacaggcactggcctttctcacaggttatctgattgagaaatcgctggcggtcgataacgtctttgtctggctgatgttgttcagctatttctctgttccggcggcattacaacgccgcgtgctggtgtatggcgtgctcggggcgattgttctgcgtaccatcatgatcttcactggcagctggctaatttcgcagttcgactggatcctgtatatcttcggtgccttcctgctgtttaccggcgtgaagatggcgctcgcccatgaagatgaatcaggcattggcgacaagccgctggtgcgctggctacgcggtcatttgcgcatgaccgacaccatcgacaacgagcatttctttgtgcgtaagaatggattgctgtacgccacaccgctgatgctggtactgattctggtggaattgagcgacgtgattttcgccgtggatagcattccggctatcttcgccgtgaccactgacccgttcattgtgctgacctcaaacctgtttgcgatcctcggcctgcgtgcgatgtatttcctgctggcgggcgtagcagagcgtttctcgatgctcaaatatggcctggcggtgattctggtgtttatcggtatcaagatgctgattgtcgacttctaccatattccaatcgccgtctcgctgggcgtggtgtttggcattctggtgatgacgtttattatcaacgcctgggtgaattatcggcatgataagcagcggggtggataatttttaatctgcctaagccgtgtaccctgtcattaacatgagcaccgttttctccctctcccttccagggagagggtcggnntgaggntannttttcgcaccgatgctggcctgttcccctcaccctaaccctctccccaaacggggcgaggggactgaccgagtcctttttttgatgttgtcatcagtctggaagccgcacgttggctttatttttatgtcaaataaatgtaaccattaagttgcaaaatatgacctctctttaaaatccagcatttttcgcttcccgaagctgtaactttccttatactcgaccttgcaaacactttgttacatcctgaaagatgcgtcgacagaacgcaccagggatgtgcgacaacacaatgaaaggatcgaaaaatgactacgcaacgttcaccggggctattccggcgtctggctcatggcagcctggtaaaacaaatcctggtcggccttgttctggggattcttctggcatggatctcaaaacccacggcggaagctgttggtctgttaggtactttgttcgtcggcgcactgaaagccgttgcccccatcctggtgttgatgctggtaatggcatctattgctaaccaccagcacgggcagaaaaccaatatccgccctattttgttcctctatctactgggcaccttctctgctgctctggccgcagtagtcttcagctttgccttcccttctaccctgcatttatccagtagcgcgggtgatatttcgccgccgtcaggcattgtcgaagtgatgcgcgggctggtaatgagcatggtttccaaccccatcgacgcgctgctgaaaggtaactacatcgggattctggtgtgggcgatcggcctcggcttcgcactgcgtcacggtaacgagaccaccaaaaacctggttaacgatatgtcgaatgccgttacctttatggtgaaactggtcattcgcttcgcaccgattggtatttttgggctggtttcttctaccctggcaaccaccggtttctccacactgtggggctacgcgcaactgctggtcgtgctggttggctgtatgttactggtggcgctggtggttaacccattgctggtgtggtggaaaattcgtcgtaacccgttcccgctggtgctgctgtgcctgcgcgaaagcggcgtgtatgccttcttcacccgcagctctgcggcgaacattccggtgaatatggcactgtgtgaaaagctgaatctggatcgcgatacctattccgtttctattccgctgggtgccaccatcaatatggcgggcgcagcaatcaccattaccgtgttgacgctggctgcggttaatacgctgggtatcccggtcgatctgcccacggcgctgctgttgagcgtggtggcttctctgtgtgcctgtggcgcatccggcgtggcggggggttctctgctgctgatcccgctggcctgtaatatgttcggtatttcgaacgatatcgccatgcaggtggttgccgtcggctttatcatcggcgtattgcaggactcttgcgaaaccgcgctgaactcttcaactgacgtgctgttcactgcggcagcttgccaggcggaagacgatcgtctggcaaatagcgccctgcgtaattaattgtttaacccctttcgtctacggcgggaggggttttctctactttaaacggatcaattccccttttctgcatccgccagaaacgaatgatattcaggccattcataagcagaaaactaacctcaatcattgtgccgcctatcgaccccgcccagaagttgtgaatcacccagcaacacgttgaaaaccacatcacgcagcgcatggtgagccctttacagcggaacagcgcccaggtactgacaatcgtaccgataaccggcaatagttcgacaggatgatggaacttcgcgaggccaattccgccagtcagcacaataaaaatcgccattacccataagctgcgcgtgcgtaaggtaatcaatgtacgaatggcattaaggatggcactggcaccagcgggataggtgcccagaagaaaaaaatgtacgccaataacggcgctatagaccgaaagctgctttttgaagcgacgttcgtcacgattgaaaaatgttgtgataccaatcagaaaggcgatgacacccacgccctgggccagccaatacgcggtcatgataaatccttatcaggtatggaaaagcaaacggcgcttcacattatgaaacgccgttttttattaacaactcatttcgactttatagcgttacgccgcttttgaagatcgccagttcgcggaagtcgttacgctcgttgcaggtttgtttaccgttggcaaactcaacgatggtgtcgataaattcttccagcaactgcggcatcgctttacccgtggatcagctgacccgcgtcaaagtcgatccagtgttttttcttcgccgccagttcactgttggtagcgattttcaccgtcggtacaaagccgccgtatggcgtgccacgaccagtactgaacagcaccatatggcagcccgcacccgccagggcgctggtcgctacggcatcgttacccggcgcacttaacaagttcagccccggcgttttcagacgctcgccgtaacgcagcacgtcaaccacgacgctggaacccgctttctgggtacagccaagggatttatcttccagcgtggtgataccgcccgctttgttccccggcgatgggttttcatagatcggctggtcatgggcaataaagtactgtttgaagtcgttgaccatggtgaccagtttttcaaacgttgcttcgtcgcggcaatggtccatcagcaactgctctgcgccaaacatctccggcacttcggtcagtacggtagtaccgccgttagcaatcacgtagtcagagaaacgccccagcatcgggttagcagtaataccagaaagaccgtcagaaccaccgcactccagaccaaacttcagttcgctgagtttgcctggctcgcgtttatcgttgcgcatcacgttatacagctgatgcaaatgctcgatcccggcttcgatctcatcatcctgctgttggcagatcatgaaatgaacgcgttcaggatcgatatcgcccaacgtttcacggaatgcggcaacctggttgttttcacagcccagaccaatcaccagcactgcgcccgcgttcgggtggcgcaccatgttttgcagcatggtgcgggtgttgatgtgatcgtcgcccagttgtgagcagccgtaggtgtggctgaagaggaacacgccgtcggtaccttcggcgttgttggtctctttcaggaaacggttctggatttgccgcgcgatgccgttgacacagcccacggttggcaggatccacagctcattacgcaccccgacatcgccgttagcgcgacgatagatctgcacttcacgatctgccgcttgcgcaggcagatcctgaaaatcaggttgatagcgatactgatccagatcgctcagattcgtgcgcgtattgtgggcgtggacgtgttcccccgccgcaatatccgccaatgcataaccaatcggcaggccatatttgatgacgttggccccttttgcgatatccgttaacgcaaatttatgtccacgagcaacatcctggcgcagcgtaacagtctggttatcgacactgacttctgtgccttcagccaaatctgctaaagcgaccgcgacgttatccagcgcatggatcttgatgtattgcatatcaaccccagaccttagttcagttcaatggcgaagtagtcacgcgcattgttaaagcaaatatttttcaccatctcgcccagcaggttgatgtccgccggtgcttcgcccgcttccacccagcgaccgatcatctggcacagaatgcggcggaagtattcgtgacgggtgtatgacaggaagctacggctgtcagtcagcataccgacaaagcggctcagcagaccgagctgcgccagttgggtcatctgacgttccataccgtctttctgatcgttaaaccaccagccggaaccgaactgcattttgcccggcataccttcgccctggaagttaccgatcatggtgcccagcacttcgttatcgcgcgggttcaggcagtagagaatggttttcggcagcaggttttcttcgttctgcttgctcagcagcttagacaactcttccgccatcggacggtcgttgatggagtcaaagcctacatccggccccagcagtttgaactgacgcaggttgttattacgcagcgcgccaatgtggtactgctgtacccagccgcgacgtgcatattcggcaccaaggaacaccagtaccgcagttttgaactgtgccacttcgtgctcgctcaggggttcgccagccagacggcgcgccagaatgctgtccagttccgcttcgttcgcttcagcaaacatcaccacgtccatcgcatggtcagacactttacagccgtgagcggcgaagtgatccagacgtttggtcaaggcagtttgcaggtcagcaaagcggcgaatgtcggtatcggaaacttcgcccagcttcgccatgtagtcgttaaaggtcgcctgttcgatgttgaaggctttgtccggacgccagctcggcagcactttgatggtgaaagagccgtctttggcgatctctgcgtgatgctccagagaatcgatcgggtcatcggtggtgccgaccattttcacgttcatctgctgcatgatgccgcgcgcggagaagttatcctgcgccagcagttcgttacattcgttccagatttcatcggcagttgacggagaaagcaatttgccagtgataccaaacggacgacgcagttcgaggtgcgtccagtggtataacgggttgccgatagtgtgcggaacagtcgccgcccaggcgtcaaatttttcacggtcagacgcatcaccggtacacagacgctcggccacaccgttggtacgcatagcgcgccatttgtagtgatcgcctttcagccagatgtcatacaggtttttaaaacgatagtcttccgcaatctgctgcggcggcaaatggcaatggtaatcgaaaatcggctggtcttttgcgtagtcgtgatacagacggcgggcaaattcggtatctaacaggaaatcttcagtcataaacggagtcattttcgtcttcctctcaacgagtgagctagcttgcttatggtgcgatgctgacaaagttatcacaccaatttccagagtccgaagatattttcgtgagttagatcaataaacgtagttaaaaaaattactctcaaagtggtaaatctctctgcaggccgcgccagtactggcctcgctgtcgtcaggtaatgtccctacaaatattcgcacatttgtgatggctctcaccttttaaagttgtatgacaagttatctttctgccgtcgcaaatcataagtcgacggaatgcaaattgccgattcattcatttgttagatgaatcgggttaaccggtacggaagccgaattagcacgaaactttcatggcaacgttcggggcgtgccggttttttttcggttacccggtcgtaactaacatcttcagcctctggcgggatgatggccgcgcttcctgcggatataacaaaacgatgaggttttacatgcgtaaaattaaagggttacgttggtatatgatcgcactggtgacgcttggcaccgtgcttggttacctgacgcgtaacactgtggcggcagctgcgccaactctgatggaagagttaaacatctccacccaacagtattcctatatcatcgcagcctattctgctgcttatacggtcatgcaaccggtagcaggttatgtactggatgtgctgggtacgaaaatcggttatgcaatgtttgctgtgctgtgggccgtgttctgtggtgcaaccgcgctggcaggtagctggggtggcctggctgttgctcgtggtgcggtcggtgccgcggaagcagcgatgatcccggcgggtctgaaagccagctccgaatggttcccggcgaaagagcgttccatcgcagtaggctactttaacgtaggttcttcgattggtgcgatgattgcgccgccgctggtggtatgggcaatcgtgatgcacagctggcagatggcatttatcatctccggtgcattgagctttatctgggcgatggcatggctgattttctataaacatccgcgcgaccagaagcatctgaccgatgaagaacgcgactatattattaatggtcaggaagcccagcaccaggtgagcacggcgaagaaaatgtccgttggtcagatcctgcgtaaccgtcagttctggggtatcgcactgccgcgtttcctggcagaaccggcctggggtacttttaacgcgtggatcccgctgttcatgtttaaagtttacggctttaacctgaaagagatcgcgatgttcgcctggatgccgatgctgtttgctgacctcggttgtatcctcggtggttacctgccgccgctgttccagcgttggtttggtgtgaacctgatcgtttcccgtaagatggtcgtaacgctgggtgctgtgctgatgattggcccgggtatgatcggtctgttcaccaacccgtatgtcgcaattatgctgctgtgtatcggtggttttgcccaccaggcactgtctggcgcgctgattacgctctcttctgacgtgttcggtcgtaacgaagtggcgacggcgaacggtttaaccgggatgtccgcatggctggcaagtacgctgtttgcgctggttgtcggtgcactggctgacaccatcggcttcagcccgctgttcgcagttctggcagtatttgacctgctgggtgcgctggttatctggaccgtgttgcagaacaaaccggcgattgaggtggcgcaggaaacacataacgatcccgcaccgcaacattaacgtttaacttaagttgtaatgacgaagccgccttatcagacggcttcgtcgtttatatagaaaaaagcgtttgtccggtttgcagggttaattgatggttggcaaggaaggcgtaaagattactgacaatttgcccatgtagtacccggcctgtttatccatcacgctgaatttatcgactgccagagtcaagggtgtcggcacacacatcacggcatagcgaataccgggcagtaccaccggacgcacacgtttcaggttaatgctgttccagaccatattttcattattgcgcacatcaatttgcccaccggtttccgggttgtacattttgacccggtaatcaatgcgttctccctcgtcggtggtggtccctccctgacgatagatagagaagtaaccgtctctgcgccctgcagctggtcgcccttcatctttgagcatgatttcataactgatggcattaccgttaaaaccatcgtacaggcacatgtccaacatggtcagatcttgcgcgtagttgctgccgttaacgcttcctgttggatgcaagtctaactgcacccttggcgtggcgtgggcgaactccgggaagaacacgtcaatatggttggggtcgagcgtattcagggtaatatttgcgaaatagtcctgggccgggctgttcgaatgtaatttaactttccccttccagacgccaccaatcggcaaattcttcatctctgtctgctcaaggtagagcgtaagaaactttgtatcgtatatataataatgttgaccatcttctgtacatgaagatctattagaatccttaagattcgtctgaagccctttgccccccttgcatcctggcggcgcttcatcgctacttacaatggctgttttaaatcctttgagttttatcggccaacgcatcccactgcgttgttcagttaaatagatttgtactgtcgatatatttccattagctgtacaggtttgttggaggtcaggatacgaacattcataccacatatatccattatttcctgccgacgcttcatccttccagaagtaataatccgctctaccagatgccaaatcatacgtaatttcactggtcacgtcaggagctgcctgaacgccagtgagcgtgccaaacaagcccaatatcgccgcaatcaatcgatttctcatggtgcaacctccctttgcgccgtctgaacgtttccacgtaatttaggctgtttcaactgtgcctgaacctgaatcgactccggtaattgtgaataagtcaccacactacaagtaacatctccgctgtaacgaatgctggcgcgtttctttacaacactcagtggacacttaaggaattgctgcccggaaagcagatagagctctttttcgctgccgttaatttcaagtgtaaatccgccatcttcagctaccagtaacatggcgctgttcagccccacaatcgggaattttttcaccgctgccggcagtaataaacgaccgatatagttgtagttaaagctggcagacacttcgcgatagcgcagcttgccaggcaacaacattaattcacgattccctgcaccgttaatgatgtttgttgtcccctgctgattgccctggctactgtcgttaacctcaacaaaaccagactgaaatccaggataagggaacaacacactgtcactttgaccaagctgcaaagttcggctgcctgccacccgcgcttcgagttgcagatcctgactctcttcatcctgttcagagaagcctttcacatccaccagtaccgcacccagcaaatcgtctgtaccactggctcccaaattaacgccatagcgactgacagccagcgtagagctataagtgcccgtaaaggccgaaagatgatcatgattcttacggtcataactatcagatacggtagcgtagacatttccgtattgcccatcccaacgcccgttaaccgcgctgtttatggtatcggtgttcaggcctccgacggttacgccaagttctttatggctgaatgaatcgttataaaaggtatgcgataactgccatgacgtttgatcgccatcctgttcgctataacgataatccgtagacacatttgttgaatggctgttgttattgctatccatcgttggcgtgtcagataacgaaaacgataagtacaagccgttgtcgtcgttatcgccaccgttgtcattacgatggaaaacaccgactgacgtactcaaaatccagtcacgcatcacaaaagcgcgggaagcgctaagttgtacagtttcagagatactttgcgctgttgtctggcgaagatagttattttcaaagctctgctgtttatcccaacgcaaactatcatcagtgttattttgtgtgcgggtataacccagcatcatattccagccgacaaaattctgtgaaaccgtcgcggaaatactttcataacagcttaaggcgttatagctctctctgctgtcggttgtacaagcatcgccgtcagagttggtccgataaaagcccaacgtcggccatcccggattactccagttggcctgttgcatatcacctttgccgccgtcatcgttacggaacacgctggcgctgattgcaagattccccaccccgcctaaatctgccgtccagttattacctaactcgaaagcactcacatcatcggcattcgccagccctgcgtagagctcatattgcggatgtaatggcaggcgtactcctagctgataagctgaactttcatcatcagaaacctgtgatgtagttttacctgcctgtaagaaccattgcgcatttccgtcagtcagaccgccggttttggtaaacggcacaagctcggtgcgggtgagttggttattttcgtagacttttaatgccacgctgtagctgcctggcggaaaggaactggtatcaataaattgcgaaccactattgagataaaacgatcccaaaagttgctcattacgataagcgtcaacacgagaattgcgcgaaagcagaaccattactggggttccttgctggctttgcgcctggtttaaatagctcagtgtcgacccgatacgcatcccatcaattgcaccgagtggcagaaagttaaaggtaaagttcccgccttgtgcattaaatagtgtgcggttgtccatgcgacccgcctgcacataataacgacgtaaaaaatcataacgataatagagatcgctgacgtcagcattactgtcactgacatcatctgcatcataaccgttgaaattccagtgtgcaccaatataactattttctgttattcccagcgcaccgtttccctgaatagacaacgattggtaatcatcctgtgccagaacattgatgtcttgctgatgtataaaagcattaacagtatttttgtctggatttaaatataatgacttcgcatcgaaagctgaattccattgcggattaataaacaacgttgccgaactttcttcatcattatagattatttccagcgtatcggtattcagaaaaccacaccctgagtcagtacgtacataaccgcaagccaattcaccgtggcgagctagcggctgcgataatttttctttcactatatgcgcgattttctgatcgtctacatccagttccagcttgttatatagacttgctggatcaagaaatgttacggtatcaagattaaccattgcataatatttaccgagacttttccctgaaaaataaacctcgatatactcctgctgtccctgagcaataacctcaaaccctgcgggaattttggttaatgtcgcctctgccgggctgagactcgccaaggmwcaaaagagccagtaattttttatccatggcaatcctgaaatccataacaaatactaaaacagttaaaataagggagggctacccctccctttgttacgtgttaattctgttatctggattagatatcctgagacagataaatgcttactacaccacggtagatgcctgtctccagaacacctttggtggtttgagcaaacatcaggtttttagccagagaaccgttagttaacgcatcggaagcaaagattttggttgcggtaaaagtggttgccgcatcagctttaatttcttcaccgccccaggttactgtcagcggaacaatcttgctagcatccagctttgaaccagttgcgccggggaaactaactgcatttttacatctttggtaacgtcgttagaccagattttggtcatcaactggtaagattgcagaccctgccccggcagatattgcatttctactgctttcggcaacgcggtgttatcggtctgtgtcatatccagagcggcatcaacgttggccgttacagtaatatccttttgtactgccaatgcggagcctgcaacagaaaacatcgctgcgaccagaagagattttgcaaatacctttttcattactattccttcgtttattacaatgataattaatggaccgccagttcaaactcgccattatctttggtgatccagttattatatttgacaacgattttgtcgtagccagatatgctttcaagatttctttcctgaccagggaagatgtttttatttacggtctgtatcttacaattttctttgctattatttttacaataagcgatcgttaaaatctttaagcgttgattccctgcattaactaatttttgggcagcatttacttctaacttagcaataggttgctgaggtggaacactaacaacaatcccccaaattaagttaactgttaactgcatagagagatcttttttatctgtggcaacgtcatcaatactgggaaccgcttcaaatttaacgcgataatttttctctttttgctctggttccatcgcaacaaaacgtacggttttgctactaccggctggtaaagcgaatttaggtggcataacaaccagatgatttgcatcaccggatttaatctcaacttcattttcctgaggcgtcgatggattatcgatacggaatactgtcgccttgatgtactgaacttcattacttttagatattacgcgaacgttgccttcaccctgactattaatggaaacagccataggataaacagtcatatttgactgtgccaaaaaaggagcgaacacgaataaaagcggcgtaagccgtgataagagattaattttcgccaccatataaatttgatcttacaatattgtttccaaaaagttggtgtattagagatgtagatttattgtaagtcaatataaaaaagcatttttagttaatattaaatttaaaggctgggaattaacttactgaaatttagtagctttcacaatgacgatacttattttttaggaatttataaatattcacaatattaattcaatacattaattcaatcaccaaatttatatatgaccaatggcatacccatgaataaagtggtatgataacttcgtccgcattccactccgggagacgcatatggaaatcactgaaccacgccgtttgtatcaacaacttgccgctgacctgaaagagcgcatcgaacagggcgtctatctggtaggtgataaactgcctgcagaacgctttattgccgatgaaaagaacgtcagccgtacggtagttcgtgaagccatcatcatgctggaagttgaaggctatgtcgaagtgcgtaaaggttcaggtattcatgtggtttccaaccagccgcgccatcagcaggcagctgacaataatatggaattcgccaattacggtccgtttgagttgcttcaggctcgccagctcatcgaaagtaatattgccgaattcgcggcaactcaggtaacgaaacaggacatcatgaaactgatggccattcaggaacaggcgcgcggcgaacaatgcttccgtgattccgagtgggatttacagttccacattcaggtagccctggcgacgcagaactccgccctggcggccatcgttgaaaaaatgtggacacaacgtagccataacccgtactggaaaaaactgcacgaacacattgattcccgtaccgtcgataactggtgtgatgaccacgatcaaatcctcaaggcgctgattcgcaaagatcctcatgctgctaagctggcaatgtggcagcacctggaaaacaccaagatcatgttattcaacgaaaccagcgacgacttcgagttcaatgccgaccgctatctattcgccgaaaacccggtggtgcatctcgatacggccaccagtggcagtaaatgaaatacctgtccgacaggcgctgcgacgcgcctgtttgtctcgtcggtaagcgaaaagtataaagtgtcagcctgtgtaaatcctctcgccaccctcccctgcattcagcaaaatcagactccacggacatgtaattttgataacgaacaacgttgacctttgttacaattagattcaatttgaatttatgtttttgaatgctttcttatctcacgatttaacagggaatagttcaggctgtgttgatgtatcaaacccgcagaacataccaaaacagcaataacattgcggtagtgtatcttttaaaaccagcgtggcgttaaccgattcaccaggaataatgaatggaacttttgacccaattgctgcaagccctgtgggcgcaggattttgaaaccctggccaatccatcgatgattggcatgttgtattttgtcttgtttgtaattttgttccttgaaaacggcttgcttccagcggcctttttaccgggcgacagtttactggtattggtcggcgtgttgattgcgaaaggcgcgatgggttacccgcaaacgattctgctgctgaccgttgccgccagcctcggctgctgggtcagctatattcaggggcgatggctgggcaatacccgcaccgtacaaaactggctatctcatttacccgcgcattatcatcaacgcgcacaccatctttttcataaacacggtttatcggcgctgttaattggtcgctttattgcgtttgtcagaacactgctgccgacgattgccgggttatcagggctgaataacgcgcgctttcagtttttcaactggatgagcggtctgctgtgggtattgatcctgacaactctgggttacatgctcggcaaaacgccggtatttttaaagtacgaggaccagctgatgtcatgcctgatgctgctcccggtggtgctgctggtgtttggcctggcaggttctctggtcgtgttatggaaaagaaatatggaaatcgggggtaagggatgcaaatacctcgcatgtcgcttcgccagctagcctggtccggcactgttttacttctggtcggcacgctgttgctggcctggtccgcggttcgccagcaagagtctacgctggcgattcatgccgttcatcaaggcacaacgatgccagacggtttttcgatctggcatcaccttgacgctcatggcattcctttcaaaagtatcacccccaaaaacgacactctgttaattacatttgactccagcgaccagagcgccgccgcaaaagcggtcctcgacagaacattgccccatggctacatcattgcgcagcaggacaataacagtcaggctatgcagtggctgacccggttacgggataactctcatcgcttcggataacttcctgttatccgaaacatatcactcactttggtgatttcaccgtaactgtctatgattaatgaggcggtggttaacactaccgcttcgttgtctggacaatcgttcctttgtaataggtccgaatcacaatggaaggttcaagaatgaaataccgcatcgctttagctgtttctctctttgctcttagtgccggtagttatgccactaccctgtgtcaggaaaaggagcaaaatatccttaaggagatcagctatgccgaaaaacaccaaaaccagaatcgtattgacggtctgaataaagccctgagtgaagtccgggccaactgttcagatagccagctgcgtgccgatcatcacaagaaaatcgcaaagcagaaagatgaggtggcggaacgccagcaagatttagccgaggcgaagcaaaaaggcgatgccgataagattgccaaacgcgaacggaaactggcagaagcgcaggaagagctgaaaaagctggaagcgcgcgactactaactcacaatagtcactacttactcacctggagaaaactatgtcgaaagaacacactacggaacatctgcgtgctgagttgaaatccctttccgatacgctggaagaggtgcttagctcatctggcgagaagtcgaaagaagagttgagtaagattcgtagcaaagcggagcaggcactgaaacagagccgttatcgcctgggtgaaaccggtgatgccatcgccaaacaaacccgtgtcgcggcggcgcgtgctgatgagtatgtgcgtgaaaatccgtggaccggcgtgggcattggcgctgcaatcggtgtagtgctcggcgttctgctgtcgcgtcgttaattatggcggacactcatcacgcgcaagggcccggtaaaagcgttctgggcatcgggcagcgaattgtttccatcatggttgaaatggtggaaacacgtctgcggctggcggtggtggagctggaagaggaaaaagctaatctctttcaacttttactgatgctgggcctgacgatgcttttcgctgcatttggtcttatgagcctgatggtgctaattatttgggcggttgatccgcaatatcgcctgaatgcgatgattgccaccaccgtggtgttgctgctactggcactgattggcggtatctggacgttacgtaaatcgcgtaaatccaccttgctgcgccatacacgccatgagctggcaaacgatcggcaactgctcgaggaggagtcccgtgagcagtaaagtcgaacgtgaacgacgtaaggcgcaactgcttagccagatccagcaacaacggctggatctttccgccagtcgtcgtgaatggctggaggcaacaggcgcttacgatcgtcgctggaatatgctgctaagtctgcgctcctgggtgctggttggcagtagcgtgatggcgatctggacgattcgccatcctaatatgctggtccgctgggccagacgcggttttggcgtatggagcgcctggcgtctggttaaaacgaccctcaagcagcaacagcttcgcggttaacttccctctggccggagcaattccggccttatccctcaaattttttgaagatttttgacagttttccttgctaacaatcatcattcaccacgtttatgattctctccatcgacagcaacgacgctaataccgcgcccttgcacaaaaaaacaatcagcagcctgagtggcgcagtggagagtatgatgaaaaaattagaagatgttggtgtactggtagcgcgcattttaatgccgattctgtttattaccgcaggctggggaaaaatcaccgcttactctggtacccaacaatatatggaagcaatgggtgtcccgggttttatgctgccgctggtgattctgcttgagttcggtggtggtctggcaatcctgttcggtttcctgactcgcaccacagccctgtttactgcgggctttacgctgctgacggcatttttatttcacagcaactttgctgaaggcgtcaactcgctgatgttcatgaaaaacctgacaatttctggcggattcctgctgctggcaattaccggtccgggcgcgtatagcatcgaccgcctgctgaataaaaagtggtaagcacgcgctatacttaacgataaaaaacgaggaggaagctcctcgtttttgctattggaggagagaaaaatgggtcaactgattgacggcgtctggcatgacacctggtacgatactaaatctaccggcggtaaatttcaacgttcagcttccgcatttcgtaactggctcactgccgatggcgcacctggccccactggcacaggcggttttatcgcagagaaagatcgttatcatctctatatttcactcgcctgcccgtgggcgcaccgcacgctgatcatgcgcaaactcaaaggactggaaccgtttatttccgtttccgtagtgaacccgctgatgctggaaaacggctggacctttgatgacagttttccgggagcaaccggagatacgctctatcaacatgaatttctgtatcagctttatctccacgccgatccacactacagcggacgagttactgttcccgtgctgtgggacaaaaagaaccacaccatcgtcagcaacgaatcagcagaaatcatccgcatgttcaataccgcgtttgatgcgctgggcgcaaaagcgggtgattactacccaccagccctgcaaacgaaaattgaggaacttaacggctggatttatgacaccgttaacaacggcgtgtataaagctggttttgccaccagccagcaagcctacgacgaggcggtggcgaaagtgtttgaatcgctggcgcgactggagcagattttaggccagcatcgttacctgaccggcaaccagctaaccgaagccgatattcgcctgtggactacgctggtgcgttttgatccagtgtatgtgacccacttcaagtgtgataagcaccgcatcagcgattacctgaatctgtatggcttcctgcgcgatatctaccagatgccggggatcgccgaaactgtcaatttcgatcacatccgtaatcattacttccgcagccataagaccatcaaccctacggggattatttcaattggtccgtggcaggatctcgatgaaccgcatggacgagatgttcgcttcggttaaaaaaaggcaccttacgaggtgcctctgataattagctaagtgcatgttgttcatgtcggatgcggcgtgaacgccttatcaaacctacaaaacatttatattcaatatgttgcaatgaccgcgcaggccagataagcgtagcgcatctggcgattttgcgcttgtcatcagtcttagcgcgccttcacagcactttattaattccttgaacgaatatttactgccatttcattcacgtctattcttaatttgctgctttaaaaacaagtgattgagcaaaattgaggcaaaaatggactggtatctgaaagtactaaaaaattatgtcggtttccggggtcgtgcgcggcgcaaagagtactggatgtttattctggtcaacatcatctttacgttcgtgctggggctgctggataaaatgttaggctggcaacgcgctggtggcgaaggcatcctgacgacaatctacggtattctggtgtttttaccgtggtgggcagttcagttccgccgcctgcacgacaccgaccgctcggcgtggtgggcactgttgttcttaatcccgtttatcggctggcttattatcatcgtctttaactgccaggcgggtacgccaggcgaaaaccgctttggaccagatccgaaactggaaccttaaaacaaatctgctcgccggatgtctgactcatccggcttttatcatcatgttgatggtgatgctrtttac

SEQ ID NO: 201 - DNA, 475662 bp, Escherichia coli
  modified_base (37696)..(37696): a, c, t, g, unknown or other
  modified_base (475651)..(475651): a, c, t, g, unknown or other
  modified_base (475657)..(475658): a, c, t, g, unknown or other
  modified_base (475660)..(475660): a, c, t, g, unknown or other
gacattacccgcccctttttattaataataacaaatattattttccgctaaaaagtttgggaatttcccgcagacaccaggatttcgcttcccccatactgtcacgacgccaggccataataatatcgatctcgctggtcgattccgggctgacgacacgcaaccgcccttccgcaatatctttttcgaccatcggatacggcatcgtcgccacgccaagccccgccagtaatgcctgacgtttatcttcaatcgtgctcaccgttaagcgcggctgtttgtccagcagctgtacggtcaacaccgggcgctcacgagcggtatccgctaccgcaattccacgatatttcacgcgcgtcacttcagataacggttccggctcctgatgaatcgggtgatcaggcgcggcaacgtagacgttcattaacgtatagagcttgcgcgagttgatctccgacgaggaacgaaaatgcatatccggcgcgataacaatatccgcccgcccctgctccagtcgttcccacgcccccgccagcacttcggtgatgattgccagttgggtattggcttttgccgccagtttgtcgattaacgggaaaaaggcaggtgtcggtaccagcgcttcggtcacaatggtgagatgcgtttcccaaccgcgcgcgagggcttccgcatcggtagtcagtttatctgcggcttccagcaaaacgcgccctcgctccagcaacatcctcccgacattggtgaatttggtgcgatggcccgagcggtcaaacagcaccacatccagctcttcttccagtttttgcatggtgtagctaagtgcggaaggcacgcgtcccagctcatccgccgccgccgcaaaactgcccggcgatcgatcgcatccataacccgtagtgcttccagcgttaatgccctttctttggccatttcgttctcattcaggaaatttgaacataccgggcagaatatctggctaacaatgtagcgtccagccccttaccataaaaggaagtaaagagaggtcaagaattatgattactacccgaactgccaggcagtgtggacaagcagactacggatggttgcaggcccggtatactttttcctttggacactacttcgacccgaaattgttaggctatgcctccctgcgtgtgcttaaccaggaagtgctggccccaggtgccgcctttcagccgcgaacctatcccaaagtcgatattttaaatgtgattctggatggagaagcagagtatcgcgacagcgaaggcaatcatgttcaggccagcgccggtgaggcgttgctgctctctacccagccgggtgtcagctacagcgaacacaatctcagcaaagacaaaccgttaacacgaatgcagctttggctggacgcctgcccgcagcgagagaatccgctgattcaaaaactggcgcttaatatgggcaagcagcaattaatcgcctcgccagagggcacagtgggtagcctgcaactgcgccagcaagtgtggctgcaccatatcgtgctcgacaaaggcgaaagtgcgaatttcccgttgcatgggccacgcgcgtatttgcaatcgattcacgggaaatttcatgcgcttacgcatcatgaagagaaagcggcgctaacctgcggtgatggggcgtttattcgtgacgaggctaacattacgctggttgccgattccccactgcgcgctttgctgatagatttgcctgtctagttgtttttacagggagatgatgatgagtaaaaaattggccaaaaagcgccagccggtgaagcccgtggtggcgaaagaacctgctcgcaccgccaaaaattttggctatgaagagatgttgagcgagctggaagctatcgtcgcggatgctgaaacgcgtttagtcgaggatgaagctaccgcgtaaagacaagttgccggatgcggcgaaaacgccttatccggcacaatacccaaaacctggcgtttatctggccttgctcgccataatctcgataatctgccgatccgtttgctgcatcgaatggcttgctaacgcacacaggttggcaatcgactgctcaacatcatgcgccacgatcccttcattgccggtcacggcggtatcatccagcgccattaacaccgctttccacgcagccgaagcactggtcgaaaccttcatcgcgcagctgttcgacgcaccatcgcaaatcatgccgctgacatcgccgatcatactgctgatcgccatcgagatggtttcataacgcccatccaccagccatgccatcccggcggcggcccccattgctgcggtcgttgcggcacaaagtgcagacaaacgcggtaactggttatggatgtaaattgcgctcaaatgagaaagcatcagcgcacgcgccagccgttcatcatccgctccgaagtgttctgctaccaccaccacaggcattgttgcggtgatcccctggttacccgagccggagttactcatagccggaagcgtagcgccgcccatacgcgcatcggatgccgcgctggtacgaatcacaatggatgaagagagatctttcgccagcaaaccgcgctcgcactgtttttccagcgtcgcgccaatatgcagcccccacttaccgctcaaaccttcctgcgataacgcacaatttagcttcgcggaatcgagaataaagcggatcgccgcaaacgggacttcattgacgaacttcaggatctcagccagcgtcgttctggaaagcaccgtcagcggagactcttgctcgccctctgccacacacgcctgctgggtaaacaccacaccattgtgcgtctcaatatgcacaatgttggtatgcccgccgacgatggtgacacacgcccacttctcaccgtgccagactttggcgcgtgagaagaggatttcattgcaaggttcctggatcttaacggagactttccccgccgccagcagtgctttggcatcggcaattgcctgcgcagttgcgtctttcagcacttccagcccggcgttggcatttccacctaacgcccccagcgccgccgcaatcggcagccccaccattcccgtgccgggaacggtgacgcccagaccgttcttcatcagatttggcgaaacccaggcttctacacgttcaaccggaccttccagttctgccgcagcaaccgccgccgccagcgccagtgaaatcggttcagtacatcccagcgccggttttacttcctcctgaactgcaaggatgtaacgctgccataacggatttaaagtcgaatcaaacatattaaaaaccttaaaatttcaggttaatcaagaaaatgccaggaacggagaaacacaaagcaacaaaccagtgacgataatcaggtacagagacatccctttgtatttgtgcaatgccggtactttgtaaaccagccacgccgggatcaggcaccctaccatgccgaaaatcgggctacagatagaggtgaagctcaacaccggtgcgttcagtacgatggcgctccaggccagcaaaatggcgaaaatcatgatgccgcgctgaacgagattttcgttaatcttctcggcaggcatcttgcgacgcaggatgttcattacgatcccttgcgttgcttcgcgaaagcctaaatagacgccaaagaatgcagtcatgacagcaaagatattgagaatgacgctgaccactttcacccacgctgcgccgtcaccgctaataaactgtgcggcaatcgccagcgcggaaatattctgctcataggcttttaccgcttcgtcatgtcccatcgccagcgtgaacgacacggcgtagaaaaagacggtgacaaacaaaatgccaaacgcgatattcattgcccgcaatgctttatgccgcgccacttcaattgatttttcccgcgagcgataagagatcaccatcgggcttaacgtctggataaacagaatcgacgtcagggtaaacggcagcgtaataatggcgtttttcaccagcagccccagcggcggtagcgaaccgacgttatacagatgccacattcccaccatcgacacgcccagcgccgcgaccaccagcagcttggtcagcaccatgccggtcgaaattttgaataacaatttctcgccgcgtgaagagatcgccaccagaatgcaaatcagtaccagaccataaaagggactgtctgacagcaacccttccgtcacgccgaaggtatgcagataggaagcactatcgttggtgatggcggtggaatagacgaacatccaaatcaccagcattacgaaatagagcgcacctaacaggatgccccagtttttacctaaataaccgctaatgacactcgggtaatctttacattctggtgattctgccagcgtattaataaacaaccgctgaaacagatacattgccgggtaaccaatcaccgatgagagcaaaaatacccacaatcccatcaaaccgacctgcaccgggagaaaaacaatccccgcgccaatcgccatcccgatactcataatcacccagccggtgtcagtactgtcgaatttgatcgcttctcgccactcgctctcactcattccagcacgacccgccggggtcgaagcgtctgcaatgacgcctttattcgatgcaatttccataatttctcgctcaatattttgtagggcttattatttttttccgagccgcatcaaggcgatatgcggtctacgtttttgcaggcgagttattagaataaagaaatgatacgcgcgaggtcagagaaaatcttcacaatcaagactttgaaataacggagatggataagaattttctactaaattaatcgcaagagaatattcattctctatttgcggcagatcacaaaaaaaaggtgcacatttgtgcacccaaggatgaaagctgacagcaatgtcagccgcagaccactttaatggccagtcctccgcgtgatgtttcgcggtatttatcgttcatatctttgccggtttcatacatcgtctcgatcactttatcgagtgaaacacgcggtgccgaggtgcggcgcatcgccatccgcgcggcgtttactgctttcacggcattaatggcattacgttcaatgcacgggatttgtacctgtccggcaaccggatcgcaggtcagcccaaggttatgctccatcgcgatttccgccgcattgcatacctgcgccggactgccgcccagtagttcagttaaccctgccgccgccattgaacaggccacgccaatctccccctgacagccgacctccgcgccagagatggaggcgttcattttatacagcgcgccaatagcccccgctgccagaaaatagcgggcaattgaccgctcgtttaccggacgacggaacttatcgtaataagccagcactgccggaataatgccgcacgcaccgttagtcggtgccgttaccacgcgcccgccagctgcgttttcttcactaaccgccagcgcgtacatgttgatccagtcgatgacattcatcggatcgttagagatgttatcgctagaaaccagctgacgacgcagcgctacggcacgacgcggcacattgagcggaccaggcagcacgccttcagtgttcatcccgcgttcaataccgtcatgcatcacttgccagatacgggcaaaccctgcgtcaatttccgctttactgcgcagcgctagctcgttgtgcatcatcaggccagatatagacaggccgttgtaatcacacattttcagcagttcacctgctgagtggaaatcgtaaggtacggacgtttcgacatcgtgcgacaggccgaagtgttcttcttcgacaataaacccgccgccgacagagtaataggttttacttaatagcgcttcctgtcccttccaggcagtgatccgcattccgttctcatggcgaggcaacatttcgggatggaagataatgttctttgctacaggaaaatcaacaatatgcgcaccagatgccactggcagccgcccgctgcgcgttactaactctataaatgcagggatctcatcaatgacaacatcctgcggactgtttcctgccagtcccatgataatggcgacatccgtggcatggcctttgcccgtcagtgacaacgacccatacagatcgaccacaatatggctcgtcgcggttaataagccgctactttccagccgatcaataaaactttttccggcattcattggccccacggtatgcgaactggagggaccaatcccaattttgaaaatatcgaatgcactaatcatatccacaccctcggattgccgttcagtgaagtggagcggaacgaccttgcgaccgtcccgctcacgaggctttacgcactacgtactgcgatagcttcaatttccagcttcacatctttcggcaaacgcgcaacctgcacacagctccgggtcgggtaggtcgcctgatgctcatcgaagaactgcttatagacttcattgatggtggcaaaatcattcagatcggtgatgaacacggtcatcttgatgatatcgcccacgctcagcccggcagcaaccacgatcgctttgacgttttcgaggcttaaacgcgcctgatcttgcacatcagccgggatctcaccggtctgcgggcaaaccggaatttgcccggaggtgaagaccatgctgcctaaatcaacgccctgaacataagggccgattgcgcctggggcacgttgcgtttcgataatctttttcatacatcctccggcgtcagagcgcctgggtaaaagtacgtgaaataacatcctgttgctgttcacgggtcagtgcgttgaagcgcacggcgtagccagagacacggattgtcaggttaggatatttttccgggtgctcgatggcatccagcagcatttcccgattcattacgttgacgttgaggtgttgaccgccttcgacatccgcttcgtggtggaaatacccatccagcaggccgacaaggttggttttacgtactggatcttctttgcccagcgccgcaggaacgattgagaaggtgtacgagatcccatctttggcgtaggtgaacggcagtttcgccaccgacgtcaatgaggccacggcacctttgcggtcacgaccatgcatcgggttagcgcccggcgcgaacggtgttccggcgcgacgaccgtccggcgtattaccggttttctggccgtacaccacgttagaagtgatagtcagaatcgactgggtagggacggcgttgcgataggttggcagcgctttaattttcttcataaagcgttcaaccaggtcgcaggcaatgctgtctacgcgctcgtcgttgttgccgtactgcggatattcaccgtcgatttcaaagtccaccgccaggccgttttcgtcacggattggtttcacgcgggcatatttgatggcagacagggagtccgtcgccaccgacaggcccgcgatgccgcatgccatagtgcgatagacatcacgatcgtgcagcgccatcagcgaagcttcgtagctgtacttgtcgtgcatgtagtgaatgatattcagcgcgctgatgtactgcaccgccagccagtccatgaagtgatcgaggctgtccatcactttgtcgtaatccagcacgtcgtccatcagcggtgctgttttcggcccgacctgaatcttcagcttctcgtccaccccgccgttaattgcgtagagcagcgttttcgccaggttagcgcgtgcaccaaagaactgcatttgcttaccaatcaccattgggctgacgcagcaggcaatcgcgtaatcgtcgctgttgaagtcagtacgcatcagatcgtcattttcatactgcaaggaagaggtgacgatcgacacctgcgcggcatattttttgaaggcaatcggtaattcttccgaccaaagaatggtcaggttaggttccggtgccggccccatagtgtgcagggtgtgcaaatagcggaaggagtttttggtcaccagcgtacgaccgtccagccccatcccgccgatcacttccgtcgcccagattgggtcgccggagaacagcgaatcaaattccggtgtacgcaggaagcgtaccatacggatcttcatgatgaagtgatcgatcagttcctgtgcctgctgctcattgagtacgccagctttaaagtcgcgctcaatgtagatatcgaggaacgatgccgtgcggcccagcgacatcgcgccgccattttgcgatttcactgccgccagataagcgaagtagagccactgcaccgcttcctgcgcattctgcgccgggcgagagatatcaaagccatatttcgccgccatttcctgaatctgcaacagcgcatgacgatgctctgccagctcctcacgcagacggatggtggcttccagatcctcgcctttttccagacgagactggagatcggcaaattgcagttcgcgttcacgtaccagataactgatgccatacagcgctacgcggcgatagtcaccgataatgcgcccacggccatagccatctggtaaaccggtcagcacgccagatttacggcagcgcagcatatccggtgagtaaacatcaaatacgccctggttatgggttttacgcagatcggtaaacagatattcaaattcactgtccatttctcggccataggcgtggaatgaacttttaatcatattaatgccaccgaacgggtgtagcgcacgtttcaacggcgcatccgtttgcaggccaacaattttttccagcggctggttaatatatcccgcatcatgagcggtaattgtggtggcaatattggtatcgaaatcaaccggcgcgtgggttgcgttttcgatacggataccttccattactttttcccacaattccgtggtggcaggcgtcgcttcggcgaggaaagattcatcgccttcatacggtgtatagttatgttgaataaaatcgcggacattaatttcgtttttccagtccgtacctttaaagccaagccatgcgtcggcgtacagcttatcgctggtatcaatatctaccttcatgaaaaataatctctctacaatacttcaactaaattatgcaaattctgcgggcgcgttaactttgcctaaatgaatggcatccaaagcaatcattttttcttcgttagtcggaataacggcacaaatgacacgcgcattttcactggaaacaattcgctctccaaaagagttagatcgattattcatttctgtatcaatcactacgcctaatacagccaaatgttccatgaccagacgacgaattaaacttgaattctctcctattccgccggtgaatataattccatccaggcgacgtaatgaagctgcgtgtccggcaatatgacgggcaattcggtgaacaaaggttttaattgccagttgcgcgcgttcgtgaccttcatgccaggctttttccagaacacgtaaatccgaagaaagaccggaaatacctaataatcccgactctttattcactacgcgttccaggtcacccagactctggttggtttggctggcgacccaggacatcgcaccaaagtcgacatcgccactgcgggtacccatcatcaagccttccagcggcgtcattcccattgaagtatcaacactctgaccgttgcgaaccgcgcagattgacgcgccattgccaagatgcgccacaaccaggccggagtcatcttccgccagattcagcagcgaatgtgcgcgctgggaaacatagcggtgcgacgtgccgtggaaaccataacggcgtacacctaactcttcataatatttccacggcaggccgtataaataagcttccggagccatcgtctggtggaaactggtatcaaataccgccacctgagttacgcccggaaataattgctgcgccgattcaataccacttaaattggcgtaattatgcaggggtgccagtggagaaacgcgacggatattatcaatgacttcatcggtaataatggcggactcggtaaaaatactgccgccgtgagcgatgcggtggccaattaaggccacactgtcatttaaattccgtttttccagttcaaatgcaattgccttcaatgcaccttcgtagctgtggtgagccagcggtgctggctctcccccatttacggataagaatgcattttccgagttaataccgtcggcaatacctgacattaatacttcacagtcgctggcatcgagtacggaaaacttaatcgaagacgaaccacagttaataaccaaaacaaccggaaattcattcatctcttttctcatcctgagttacggattaaaacagtttgtatacgatgttcaggatggtcagcagaccaatcacggtaacaaacacgttatccagacgaccacggtatttcgccagagacggcgctttacggatggcatacatcggcaacaggcacagcagggatgcgataatcggtgcgcccatggcttcaataaggtcgaggatgttcgggttggcgtaggcaacaacccaggtggagcccatgatgaagatcatgctgatagtgttcagtttacccagcgacactttagttttgtcgcctttataaccgaacttcagaatcagaccattcaagccttccagcgtccccagatagtgaccgaagaaagatttgaagatagccacgagtgcgatgatggaagccgcatattccagtgtaatcgcgaacgttgttttggtaccggtcatggacgcaaagtggttagccagataagaaagcactggaatattctgcgctttggcttccgccatgttggccggagacagcgtaaacaggcagctaaaggcaaagaacatcaccactgcaaccatcagcatgctggcacgagaaatgatttgggaacatttacgttcggtgaagtcgcgaccgaagtctttctcatactcttcacgtttagaaaccacgaaggaagagacgattggcgagaagttaaaggagaaaaccatgatggaaatccccagccagacagtgatcaggataccgtcatgaccggttaacgacagcgaaccgaggtcaacctggtcgataactgcagagttccagtaagggatcagcgacagagaaatcagcaccaggctggcgataaacggccataccaggtagctcatcactttaaccatcagatccttaccaaaccagatgacgaaagccatcagcagcaacaggaacagcgccacaaagccgcgattcagcggtgcaaatccgagctggttttcccagaacgtcataaaggtattggtaatagtaacgccataaatccacagcagtgggcaaatcgcgaagaagtacaggaacgtgataaccacgccgccagttttaccaaaatgctcttccaccgtttccgtaatgttgccggaagggttagagccagaaagacacagacgcgccagcgcccggtggcaataaaatgcgatggggtatgccaataccaacatcagaagaatcgggatcagtccgccaaaacctgcgcggatagggaagaacagcaccccggcgccgattgccgtaccaaacaagcctaacgtccatgtggtatctgatttacgccaggacgattgttttgtctggctggatacaatgctatctgaagtactcatatcctatcctcaacgaattaattaagcgtcaacgaaaccggtgatttgagagacgcgagaaagatcgatattgccgccggaaataatactgacggtttttctgttttgaatatattggtctaatttaccgcttaataatgcagcacatgccagagcgcctgcgccttcggtgacgactttattgcgctgaattaaggcaatcatactgtttctgatttcgtcttcgctgaccagcacgatgtcatcgactaattcacgaacgatttcgtaagttaaattacccgggcgggagacatcacaaccatccgccagggtgccggtagttcggtgcgtggttatttctccggagtggaaagaagccgccatgccgtgaacgttttcagactgtacgccaataacacgaatggtcgggttaatagatttaattgccaccgcaataccagcaattaaaccgccaccaccaattggcacaatcacgttatcgacatcatagagatcttccataatttccagaccaatcgttccctggccagcaatcactttcggatcatcgtaaggtgggataaaaatacggccttccatttcgacaatttcgctcactttagcgatagtgtcgttgaaattatcaccatgcagaacgacttctgcggagtagtcgcacgttgccgctactttggattttggcgcaccttttggcatcaccactttaccgtcgatacccagcatcgcgcaggagagcgagaccccttgcgcatggttgcccgcagaacaggccactacacctttacgtttttccgcatcagtcagtgaacttaatttattaaatgcgccacgaattttaaatgaacccgtacgctgcatattttcaaacttcaggaatatttcacctttgcaacgttcactaaaatagttggagcgaggcatgcctgttttataaattcgcccagccagtcgttgtttcgcttcaataatgtcatcaatagcaaccggcagatcgtatgtaatatgcattataaaacctcttcgcctgaattaaatatgtaggtaaccgtaaccgacacctgcaagacagacaggtggattatttatgtttaaataaaaacaaataactaaccaacttctattaattgccttcgtctacacccattataagatgaatactctttggctaattccaccaaaaccgatgctgcttttttaatacgataatttttcgaccataccgcggcatattgtgccacaggtaatgtttcttcaaccggaatagtaataaattgattagaaccaaaaggtgacgtcatatcacaaggaatgacagttaagaaatcagcattgagaacaagattataaattgtcacgactgagtcggttttaacgatgttttcaatactgatgccatttctttgtaacgtagtaagaagctcgctgtagtaccccatattagtttgtggcaacacccactgttcgttcttcaacgactccagcgtggtggtgccggtgcatgttcgggacttactggctaccagcacaaactcggactcgaacagcggctcaacatgtaaatcctgaagcttcatttctgcacttaacgtaccaatcgcaaaatccagtcgaccgtcgcggattgccggtaagaacgaagacagttgcgcttcatacatagaaacctgcgctttcgggaacacctctttgaacttgttgatcatccctgacataaaagtaaaaccaatcaatgaaggaaaaccaaatgagacttccaccaccgcctcagaagacataccgcttatctcattaaccatattttcatttcacgggtaatggattcggaacgggagagtaacaattgaccggcaggtgttaatgttacaccggtatttttccgcaccactaattccacaccaaaataatcttcaatatcgttaatgattttactgacggccggttgagttaaccctaattcttttgcagccgagccgatagagccacttctaatgacttcctgaaagactaccaggtgctgcgttttcggaagaagaatagtgctcataacgacctacgttaattacctcattgacggcatgaagtgtatcaaaatgaaatgaacaggatatgtgcgaccactcacaaattaactttcaatactttccatggtatcgttacgcaaattaaatacctttaaatatcaacaagttaaagtataaaaatcagcataaaccctgatttttgtcaaaaaaatgacggggataaccatattttatggcgataacatcattcgttatgtggttaatataaaaaaggggctgagaccatatttcaagcaattaccggataattaccaggcaaaatttgagttaaatttaatgagcaagttctcaaattttattataaataaaccattttcagcgataaatactgcggcacgtcacattttttcacgctatttgttggagaacaaacatttattttatcaatattttaaaatttcgaatacaggtattgatcatctcgaacaattgattaacgtcaactttttctcttctgacaggacgtcattttgtgaatgcaatcgttttccataaattcttctcccctcataggcgacgaatagcattttgtgttgaggatcacaaaacgaataattgctggtcgccgcgataaggtcagacaaagacaacaagggaaattttcacagagcttttgatcgtcgtaggccacagaatgttgcttcgtttactgtaacgccgggtaaatgagcgttttttgatagtgcgaaagaaccctgcgaggaaaataagcatctattattgtttgtcatgacgacaaggcaggcatcaatgaaaggcttcccaattgcacatatttttcacccttcaatcccgccaatgcacgcagtggttaacaatcacaatagaaatattgattattggacggtaaaaagaaagtttgcagaaattgtctccaccaatgacgttaataaaatttacagtataagtaatgaactgcggagagtattatctgcaattactgcattgaatttctatcaaggcgatgttccttctgtcatgatccgaatccaaccggaaaatatgagtccattcatcatagatatttctacaggagaacatgacgattatatcatacaaacattagatgtaggcacttttgcaccttttggtgaacaatgtacttgctcagccgtcaataaaaaagagctggaatgtattaaggagacgatttctaagtattgtgcaaaattcacccgaaaagaagccatcttaacacctcctgcgcactttaataaaaccagcattacttcagattgttggcaaattctctttttttcacccgatcattttaataatgatttttattgattatttataaaggataaaataatgttccctgtttcatcaattggtaatgatattagtagtgatttagtccgtcgaaaaatgaatgatcttcctgaaagccccatagttaataacctcgaagcactagcaccaggtatagaaaaactaaaacagacctctattcaaatggtcactttacttaacgcgttacaaccaggtggaaaatgcattatcactggtgattttcaaaaagaattagcgtacttacaaaatgtaattctttataatgattcgtctcttcgtatggatttttttggttataacgccctaattattcaacgatcagacaatacctgtgaacttacaattaatgaaccgttaaaaaaccaggaaatatccacaggcaatatcaatgttaatttcccattgaaagacatttacaatgaaatcaggaggttgaacgtagtttttagttgtgggactggaggtatagttgatctatcctctctggacttacggaatatctatttagaactttatgattttacagataaacatatggccaatgcaattttaaatccttttaaattggatgacacagattttactaatgccaacatgtttcaggtaaatttcgttagttcaaaacaaaacaccacaatctcctgggattatttactaaaaataacgcctgttctaacaagcattagcgatatgtattctgaagaaaaaattaagcttgtcgaaagttgtttaaatgagcttggagatattaccgaagaacaattaaaaatcatgagatttgcaattatagaatctataccaagagcaactctaacagatcaattagaaaatgaattaacaaaagaaatatataaaaactcatcgaaaattaacaattacttgaacagaattaaattaccagagatgaaaggattctcatcagaaaaaatagattattacatcgatataatcattaaagattatgaaagcgtcaaagaaaatgcttatcttatcgatccaaaaattaattacaatacagatttaaacatagaggattctagctcagaggaattcctttcagataatacactcgagaaagacgaaaattctcctgacaattgctttgaggttgtaaaatataacacatatgaagcatataactcagagaatctatattttaccagagaggaatatacgtatgattacgaccttttaaatgcaatatagacttaataacttcttacaaaatctataattaataccgtagatattcattcatcttaccctgtgcaccaaaagcaaaaactcactgacgcgggtttgaaactgatggcaaccgcaaaaatgcctgatgcgctacgcttatcaggccttgtattatccctccagtgcagagaaaatcggccagttttctctgcctgcagtccgcatgccgtatcgggccttgggttctaacctgttgcgtagatttatgcagcggactgcctttctcccaaagtgataaaccggacagtatcatggaccggttttcccggtaatccgtatttgcaaggttggtttcactatggaacatgaacttcattatatcggtatcgacaccgctaaagagaaactggatgtcgatgtgttgcgtcctgatggtcgtcatcgcaccaaaaattcgctaacaccactaaagggcacgatgagctggtgagctggctgaaaggtcacaagattgaccatgcgcatatctgcatcgaagcgaccggcacctatatggaacctgtcgctgagtgcctttacgatgctggctacatagtgtcagtcattaatcctgcgctgggtaaagctttcgctcagagtgaaggactgcgtaacaagactgataccgtggatgcgcgcatgctggcagagttctgtcgtcagaagcgccctgcagcctgggaagcgcctcacccgcttgaacgcgcgttgcgtgccctggtagtccgccaccaggcgctgacagatatgcacacgcaggaactgaatcgcactgaaacggcgcgggaagtccagagaccgagcattgatgctcaccttctgtggcttgaagcagagctgaagcgtcttgagaagcagataaaagacctgacagacgatgatccggatatgaaacaccgcaggaaactgctggaaagcatcccgggtatcggagagaaaacatctgcggtattgctggcttatatcggtctgaaggaccgcttcgcccatgccagacagttcgccgcttttgcgggtctgacaccacggcgttatgaatcaggtagcagtgtgagaggggcgagccggatgagtaaggccggacatgtgtcgcttcgcagggcgttgtatatgcccgcaatggtagccaccagtaagactgagtggggacgggcgttccgcgaccgtctggcggctaatggcaagaaaggaaaggtgattctcggcgcgatgatgcgcaagctggcacaggtggcgtatggagtgctgaagtcaggcgtgccgttcgatgcgtcacggcataatccggtagcggcgtaaaaatcgcggaagggatgaaaaaaacagcgcctgacggcgctgtgtctggcatgcctgcaatccgggaaaccggaccaggaaaaaacttgcaggccataacagtatctacgccatctctgcaatatattgaatttgcgtgcttttgtaggcaggataaggcgttcacgccgcatccggcatgaataaagcgcactcaacaatctgaaacccgccggaacggtttattacgtacatcaggtgaaactgaccgataagccgctttcttttgggtatagcgtcgtggacagtcattcatctttctgcccctccaaaagcaaaaacccgccgaagcggttttttacgtaaaccaggtgaaactgaccgataagccgctttcttttgggtatagcgtcgtggacagtcattcatctttctgcccctccaaaagcaaaaacccgccgaagcggttttttacgtaaaccaggtgaaactgaccgataagccgctttcttttgggtatagcgtcgtggacagtcattcatctttccgctcctccaaaagcaaaaacccgccgaagcgggtttttacgtaaaccaggtgaaactgaccgataagccgctttcttttgggtatagcgtcgtggacagtcattcatctttccgctcctccaaaagcaaaaacccgccgaagcgggtttttacgtaaatcaggtgaaactgaccgataagccgggttctgtcgtggacagtcattcatctaggccagcaatcgctcactggctcaagcagcctacccgggttcagtacgggccgtaccttatgaacccctatttggccttgctccgggtggagtttaccgtgccacggactgttaccagccgcgcggtgcgctcttaccgcaccctttcacccttacctgatcccgcttgcgcgggccatcggcggtttgctctctgttgcactggtcgtgggtttcccccccaggcgttacctggcaccctgccctatggagcccggactttcctcccctccgcccgtctcccccgaagaggacgacgacgaagcggcgactgtctggtcagcttcggcgcgcagtatagagggtttgcgcgcccttgtcaccccgcgttgcgcattccaatcgccagtgtcgcggcgatattacgtgaagcacggcagatattgtcataagccccgcggaatgcttcgtccaacgtacctatgctggtcaatacgctgaagaccgcatcgatgccatgctgatgtacaacgccaacatcatcggtcaggctacccgcaatgccaatcaccggtttatggtacttcttcgccacgtttgcaacgccaatcggtaccttgccgtgaatactctggctgtcaatacgcccttcaccggtgatcaccagcgtacaatcgtgaatatgttcctccagattcagcgccgtagtgacgatttcaataccacttttcagttccgcaccaagaaacgccatcagcgccgcacccataccgcccgcagctcctgcgccggggacatctttcacatcaacatgcagcgcttttttaatgacatcggcatagtgagagaggttattgtccagctcaacaatcatcgcttcactggctcccttttgtgggccaaagatgcgcgatgcgccgttatcgcccaccagcggattggtgacatcacaagcgacgcgaatgacgcaatcttttaagcgcggatcgaggccggaaatatcaatatcattcagagtattaagactaccgccgccaaaaccaatttcattgccgttggcgtcgcataatttcgcccccagcgcctgtaccatgcctgcgccgccatcatttgtagcgctaccgccaatgccgataataatgtttgtcgcgccgctctccagcgcctgcaggattaactcgcctgtgccgcgtgaagtggtcacgagtggatcgcgtttttccgcaggtaccagctccagcccactggccgccgccatttcaataaacgcggttttgccatcgccggagatcccccaactggcattcactttctcgcccagcggccctgtaacccaggcgtgacgttcagaaccctgggtggctgcaatcatcgcttccaccgttccttcgccaccgtcggcaaccggaatagaaacgtactgtgcatcaggaaaaatttcccgaaatcctttttctatcgcctgcgcaacctcgctggcagataaactttctttataagagtctggggcgattacgattttcatacctatgcctgttaccacatgacgccggagggcgtttctcttattcggcctggattccaggcccggattgcaatacgccatccgggcacgacgtcattaacgagtaacttcgactttcgccagtttttcgtagtagcacgccagggcgctatgatccgccgttcctaaaccatctgctcgcagtgcctgcatcatctccataaccgcagctgtgagcggcagttgcgcgccgacgccgtgggaagtatccagcgcatttgccagatccttaatatgcagatcaatacggaagcccggcttgaagttgcggtccatcaccatcggcgctttggcatccagcacggtactgcccgccagtccaccgcgaattgcctgatacaccaggtccgggttaacgcccgctttggttgccagcgttagcgcttctgacatcgcggcaatattcagcgccacaatgacctgatttgccagtttggtgacgttacctgcaccgatttccccggtatgcaccacggaacccgccatcgctttcatcaaatcatagtatttgtcgaaaatagccttgtcgccgcccaccatcactgacagcgtaccgtcgatggctttcggttcaccgccgctcaccggagcatccagcatatcaatgcctttcgctttcagcgcttcgctgatttcacggcttgccagcggtgcgatagaactcatatcgatcaataccgtacctggcttcgcgccttcaatgatgccattctcacccagcgccacctctttcacatgaggggagtttggcagcatggttatgatgacgtcgcactgttcagcgatcgctttagccgtagacgctgtttctgcacctgcagcaatcacgtcagcaatagcttctgggttacggtcagcaaccaccagcgagtaacctgctttcagaaggtttttactcattggtttacccataatccccaggccaataaaaccaactttcatagtcatatcaatcatctctcttgttgcggtggtggttattttttaaaggtatcagccagtttctgagtggcagagcggaagacgccaagatcgctgccgacagccacaaacgtcgcgccccattccagataacgacgcgcatcggcttcgaccggcgcgagaataccgctgggtttgccgtgcgcactggcacggttaaaaatgtgctgaattgctttttgtacatccgggtgcgaggcattgccgagatggcctaatgccgcagccagatcgctggggccgacgaagataccgtctacaccttcggtagcggcaatggcatcgacgttatctacgccctgctgactttctatctggaccagaatggtgatgttcttgttcgactgagcgaaataatccgccacggtgccaaacatattggcgcggtgagaaacggagacgccgcgaatgccttccggtgggtaacgggttgatgccaccgcctgctctgcttcctcttttgtttctacaaaaggaatcaggaagttatagaaaccgatatccagaagacgcttaataattaccggctcgttggtcggcactcgcactactggcgcgctggcgctgcctttcagggccattaactgcggaataaacgtggagatatcgtttggcgcatgttcgccatccagcaccagccagtcaaacccagccaaaccaagaacttcagtgctaatcgggttagagagtgctgaccagcaaccaatttgtacctgtttcgcagccagtgcggctttgaatttattcgggaaaacatcgttattcatcgcttatacctttgcttatttctgcaattccatacgtttaatgtcgccaactacgaagaggtagcagaccatcgccatcagcgctgaacatcccacgaaaaccagtgctgcattgaaggagtgcagttcacttaccaggtagccaatcaccagtggagtgacaatggaggcaacattgccaaagacgttaaagacgccgccacagaggccaacaatctctttcggcgcggtgtcagaaatcaccggccagcccagagcaccaaatcctttgccaaaaaaagccagcgccatcagcatgaccaccagcgtggtgttgttggtgtagttacataagatgatggtggaagccagcaacattcccagcacaatcggtagcttacgtgccagggtcagggataaaccgcgtttgatcagataatccgagaagacacctcccagcacgccgcccgcaaaaccacacagtgccggaatcgaggcgaccagacccactttcagaatcgacatgcctttttcctgcaccagataaatcgggaaccaggtgaggaagaaccaggtgatggtgttgataaaatattgtccgaaaaatacgcccaacatcatgcggttagagagcaattgcttgatgtaatgcagtttgggaccgcttgctgccgcgctgcccggctttttgtggtccatatcgaccaccgcgccattttcagagataaacttcagctcttccgcagacatacgtgggtgatctgtcgggttatgaatcaatttgatccacagcgccgtcagcacaaaaccaatcacccccataacggtaaagacgtgctcccagccccaggcgaaagtcagccagccaagcagaggcgaaaagagcgccagcgagaaatattgcgccgagttaaagatggcggaggcagtaccacgttctttcgtcgggaaccaggcggcgacaatacgggcgttcgccgggaatgatggcgcttccgagaagccgagcataaagcgcataaagaacatggagatccctgcccaggccagcgggaacatatcaacaaagccttgcaggaaagtgaatagcgaccagaaaaagaggctataggtataaacttttttcgagccaaacttatcaagcagccagccgccggggatttgcatcagcaagtaggcccagccaaaagcagaaaagatgtaacccatcgaaaccgcacttaactgcaactcttttgccacttcggtaccagcaatagacagcgttgcacgatcggcgtagttaacggcggtaacaataaaaataatcagtaatattaaatagcgggtatgcacgcctttctttttttcgtcaacggtgtccagaatcattttatttacctcgggtacttatgctgatttttattattatggggaaggtgttatttatgagtttcatttatgccgtaacggcaatgaactcgggaattagtataagcagcgcgagaataataatcattgtgcaaatgctaatttaattaatactatttaaatattattttgagcatatgcacataaggttgcgcgctaaagcacagatttgcgctttaccttgccgggcggcactgcaatccctgaaatgattgacattgatcacatttctgcgtttaaactcctgacattcttatttcacccaatgaagtcatttattttaaatgagaccaggtcctcattttaataacccctggctggagaatattgcacaatggccaacatcgaaatcagacaagaaacgccaactgcgttttatataaaagttcacgacacagataatgtggcaattattgttaatgataatggcctgaaagcaggaacgcgttttccggatgggctggaattaattgaacatattccccaggggcataaagtcgcattgctggacattccggctaatggtgaaattattcgttatggcgaagtgattggttacgccgtgcgtgcaatcccacgcggaagctggatcgacgaatcaatggttgtactaccggaagcgccgccgttacacacgctgccactggcaaccaaagtcccggcccccttaccgccgctggaaggatacacctttgagggctatcgcaatgccgatggcagcgtgggcaccaaaaacctgctcggcatcaccaccagcgtccactgtgtggcaggcgtggtggactatgtagtaaaaatcattgaacgcgatctgctaccgaaatacccgaacgtcgatggcgtggtggggctgaatcatttgtacggctgtggcgtggcgattaacgcaccggcggcagttgtgcctattcgtaccatccacaatatttcgctgaaccctaactttggcggcgaagtaatggtgattggtctgggttgtgaaaagttgcagcctgagcgcctgctggtcggcacggatgatgtgcaagctattccagtagaaagcgccagcattgtcagtttgcaggatgaaaagcatgtcggttttcagtccatggtcgaggatattttgcaggtcgccgaacgccatctacaaaaactgaatcaacgtcagcgagaaacctgtccggcttcagaactggttgtcggcatgcagtgcggtggcagcgatgccttttctggcgtaacggcaaacccggcggttggctatgcgtctgatctactggtgcgctgcggcgcaacggtgatgttctcagaagtcacggaagtgcgtgacgcgatccatctgctgacaccacgcgcagtgaacgaagaggtcggcaaacggctgctggaggagatggagtggtacgataactatctcaatatgggaaaaaccgaccgcagcgccaacccttcgccgggcaacaagaaaggcggtctggcaaacgtggtagagaaggcactcggctccattgctaaatcgggtaaaagcgcaattgttgaagtgctgtcgcccggtcaacgcccgactaaacgcggattaatttacgccgcgacgccagccagcgattttgtctgtggcacgcaacaggtggcttcgggtatcaccgtgcaagtgtttacgaccggtcgtggtacgccgtacggcctgatggcggtacccgtcattaaaatggcgacccgcaccgagctggcgaaccgctggtttgatttaatggatattaacgcgggcactatcgccaccggcgaagaaaccattgaagaggtgggctggaagttgttccactttattctcgacgtcgccagcgggaagaagaaaaccttctcggatcaatgggggctgcataaccagctggcagtgtttaacccggcaccggtgacctgatttcttttggaacgtccctcgcaaaacatggccttagtgccatgtttttattgtttaaagcccccacgtccattaataatgcatttgcattaccttagttcaagcttataatttgagcagaaaacaggctgtaaaaggacagtgaatcatgcccgctaatgctcgctctcacgctgtactgaccactgaatcaaaggtcacgatacgcggacaaacaactatccccgcgccagtgcgtgaggccttaaaactgaagccaggccaggacagcattcattacgaaattctgcctggtgggcaagtctttatgtgccgactgggagatgaacaggaggatcatactatgaatgcatttttgcgttttctggatgcagatatccagaacaacccgcaaaaaactcgtccattcaacattcaacaaggaaagaaacttgtcgctggcatggacgtcaacattgatgatgagattggcgacgacgaataatggattttccacaaagggttaatggttgggcgctatatgctcatccctgttttcaggaaacctacgacgctttagttgccgaagtcgagacattaaagggaaaagatcctgaaaattatcagagaaaagccgccacaaagttattggcggtagtccataaagtgattgaggagcatatcacggtcaatccatcatcaccggcattccgtcatggcaagtcgttaggctctgggaaaaataaagactggtcacgggtaaaatttggtgctggtcgttatcgtctcttctttcgttatagtgaaaaagagaaagtcatcattctgggatggatgaacgatgaaaacactctgcgcacctacggtaaaaaaacagatgcctataccgtattcagcaaaatgttaaaaagaggacatcctcctgccgactgggaaagcctcacccaagagacagaagaaaaccattgatggtgttcacaatgcccgccgaacgtattcgtgttgaccagcgggcaccctttctcactccccgaccagaatcacttcaaccccagcctttcgcagtccttccagactatccgcaggaatgccttcatcaacaatgatcatgtcgatacgttgagtatcaatgatcttatgtaaactggaacgattgaatttactggaatcggtgaccacgatgatccgttccgcaacttcgcacatccgacggtttaaacgggcttcatcttcattatgtgtgctgacgccgcgctccagatcgatcgcatctacaccaagaaacagcatatcgaagtggtaattttgcagcgattgctcagcctgatcgccgtaaaaagattgcgactgacggcgcaaatgcccgccggtcatcagcagctcaacgccttcggcttccagcaacgcattagccacgttcataccgttggtcatcgcaattacgtcagtgtgcttgcgcatcagacgagcaatctcaaaagtggtggtcccggaatcgaggatcacccgatgacctggctgaatcaactcaacggcagctttcgcaacgctgcgtttcatcgcggtgttcagtgcgcttttatcttccactgatggctcgactgacggcgtcgtgctatcgcagatcaacgcgccaccataggcacgcacagcgatcccctgcttttccagaaacgccagatcgttgcggatcgtcacagtagatacgccatacaatgccgacagatcgttaacctgcacactcccttgctgtcgcagacgctgaatgatctgttctcgtcgctcgctggtgccagtcactcgcttctcacctgaagcgtcggtattactcatagtaagtcctttcgtaaaactttcgtttcatttcgttttgcctattaacgcctttctattaagcaaatgcaagcccaccttgcccattgacgcaagctactctcgtttcagtgactttcattatgtttcttttgtgaatcagatcagaaaactattatctttcgttttatttttatctcaccatgacgcagtatcaactgaaacaaaacgaaagattaatatcgcagtaatctgaactggagaggaaagtgaaacatctgacagaaatggtgagacagcacaaagcgggcaaaacaaatggaatttatgccgtttgttccgcacatccgctggtgctggaggctgcaatccgctacgccagtgcaaaccaaacgccgttactgattgaagcaacctccaatcaggtagaccagttcggcggttataccggaatgacgcccgccgattttcgcggctttgtttgtcagctcgccgactcgttgaatttcccgcaggatgcgttgattctgggtggtgaccatctggggccaaaccgctggcaaaacctgccggccgctcaggcaatggccaatgccgatgatttgattaaaagctacgttgcggcaggattcaaaaaaatccaccttgattgcagcatgtcctgtcaggacgatccgattcccttaactgatgacatcgtggctgaacgcgccgcccgtctggcgaaagtggcggaagaaacctgtcgcgaacactttggcgaagccgatctggagtatgtcattggtaccgaagtgccggtacctggcggcgcgcatgaaaccttaagcgagctggcggtcaccacgccggatgccgcccgcgccacgctggaagcccatcgtcacgcctttgaaaagcaaggtttgaatgccatctggccacgcatcattgccctggtggttcaacccggcgtcgaattcgatcacaccaacgttattgattatcagcccgccaaagcgagcgccttaagccagatggtcgaaaactacgaaacgctgattttcgaagcgcactctaccgattatcaaacgccgcaatcgctgcgccagctggtgattgaccactttgccattctgaaagttggcccggcgctgaccttcgccctgcgtgaagcccttttttctctggcggcgattgaagaagaactggtaccagcgaaagcctgttctggtctgcgtcaggtgcaggaagacgtgatgctcgaccgcccggaatactggcaaagccactaccacggtgacggcaacgcgcgtcgtctggcgcgtggttatagctactcggatcgcgtgcgctattactggccggacagccagattgatgacgctttcgctcatctggtacgtaatctggcggattcaccaattccgctaccgctcatcagccagtatctgccgctgcaatacgtgaaagttcgctccggcgagctgcaaccgacgccacgggaactcattatcaaccatattcaggacatcctggcgcagtaccacacagcctgtgaaggccaataagcaaaacaaagaggaacacgctatgccaaatattgttttaagccggattgatgaacgcttgattcacggtcaggtcggcgttcaatgggtcggatttgcgggggcaaatctggtgctggtagccaacgatgaggttgccgaagatccggtacaacaaaacctgatggaaatggtactggcagaagggatcgccgtacgtttctggacgctgcaaaaagtcatcgacaacattcatcgcgccgccgatcgacagaaaatcctgctggtttgtaaaacacccgccgatttcctgacgctggtgaaaggtggcgttccggtgaatcgcattaacgttggcaatatgcactacgccaatggcaagcaacaaatcgccaaaacggtttctgtggatgcgggcgatatcgcagcatttaacgacctgaaagccgctggggtggaatgcttcgttcagggcgtcccgacagagcctgctgtggacctctttaaattactttgagggattcatcatggaaatcagtctgttgcaggcattcgcgttgggcattatcgcctttatcgctggcctggatatgtttaacggcttaacccatatgcaccgcccggtggtcctcggcccgttagtcgggctggtacttggcgatctgcataccggtattttaaccggcggtacgctggaactggtgtggatggggctggccccgctggcgggcgcacagccgcctaacgtgattatcggtactatcgtcggcacggcgtttgccattactactggcgtgaaacccgatgtcgcagtcggtgtcgccgtacctttcgctgtcgcagtacagatggggattaccttcctgttctcggtgatgtccggcgtgatgtctcgctgcgaccggatggcggagaacgccgatactcgcggcattgaacgcgtgaactatctggcactgctggcactcggcactttctattttctctgcgctttcctgcctatctacttcggcgcggaacatgcaaaaaccatcattgatgtcctgccgcaacgattaatcgacggcctcggcgtcgcgggcggcatcatgccagcaatcggttttgccgtgctgctgaaaatcatgatgaaaaatgtctacatcccctacttcatcctgggctttgttgccgcagcctggctcaagttaccggtgctggctattgctgccgccgcgctggcgatggcgctgatcgatctgctgcgtaaatctcctgaaccgactcaacctgcggcacagaaagaggaatttgaagatggcatctaatcaaaccaccctgccgaacgtcagtgaaaacgaagaaacattgctgactggcgtcaatgaaaacgtgtatgaagatcagagcattggcgcggagctgacgaaaaaagatatcaaccgcgtcgcctggcgttccatgctgttacaagcgtcttttaactacgaacgtatgcaggcttctggctggttgtacggtctgctgcctgctctgaaaaagatccacactaataaacgcgacctggcgcgcgccatgaaggggcatatgggtttcttcaatacccatccgtttctggtgacatttgttatcggcattatccttgcgatggagcgttctaagcaggacgttaacagtattcagagcaccaaaattgccgtcggtgcgccgctcggcgggattggcgatgcaatgttctggctaacgctactgccgatttgtggcgggattggagccagtctggcattgcaaggctccattcttggcgcagtcgtctttattgtgctgttcaacgtggtacacctggggctgcgttttggtctggcgcattatgcttaccgcatgggcgtggcggcgattccactgattaaagcgaataccaaaaaagtcggccatgctgcgtctatcgttgggatgacggtaatcggtgcgctggtggcaacctatgttcgtttaagcaccacgctggaaatcacagcgggcgacgcagtggttaagttacaggctgatgttatcgacaaactgatgcctgctttcttaccgttggtctacaccctgaccatgttttggttggtacgccgcggctggagtccgctgcgtctgattgcagttaccgtggttctcggcatcgttggtaaattctgccatttcctttaaatacaatgaggtattagatgttaagtattattttgacagggcatggcgggtttgccagcggcatggaaaaagcaatgaagcaaattctcggtgagcaatcgcagtttatcgccatcgattttccggaaacctcaagcaccgcgctgcttacatcgcagcttgaagaggccatcgcccaactggattgtgaagacggcattgtttttctgacggatttgctgggcggcacgccgtttcgcgtagcttcaacgctggcgatgcaaaaaccgggctgtgaagtgatcaccggcaccaatttgcaactgctactggagatggtgctggagcgcgaagggttaagcggtgaagaattccgtgtacaggcactggagtgtggacatcgtgggctgaccagtctggtggacgagttaggccgctgccatgaagaatgtccggtcgaggaagggatatgacacacgttctgcgcgccagaaggctgctgactgaagagggatggctcgatgaccatcagttgcgtattgctgacggtgtcatcgcagcaatcgaaccgattccagtgggcgtgactgaacgcgatgcggaactgctctgccccgcttacatcgacacccatgtacacggtggtgcgggcgttgatgtaatggatgacgcgccggatgtgctcgacaagctggcaatgcacaaggcacgcgaaggtgtcggcagttggttaccgactaccgtaaccgcgccgcttaataccattcatgcggcgctgaaacgtattgcgcaacgttgccaacgcggcggacctggtgcgcaagtgctggggagttatctcgaaggaccgtacttcacgccgcagaataaaggcgcgcatccgccggagttgtttcgcgagcttgaaattgccgagctggatcaattgattgccgtttctcagcacaccttacgcgtggtagcgctggcaccggaaaaagagggggcattgcaggccatccgccatcttaaacagcaaaatgtacgagtgatgctggggcatagcgcggcgacctggcaacaaactcgcgccgcgtttgatgctggtgccgacggcctggtgcattgctataacgggatgacaggtttacatcaccgcgaaccgggaatggttggcgcgggattaacggacaagcgcgcctggctggaactgatagccgatggtcatcatgtgcatccggcggcgatgtcgctgtgttgttgctgtgcaaaagagagaatcgtgctgatcaccgacgcgatgcaggcagccgggatgccggatggtcgctatacgttatgtggcgaagaagtgcagatgcacggtggcgttgtccgtaccgcgtccggtgggctggcgggcagtacgctgtctgttgatgcggcagtgcgcaacatggtcgagttgacgggcgtaacgcctgcggaagccattcatatggcatcgctgcatccggcgcgaatgctgggtgttgatggtgttctgggatcgcttaaaccgggcaaacgcgccagcgtcgttgcgctggatagcgggctacatgtgcaacaaatctggattcagggtcaattagcttcgttttgatggtttgctccattattgggccttcacttcccccgtaaggcctttctttttctttctttttgatctgtgcagcggtgtcggatgcgacgctaacgcgtcttatgcgacctacggtacgccgcatccggcaatcggtgaacatagcgacgtcattacgcaattcttaatcttcccttgtcttttctttcaacgatcacggatttcgttttatttcctttttctccattgaactttcagtttcttttctatagattttaatcaacgaaagacatcaccaagtgaaatgaaacgaaaggcaagtgaaagcgacaacgcccgacgtcaagttcatcagactaaggattgagttatgccagaaaattacacccctgctgccgccgcaaccggtacatggactgaagaagagatccgccatcagcctcgcgcatggatccgttcactcaccaacatcgacgcgctacgttctgcgctcaataacttccttgaaccgttactgcgcaaagagaatctgcggatcatcctgaccggagccggaacctcggcatttatcggtgacatcatcgcgccgtggctcgccagccataccggtaaaaacttcagcgccgtaccgaccaccgatctggtcaccaatccgatggactacctgaacccagctcatccgctgctgttgatctccttcggtcgatccggcaacagcccggaaagcgtcgctgccgtggaactggcaaatcaatttgtaccagaatgctatcacctgccgatcacctgcaacgaagcgggcgctctttaccaaaacgcgatcaacagcgataacgcgtttgccctgctgatgcccgcagaaacgcacgatcgcggctttgcgatgaccagcagcattaccaccatgatggccagctgcctcgcggttttcgcacctgagacgatcaacagccaaaccttccgcgacgtggcggatcgttgccaggcgatcctgacctcactgggcgatttcagcgaaggtgtgtttggttacgcaccgtggaaacggatcgtttatctcggcagcggtggcttacagggcgcagcacgcgagtcggcgctgaaagtgctggaactgacggcgggtaaactggcggccttttatgattctccaaccggattccgtcatggaccaaaatcgctggtcgataacgaaacgctggtggtggtatttgtctccagccacccttacacccgtcagtatgatcttgatctgctggctgaactccgccgtgacaaccaggcaatgcgcgtaatcgccatcgccgcggaaagcaccgacatcgtcgctgccggtccacatattatcctgccgccgtcacgtcactttatcgacgttgagcaggcattttgcttcctgatgtacgcccagacgtttgcactgatgcagtcgctgcacatgggcaatacgccggataccccatcagccagtggcaccgttaaccgcgtggtgcaaggcgtaatcattcatccgtggcaggcataagaggatcgcattatgagcattatctccactaaatatctgttacaggacgcccaggccaatggctacgcggtgcctgcttttaacattcataacgccgagacgatccaggcgatcctcgaagtgtgcagtgaaatgcgatcgccggtgatcctcgccggaacgccggggacctttaaacatatcgcgctggaagagatctacgccctgtgcagcgcctattccacaacctacaacatgccactggcgctgcatctcgaccaccacgaatcgctggatgatattcgccgtaaagtccacgcaggtgtgcgcagtgcaatgatcgacggcagccacttcccgtttgccgagaacgtgaagctggtgaaatcggttgttgacttctgccactcacaggattgcagcgtggaagcagaactgggccgcctgggcggtgttgaagatgacatgagcgttgacgccgaaagtgcattcctgaccgatccacaagaagctaaacgctttgtcgaactgactggcgtcgacagcctggcggtagcgattggtacggcgcacggcttatacagcaaaacgccgaagattgatttccagcggctggcggaaattcgtgaagtggtggatgttcctctggtgctacatggtgccagcgatgttccggatgaatttgtccgtcgcactattgaacttggcgtcacaaaagtgaacgttgccacagaattaaaaatagccttcgctggcgcggttaaagcctggtttgcggaaaatccgcagggtaatgatcctcgttattatatgcgcgtcggaatggatgcgatgaaagaagttgtcagaaataaaattaatgtctgtggttcagcgaatcgaatttcagcataatcattagttttttatgatttatcccaatgtacttcccgattaatatcggggagtgccttaatggaaaaggagatgactaaaccttaataaatacatcagtacaatatcgcaacaataatatattaaaaaaaattatattattcaactttatggtgaggattacacaatgagcagtccaaatattctcttaacccgtattgataaccgtctggttcacggtcaggttggcgtgacctggacatccaccatcggtgcgaatctgctggtagtcgtggatgatgttgtcgctaacgatgatattcaacagaaattaatgggtattaccgcagaaacctacggctttggcattcgtttctttactatcgaaaaaaccattaacgtcatcggcaaagctgcaccgcatcagaagatcttcctgatttgccgtacgccacaaacggtacgtaaattggtagaaggtggcattgacctgaaagatatcaacgtcggcaatatgcatttctcggaaggaaaaaagcaaatcagcagtaaagtttatgtcgatgaccaggatctcgcggacttacgttttattaaacaacgtggcgtgaatgttttcattcaggacgtccctggcgatcaaaaagaacaaatccctgactaaatctaaaatcgccttaatattggtttgaggtaataaaaatgcatgaaataaccctacttcagggattatccctggcggcgttagttttcgttctggggattgatttttggctggaagccttatttttattccgcccgataatcgtttgtaccctaactggcgctattctcggtgatattcagactggcttaattaccggtggtctgacagagttggctttcgccggattaacccctgcaggtggtgttcagccgcccaacccgattatggcgggtctgatgaccaccgtcattgcatggtctacgggcgttgatgccaaaacagcaattggtcttggcctgccgtttagtttgttaatgcagtacgtcattctgttcttctattccgctttctcattatttatgaccaaagccgataaatgcgcgaaagaggcggatacggcagcgttttcccggcttaactggacaacgatgctcatcgtcgcttcagcgtatgcggtgattgctttcctctgtacttacctggcacaaggggcgatgcaggcgctggtgaaagcgatgcccgcctggttgacccacggctttgaagtggctggcggtattctgcctgccgttggttttggcttgctgctgcgcgtaatgttcaaagcgcaatatatcccttacctgatcgccggtttcctgtttgtttgctacatccaggtcagcaacctgttgccggttgccgtactgggcgcaggctttgcggtgtatgagtttttcaatgcgaaatcccggcagcaagcgcaaccgcagcccgttgccagtaaaaatgaagaagaggactacagcaatgggatctgaaatcagtaaaaaagatatcacccgtctgggctttcgttcgtcgctgctgcaagcgagctttaactacgaaaggatgcaggcgggcggttttacctgggcgatgttgccgatcctgaaaaagatttataaggacgacaaaccgggcttaagcgcggcgatgaaagataacctcgaatttattaatacccacccgaatctggtcggattcctgatggggttattaatttcgatggaagaaaaaggagaaaaccgcgacaccattaaaggcctcaaagtggcactgtttggcccaatcgccgggattggcgatgcgattttctggtttactttgttgccgattatggcgggaatttgctcatcatttgccagccagggaaacctgctggggccgattctatttttcgccgtttacctgcttatctttttcctgcgcgtcggctggacccacgtcggttattcagtcggcgtgaaggcgatcgataaagtgcgagagaactcgcagatgattgctcgctcggcaaccatcctcggaatcacggtaatcggcgggctgatcgcttcgtatgtgcatattaacgtggtgacatcgtttgccatcgacagtacccacagcgtcgcgctgcaacaggatttcttcgataaagtcttcccgaacattttaccgatggcctacaccctgctgatgtattacttcctgcgggtgaaaaaagcgcatccggtgctgttaatcggcgtgacttttgtgctctctattgtttgttccgcattcggcattttgtaaatggaacgaggcactgcttctggcggtgcctctttacttaaggaatttcatcctgtgcaaacccttcagcaagttgaaaactatacggcgttaagtgaacgagccagcgaatatttattggctgtgatccgtagcaaaccggatgccgtgatttgcctggcgaccggagccacgccattactgacgtatcattatctggtagaaaaatccaccagcagcaggttgatatcagccagctcaccttcgtgaagctcgacgaatgggtggatctgccattaacgatgcctggcacctgcgaaactttcctacaacagcatatcgtgcagccgctggggctgcgtgaagaccagctcatcagctttcgctccgaagagataaatgagacagagtgcgaacgggtaacgaacctgattgcgcgcaaaggcggtctggatttatgcgttctaggattggggaaaaacggtcatcttgggctgaacgaaccgggagaaagcctacaaccggcctgccatatcagtcaacttgatgccagaacacagcaacatgagatgttaaaaaccacgggtcgccccgtgactcgtgggatcaccttaggcctgaaggatattctcaatgcccgcgaggttttgttattggtgactggcgaaggaaagcaggatgcgacagaacgttttctcacggctaaagtctccaccgctatcccggcttcgtttttatggctgcacagtaactttatttgtttaattaatacctaaccagatgaaaatttgctcaaaatttttaaattaacttattcaacagtcacgcattatattaaataacatttgactgggttgaacataacgccaatagcaaaaggagttatgttcaacaatttaattttagatatacatataacttgttctattaataaatcacctcgtattctgactcggcccctggcgcagcaaagtcaggcatttatactctttttaacacatagaaaattcatatcaatataataaaaacatagaatatttgcatataaatataatcttaaagtttagtctatttaatgttcaatgaaatatttctacctgtataatcttnaaagatgttgaacatatattcacattaaatatgattatgtacttgttacaaggataaggttataaatgaataaagttacaaaaacagctattgtgggcttacttgcgcttttcgcaggtaatgccgctgcaaccgatggtgaaatagtttttgatggcgagattttaaaatctgcttgtgaaatcaatgactctgataagaaaattgaagttgctcttggtcactataatgccgaacagtttcgttctgttggcgatcgtagcccaaaaattccattcactattcctttagttaactgcccagtgactgggtgggagcacgataacggcaacgttgaagcgtctttccgtttatggctggaaacgcgggataatggcaccgtccctaacttccctaatctggcaaaagtgggctcttttgctggcacagcggcaacaggtgtgggtatccgtattgacgatgcggaaagcggaaaccttatgccactgaatgctatggggaatgataacacggtttatcagatcccagcggactccaatggtattgtcaatgttgacctcatcgcttactacgtatcaaccgttgaagcatcagaaatcaccccaggggaagcagacgctgtcgttaacgtaacgctggattaccgttaatacgttacggcgttatctgacctttcagataacgcccttttccttcctctttctcgttgtatcaggttgaaaaataactatgtcaaaacgaacattcgcggtgataataaccttgttgtgtagcttctgtatcggccaggcgcttgcagggggtatcgttttacagcgaacgcgagtgatctatgatgccagccgcaaagaggctgcgttacctgtcgcaaacaaaggcgcagaaacgccttatttactgcaatcatgggtagataatatagatggtacaagccgtgccccatttattataaccccaccgctatttcgtcttgaagctggcgatgactcatcactgcgaattattaaaacagctgataacctgcctgaaaataaagagtcgctgttctacattaatgttcgtgccattccagcaaagaaaaaatcagatgatgttaatgctaacgagttgacgctggtatttaaaacacggatcaaaatgttttatcgccccgcacacctgaagggacgggtaaacgatgcgtggacatcactggaatttaaacgtagtgaccattcactcaatatatataacccaactgaatattacgtcgtatttgccggactggcagtcgataaaaccgatctcacaagcaaaattgaatatatcgcgcccggagaacataaacagttaccacttcctgcatctggcggaaagaacgtgaaatgggctgcaatcaatgattatggcggcagttccgggacagaaactcgtccactgcaataacaaatataaaaaacacaggtcatcagggaatgccacaacgacaccaccagggacataaacgcacaccgaaacagttggcgctcatcatcaaacgctgtttgccgatggtgctcactggcagcggcatgctttgcactaccgctaacgccgaagagtattatttcgaccccattatgctggaaactacaaaaagtggtatgcaaacaactgatctgtcacgtttttcaaaaaaatacgcacaactaccaggaacttatcaggttgatatctggctgaataaaaagaaggtttcacagaaaaaaattacatttaccgccaatgcagagcaacttctgcagccacagtttacggtagaacaactacgtgagctgggtattaaggtggatgaaatcccggcgctggctgaaaaagatgacgatagcgtgatcaactcgcttgaacaaatcattcccggtacagctgctgaatttgatttcaatcatcagcgacttaatttgagcattccccaaattgcactgtaccgtgatgcaagaggttacgtctccccttctcgttgggacgatggtataccaacgctgtttaccaactactcgtttacaggttctgataaccgttaccgccagggcaatcgtagccaacgacagtacctgaatatgcaaaatggtgctaattttggcccctggcgattacgcaactattccacatggacacgcaacgatcaggcgtcaagctggaacactatcagtagttatttacaacgtgatatcaaggcgttgaagtctcagttgcttctgggagaaagcgccaccagcggcagtattttttccagctacacctttactggcgtgcaactcgcttccgacgataatatgttgccaaacagccagcgcggatttgccccaacggtacgcggtatcgcaaacagtagtgcaatcgtgactatcaggcaaaatggttatgtgatctatcaaagcaacgtgccagcgggtgcctttgaaattaacgatctctacccctcttccaacagcggcgatttagaagtcacgattgaagaaagtgacggtacgcaacgtcgctttatccagccttattcttcattacccatgatgcagcgacctgggcatctaaaatatagcgcgaccgctggacgctatcgcgctgatgcaaacagtgatagcaaggaacccgaatttgctgaagccacggcaatatatggtttgaataatacttttacgctgtatggcggcctgctcggttctgaagattattatgcgctggggatcggtatcggcggcacacttggcgcactgggcgcgttgtcgatggatatcaacagagctgacacccaattcgataaccagcactcttttcatggctatcaatggcgtacgcagtacatcaaagatatcccggaaaccaacaccaatatcgctgtcagctactatcgctataccaacgatggctattttagttttaatgaagccaatacccgtaattggaactataacagtcgccaaaaaagtgaaattcaattcaacatcagccagacaatatttgatggggtaagtctgtatgcctccggttcgcagcaagactattggggcaataacgataaaaacaggaatatctcagttggggtttccggtcagcaatggggaattggttacagcctgaattatcaatacagtcgctacacggatcaaaataatgaccgcgcactctctttgaatctcagtattccgttagaacgctggttaccgcgtagccgggtttcctatcagatgaccagccagaaagatcgcccaacccaacatgaaatgcgtcttgatggctcactgctggatgatggtcgcctgagctatagcctggaacaaagtctggatgacgataacaaccataacagtagcctgaacgccagttaccgttcaccttatggcaccttcagtgccggatacagctacggtaatgacagcagccaatacaattacggcgttaccggcggcgtggttatccatcctcatggcgtgacgctctcgcaatatctgggcaacgcttttgcgcttatcgatgctaatggggcttctggcgtgaggatacaaaactatccggggattgctactgatccctttggctatgcagtggttccttatctcacgacttaccaggaaaaccgtctctcggtagatactacgcaactgcccgataacgtcgatcttgagcaaacaacacagtttgtggtgcccaacagaggtgcaatggtagcggcgcgtttcaacgccaatatcggttatcgcgtacttgttacagtcagcgatcgcaacggtaaaccgttgccctttggcgctcttgccagcaacgatgagacggggcaacaaagtatcgtcgatgagggcggcatactatatctctctgggatatcgagtaaatcacaaagctggactgtacgctggggaaatcaggcagatcaacaatgtcagtttgcttttagtacaccggattcagaaccaacaacctctgtattacaaggcacggcgcagtgccattaaggataaaaaaatgaaaagagcgcctcttataacaggacttttgttgatatccacatcctgcgcttatgcctcctcaggagggtgtggagccgacagcactagcggtgcgacaaattacagcagtgtggttgatgatgttacggtgaaccagacagataacgtgacaggacgggagtttacctctgccacgctaagtagcactaactggcaatacgcctgtacctgctctgcgggtaaggcagttaaacttgtctatatggtcagccctgtacttaccaccactggacatcaagcaggatattacaaactcaatgatagtctggatattaaaaccacattacaggcgaatgacattccaggactcgtgactgaccagaccgtttctgttaacacccgattcacacagataaaaagcaacaccgtatattctgctgcaacccaaacgggtgtttgccagggtgacacgtctcgttatggacccgttaatattggtgcaaataccacctttaccctgtatgtcaccaagccatttctcggctcgatgaccattccgaaaacggatattgccgtcattaaaggcgcatgggtcgatggaatgggaagcccgtctacaggtgacttccatgatttagtcaagttatcgattcagggaaatctcaccgccccacagtcgtgcaaaattaatcagggcgatgttattaaggttaattttggattcatcaatggtcagaagtttaccacccgcaatgccatgccagacggttttactccagtagactttgatatcacttatgactgtggtgatacttcaaagattaaaaactcgttgcaaatgcgcatcgacggtacaactggggtagtagaccagtacaacctggtcgccagacgaagaagttcagacaatgcgcccgatgtcggtattcgtattgaaaatctcggcggcggagttgcaaatattccttttcagaacggtatccttcccgttgatccttccgggcatggcaccatcaacatgcgcgcctggccagttaatctggtcggtggtgagctggaaacaggaaaatttcagggcaccgccaccattaccgtcatcgtgcggtaaaagaagacgttgcgttttgattaacgcaacgcttcggcactcttacccctgctgctccagcgcatacttatacagcgcatttttcttcacgccgtgaatttctgccgccagcgccgccgcttttttcaacggcagttctgcctgtagcagcgccagcgtgcgcagggcatcggcgggtaagtcttcttcctgtgctttatgaccttcgataatcagcaccatttcgcctttgcgacggttttcatcttcttttacccacgccagcagctcgccaacgggcgcgccgtgaatggtttcccaggttttggtcagctcacgcgccagaaccacgtagcgggattcgcctaataccgcaacgatatcttccaggctatctaacagacggtgggtggattcataaaaaatcagcgtgcgcggctccgcttcaatggcttttagcgcatcacggcggccttttgatttggcaggtaaaaagccttcgtaacagaaacggtcagagggtaaacccgcggcgcttaacgcagtgatagcagcacacggcccgggtagcggcaccacgcaaatccccgcttcacggcaggtacgcaccagatggtagccaggatcgttaattagcggcgttccggcatcggaaaccagcgcaatgttctgcccttcttgcagcttcgccagcagcgtttcggctttttgttgttcgttatggtcgtgcagcgcaaacaaccgggcattaatcccaaaatgttgcagcaataaaccggtgtgacgagtatcctcggcggcaatcagatcaacggcctgtaatacctctaacgcacgctgggtgatatccgccagattgccgattggcgtcggtacaatgtaaagctggccctgagaattatccgccgattggtgttgtttcattgtgtcgtccgtattgccgatttaatattgagcattgcgtaaaaaaatatcactggatacattatggtaccctcaacattttctcgtttgaaagccgcgcgttgtctgcctgttgttctggcagccctgattttcgccggttgtggcacccatactcccgatcagtccactgcttatatgcagggcacggcgcaggctgattctgccttttatcttcagcagatgcagcaaagctctgatgataccaggatcaactggcaattactcgccattcgtgcactggtgaaagaaggtaaaaccgggcaggcggttgagttgtttaaccaactaccgcaagaactgaacgattctcagcgtcgcgagaaaacactgctggcggtagagattaaactggcgcagaaagattttgctggcgcgcaaaacttgctggcgaaaatcacacctgccgatttagaacaaaaccagcaagcgcgttactggcaggcaaaaatcgatgccagccaggggcgtccttccattgatttactgcgcgcgttaattgctcaggaaccgctgctcggcgcgaaagaaaaacagcagaatattgatgccacctggcaggcgctctcctccatgactcaggaacaggcgaatacgctggtgatcaacgccgacgaaaatattctgcaaggctggctggatctgcagcgcgtctggtttgataaccgtaacgatcccgacatgatgaaagccgggatcgccgactggcaaaaacgttatccgaacaatccgggcgcgaaaatgctgccaacgcagttggttaacgtaaaagcgtttaaaccagcctcgaccaacaaaatcgccctgctgttgccgctgaatggccaggcagcggtatttggtcgcactattcagcaaggctttgaagcggcgaaaaatatcggcactcagccagtggcggctcaggtagctgccgcacctgccgcagacgtagctgaacaacctcagccgcaaaccgtggatggcgttgccagcccggcacaagcctcggttagcgatctgaccggtgaacagcctgcggcacagccagcgcctgtaagcaccccggcagcaaccaccacagcggtaagcgcgccagcgaatccatccgcagaactgaaaatctacgatacctcatcacaaccacttagccagatcttaagccaggttcagcaggatggcgcgagtattgtggttggtccgttgctgaaaaataacgttgaagagttgcttaagagcaacaccccgctgaacgtgctggcactgaaccagccggagaatatcgaaaaccgcgtcaatatttgttacttcgcgctttcaccggaagacgaagcgcgcgatgcagcgcgtcatattcgtgaccagggtaaacaagcgccgctggtgctgatcccacgcagttcattgggcgatcgcgtagccaatgcgtttgcgcaggagtggcagaaactgggcggcggcaccgttctgcaacaaaaatttggttccaccagcgaattacgcgcgggtgttaacggcggttctggtatcgctttaacgggtaccccgattactcccagagcgacaaccgactccggcatgacgaccaacaatccaacgctgcaaaccacgccaaccgatgaccagttcaccaataatggcggtcgtgtcgatgcggtgtacattgtggcaacgccgggtgaaatcgcttttatcaaaccgatgatcgccatgcgtaacggtagccagagcggtgcaacgctgtacgccagctcccgcagtgcgcaagggaccgctggcccggatttccgactggagatggaaggcttgcagtacagcgaaatcccgatgctggcaggcggtaatctaccgttaatgcagcaggcactcagcgcggtgaataacgattattcactggctcgcatgtatgcgatgggcgtcgatgcctggtcgctggcaaatcatttctcacaaatgcgccaggttcagggttttgaaatcaacggtaataccggaagcctgacggcaaacccggattgcgtgattaacaggaagttatcatggctacagtaccaacaaggtcaggtagtccccgccagttaaccaccaaacagaccggcgatgcgtgggaagtacaagcgcgtcgctggctggaaggcaaaggactgcgatttgtcgccgctaacgtgaacgagcgtggcggcgagatcgatctgataatgcgtgaaggccggaccaccgtttttgtcgaggtacgctatcgccgctctgcgctttatggcggcgcggcagccagtgtgacccgcagcaaacaacacaaattattacagactgcccgcttgtggctcgcgcgtcataatgggagttttgatactgtggattgccggttcgatgtggtagccttcaccgggaatgaggttgagtggattaaggatgcctttaatgaccactcataattaaggtttaaggattagcgtgcaagaaagaattaaagcttgcttcactgaaagcattcaaactcaaattgcggcggcagaggcgcttccggatgccatctcccgtgcagccatgacgctggttcagtctctgctcaatggcaacaaaatcctctgttgtggtaatggaacttccgctgccaatgcacagcattttgctgccagcatgatcaaccgtttcgaaacggagcggcccagcttacctgccattgcactaaatactgataatgttgtcttaacggcgattgccaacgatcgcttacatgatgaagtgtatgcaaaacaggtgcgggcgctgggtcatgcgggagatgtattgttagccatttccacccgtggcaacagccgcgatattgtaaaagcggtagaagctgccgttacgcgtgatatgactattgtggcattgaccggctatgacggcggcgaacttgcaggtttgttagggccacaagatgtggagatccgcattccttcgcatcgtagtgctcgcattcaggaaatgcatatgctgacggtaaattgcctgtgcgatctgatcgataacacgcttttccctcaccaggatgtttaaggagaatacatgaaggcattatcgccaatcgcagtccttatttccgcgctgctgttgcaaggttgtgttgccgctgccgtagtgggtaccgctgctgtgggtaccaaagccgcaactgacccacgcagtgtcggcacccaggtggacgatggtaccctggaagtgcgcgtgaacagcgcattgtcgaaagacgaacagattaagaaagaagcccgtattaatgtcacggcgtatcagggcaaagtgctgctggttgggcagtcaccaaacgctgaactttcggctcgcgccaaacagattgctatgggcgtagacggtgccaacgaagtgtataacgagattcgtcagggccagccgattggtctgggcgaagcatctaacgatacgtggatcaccaccaaagtgcgttcgcagctcttaaccagcgacctggtgaaatcgtccaacgtgaaagtgaccaccgaaaacggtgaagtgttcctgatggggctggtgactgaacgtgaagcgaaagcggcggcagatattgccagccgggtgagcggcgtaaagcgggtaaccacagcgtttacgtttattaaatagcagccccttgtaatgcctgatgcgacgcttgccgcgtcttatcaggcatacaacgatgcaaaccgtagatcggataaggcgtttacgccgcatccgacatgttttccctcaaatcagaacaacagcgccagcccgccgacaatcacaccagacactgccaccatcgcccctgtcagccataaggctttcgccgggaacgctttgcgcagcataatcagtgacggcaaactcactgccgggagcgtcatcaacaatgccagcgccggagcggttcccatacctgccagcatcatcgtttgtacaatcggaatttctgctgccgtgggaatgacaaacaagcatcctgccaccgccatcgccaccacccacatcaggctgttatcgacagcaccatcggcatgggggaataaccagacgcgagcggcacccaacaccagtactgcaaggatgtaaaccgggatcgtactccagaaaagcgtccatagcgccctgccccagcggctaaaaaaaccgccctgtgcttccggtatgtcaatttcgaccggtgcctgcgtttgcggtgtttcacgcacccatttttgcaccagcgtcgcaatcagcaacaccatcaccagcccggccaccagacgaatcgccgcaaaaccccagccgaggacaaaccccataaacaccagcgtcgccgggtttaacaccggattgcccatccagaatgccagcgcaccgcccatcgacacctgttggcgacgcattcccgccgcgaccggagccgcacagcaggtacacatcatgcccggcagcgaaaacagcgttcccagcagcgtgctgcgaaagcgcgattgcccaagcgtacgcaacaaccagtcacgcgggatcagcacctgaatcaacgaaccgaggatcacccccagcaccgccgctttccataccgcgaggaaatagatcatcgcgtaatccaacgccgcctgccatgggttagcatccgcctgcgcaaggatagatttaccgatactgtgggtttcggcagcagtaaacgctttgccgtagtaaggttcccatttcacataccagagaccggcaatgacaacgagaaagaaaagcgcgggtttccaccactgaatgggcgttgccgcctgagatgaagactgaccagtcatagcattccccaggaataagttatgataattgagcgcgtgaatattacgctcactatcaattcttgggaataattattcagctcttttgcgtaattctgaagagcttaaaatcgtcacaccttcatgcccgggccgcatcgcctctgccagcatgacccgcgccacgtctctcgcatcaatggatttccagttaccgggtaataaacggaacagcggcgcaaaaagcgtttcgttcatccgctgtttgctacgatcgcccagtaacatcgacgggcgagcaatggtcaatttcggccagttctgggcgattaatgcttcttccatctcccctttgacgcggttatagaaaaacggcgagtgggcattggcacccatagcactgaccaccagcatatgctgcgcgcccagtcgccgcccggttaatgcggtatccactaccagcgtgtaatcggcatgaataaacgcctctttgctccccgcttctcgccgcgtggtgccgagacaacaaaacacaatgtcgatgggatcggtgacctgcgccagcgcgtcagtcagttgcggatcatggggattaaacaccccgggcatatcgcccaacggacgtcgcgtcggcgcggctatggcgttaactttcggttcgttaatcaacatccgcagcaggtgaccgcccaccagccccgttgcgcctgtaatcagtacctgactcatcttcgctcctttacagaattgtctgccttgcgctccacggctcatgcaccaggcttaatagaccatgaggtaattatccccgattgtgggaaattcgcctcatccaatgcaacaacgcggaggaagcatgagtaagaaaattgccgttttaatcactgatgaatttgaagattcagaatttacttcacccgcagacgagttccgtaaagccggacacgaagtgattaccattgaaaaacaagcgggtaaaacggtgaaaggcaaaaaaggagaagccagcgtgaccatcgataaatccatcgatgaagtgacgccagcggagtttgatgccctgctgctaccgggcggccattcaccggattatctgcgtggggacaaccgttttgtcacctttacccgtgattttgtgaatagtggcaaaccggtgtttgccatctgtcacggcccgcagttgctgatcagcgccgatgtgattcgggggcgcaaactgaccgcagttaaaccgatcattattgatgttaaaaatgcgggcgcggaattttacgatcaggaagtcgtggttgataaagatcagctggttaccagccggacaccggacgatctgccagcgtttaaccgcgaggcgttacgcctgctcggtgcctgagtcgcgtagccaaatcatttttttaccaaagcccagcgtgttgtcggtgaatttgatttcatcgagccggatttcccacaccggggccgacagcattctggcaaccggaaagcgacgattgtacgccttgcgcgcgaggtcgctttcctcaccttccagcctgcggatctcacctttaaactgcacaccgcgaattaacgctaccgttttcggctgaccgtttaccgttccggcaactgccgcctgcggcccgctcatctgcgcgtggcgcgttttttcttccgtcaaaatgtagaaggcgactttctgcgcatcaaaaagataaaaggcattagcgcaccagagttccccttcctgctgcacacaccaggtgacaacatgttgttttgccagccaacggctgatggcgatgagtgtttccattgctgttctcttttatactgtgggcctgaccttaacatgcgatgcagacgatgacaccctggtttctttacttgatccgtaccgccgacaataagctttataccgggatcaccacggatgtcgaacgccgctatcagcagcaccaaagcggcaaaggggcgaaagcactgcgcgggaaaggagaactgacgctggcgttttctgctccagtgggcgatcgttcgctggcgttacgggcggaatatcgcgttaagcaactgaccaaacggcaaaaagagcgtctggtagcggaaggcgcagggtttgcagagctgttaagcagtctgcaaaccccggagattaaaagcgattgaaatgctcgtgatactcaaccaggccggtaacgccattcagcgcgtcatccgctaaacgatgtacctggaaggcgctttcagtgcccggccagcggcaacgcagatcgtgatgcgccgccagttcaaagccgaaacgactgtacagcgccggatcgcccagcgtcaccactgcggcatagccgaactcattaagcgaatcgagtccttcatagaccagttggcgtgccagcccctgtccacggtatttttcatcaaccgccaacggtgccatgccgacccattgcaggtcttcgccctgcacatcaaccggactaaatgccacatagccaatgacctgaccttcgtcatctgtcgccaccagccccagcgtcagaaagccatcttcacgcagatcgtgaaccagcttcgcttccgcatcactttcgaatgagcgacgcagcagggcatcaatacccggcgcatcaatgggaatttctactcgaattagcatggttcacctaccgatgtctgtttggtttcaggcgcggttttcattcccgcctcaacaacatccgccagttgcagcagcatcatgcgtaaggctttcggcatttgctccagttcaatggcgtccatcaggtttttcacatacagccccagctccgtatcgccttcaatcaccagccgacgctggaagaagagcgtatccggatcttgtttacgcgccgcaatcatcagcagatcgctggcgtcggcactaaaactcacatcagcttgcgcgttctggctgaccaccagtttgccattcaccaccgaggtaaaccattgcaggtcaatatcacgcacatgaatacttaaccagcggccttcaagaaactccagctcaccatcatccagcgcctgacggaattgccagcttaagacctgctcaagaacctggcgttttagcgcaaatggcgtcagttttaccggtacactcaacagagatggccccaaatgcacaatacgggaacgcagtttatccaacacgagttttactccctgtttcaacaatcatcctattttgccatatcagaaaaataacatagcggtataaatcaacaattccatatgaaattgctgctaccaccaatacaactttaactgccttaaatcaaaaattgtcgcagcaaggttaactaaaatcccagttcgttaacatttttgcgttttgatagcgcaaccttcaggaaaaattatggagctgctctgccctgccggaaatctcccggcgcttaaggcggccatcgaaaacggcgcagatgctgtttatatcgggctaaaagatgataccaatgcccgtcacttcgccggccttaactttaccgagaaaaaattgcaggaagcggtgagttttgtccatcaacatcgccgcaaacttcacatcgcgattaacacttttgcgcatccggacggttacgcccgttggcagcgcgccgtggatatggcggcgcagctgggtgccgacgcgctgatcctcgccgacctcgccatgctggaatacgccgccgagcgttatccgcatattgagcgccacgtatcggtgcaggcttcggcgaccaatgaagaggcgattaacttttatcatcgccattttgacgttgcccgcgtggtgctgccgcgcgtgttgtcgattcatcaggtgaaacaactggcacgggtcacacctgtaccactggaagtctttgctttcggcagcctgtgcattatgtcggaaggtcgttgctatctgtcgtcgtatctgacgggtgagtcgcccaacaccgtaggcgcgtgttctccggcccgtttcgtgcgctggcaacaaacgccgcaggggctggaatcccgcctgaacgaagtgctgatcgaccgttatcaggacggcgaaaacgcaggttatccgacgctatgtaaagggcgttatctggtggacggcgagcgctatcacgcgctggaagaaccaaccagtctcaataccctggaactgctgccggagttaatggcggcgaatattgcttcggtgaaaattgaaggccgccagcgtagcccggcgtatgtcagccaggtggcgaaagtctggcgtcaggctatcgaccgttgtaaggccgatccgcaaaactttgtaccgcaaagcgcgtggatggagacgctcgggtcgatgtccgaaggcacgcaaaccactcttggcgcgtatcaccgtaaatggcagtgagaagagcaatgaaatattccttagggccagtgctgtggtactggccaaaagagacgctggaagatttttatcagcaggccgccaccagcagcgccgacgtgatttatcttggtgaagcggtatgcagcaagcgccgggcaaccaaagttggcgactggctggagatggcaaaatcgctcgccggaagtggcaagcagattgtgctctccacgctggcgctggtgcaggcatcctctgaactgggcgaactgaaacgctatgttgagaacggtgagtttctgattgaagccagcgatctcggcgtggtgaatatgtgcgctgaacgcaaactgccgttcgtcgccgggcacgcgctgaactgctacaacgcggtgacgctgaaaatattgctcaaacagggcatgatgcgctggtgtatgccggtggagctttcccgcgactggctggtgaatctgcttaatcagtgcgatgagctgggcattcgcaaccagtttgaagtggaagtcctgagctacggtcatctaccgctggcctactccgcccgctgctttaccgcgcgttcggaagaccgcccgaaagatgagtgtgaaacctgctgcattaagtatccgaacgggcgcaacgtgctgtcgcaggaaaaccaacaagtgtttgtactcaatggcattcagaccatgagcggctacgtttacaacctcggtaacgagctggcatccatgcaggggctggttgatgtggtccgcctgtcaccgcagggtactgacactttcgcgatgctcgacgccttccgcgctaatgaaaatggcgctgcgccactattgttgacggcaaacagcgactgtaacggctactggcggcggctggcaggactggagctgcaagcctaagtaaatatgctcgtcatacttcaagttgcatgtgctgcatctgcattcgttcaccccagtcacttacttatgtaagctcctggggattcactctcttgtcgccttcctgcaactcgaattatttagagcacagctcactttgttaacaactttaactactctttaatgcagtattaaagattaatcggtaacaaagtgagctgttatgactgataaaaccattgcgttttcgctactcgatctggcccccattcccgaaggttcttcagcgcgagaagcattctcccactctctcgatctcgcccgtctggctgaaaagcgcggctatcatcgctactggctggcagaacaccacaatatgactggcattgccagtgctgccacgtcggtattgattggctatctggcggcgaataccaccacgctgcatctggggtctggcggcgtgatgttgcctaaccactcaccgttggtcattgccgaacagttcggcacgctcaatacactctatccggggcgaatcgatttggggctgggtcgtgcgccaggtagtgaccaacggacaatgatggcgctgcgtcgccatatgagcggcgatattgataatttcccccgcgatgtcgcggagctggtggactggtttgacgcccgcgatcccaatccgcatgtgcgcccggtaccaggctatggcgagaaaatccccgtgtggttgttaggctccagccttttacagcgcgcaactggcggcgcagcttggtctgccgttcgcgtttgcctcacacttcgcgccggatatgttgttccaggcgctgcatctttatcgcagcaacttcaaaccgtcggcacgactggaaaaaccatacgcgatggtgtgcatcaatattatcgccgccgatagcaaccgcgacgctgagtttctgtttacctcaatgcagcaagcctttgtgaagttgcgccgtggcgaaaccgggcaactgccgccaccgattcaaaatatggatcagttctggtcgccgtccgaacagtatggtgtgcagcaggcgctgagtatgtcgttggtaggtgataaagcgaaagtgcgtcatggcttgcagtcgatcctgcgcgaaaccgacgccgatgagattatggtcaacgggcagattttcgaccaccaggcgcggctgcattcgtttgagctggcgatggatgttaaggaagagttgttgggatagtgtgtcttaacgcgggaagccttatccgagctggcaacgctgtcctacgtagacctgataagcgaagcgcatcaggcattgtgtaggcagcagaaatgtcggataaggcaccgctgattactgatacaccggcagtaaattaaagctcgataaaatatggaccagtgcgttgccaacgccaaacaccagaatcagcgtaatcatcggcttgccgccccagacgcggaatttcgggctgccaaagcgtttacgcgatgcgcgggctaacagcgccggaacaattgccgcccagatggtagctgctaaaccagcataaccaatggcgtacaggaatccgttcgggaacagtagaccacccacaacaggcggggcaaaggtcagcaatgccgttttcaagcgccccagggctgagtcatcgaaaccaaacagatctgccagatagtcaaacaaacccagcgttacgccaaggaacgaactcgctaccgcaaagtttgagaacacgaccagcagaaggtccaggctacggctgttcagcacgccgcttaatgcctgtaccagcacatcaatattaccgcccttctctgcaataccgataaactccggacgcgggatgttacccatcgtcgccagcaaccagatggtatacagcgccagtgccatcagcgtaccgtacaccaggcatttcacgatggttttcggatctttgccgtaatacttcatcaggcttggcacgttaccgtgataaccaaacgacgccaggcagaacggcaatgtcatcagcagatacggcgcataagatgcattgctttctgcaacgttgaacaatgtcgcaggctgcacatgccccaacaggctgccaaaggtgaggaagaaggtaatgactttcgcccccagcacaatcgccgtcatgcggctgacggccttagtactcaaccacaccacaaacgctaccagcagtgcaaaaccaaaacccgccgcccgtgccgggacgtttagcgacatctctgcgaaggtgtgatgcagaattgaaccactggcagaaatataggcataggtcaggatatagagcacaaaggcaatggaaataccgttgaccacgttccagcctttgcccagcaaatctttggtgatggtgtcaaaactcgaaccgattcggtaattcaggttagcttccagaatcatcaagccggaatgcagcatacagaaccaggtaaagatcagcgccgccattgaccagaaaaaccacgccccggacatgaccactggcagagaaaacatccctgcgccaataatggtgccgccgataatcaccacgccgccaagcagcgacggtgacgtttgggtggtggttagtgttgccatgagggcttctctccagtgaaaaatagtgcgactgcgttgttatgcattgcactgtaccagtacgcgagtacaaaagacagaaaaaaagccccgatggtaaaaatcggggctgtatatattattttacagattgtgttcgctgttcagcgatgattacgcatcaccaccgaaacgacgacgaccggtagagtcatcacgacgcggagcgcggccttcacgacgttcgccgctaaaacgacgaccatcaccacggccaccttcacggcgttcaccgctgaagttacgaccgccttcacgacgttcgccaccgaaaccacgaccaccgccacgacgctcaccgccagtatgcggctgtgcatcgcccagtaactgcatgttcatcggcttgttgagaatgcgagtgcgcgtaaagtgttgcagcacttcacccggcatacctttcggcagttcgatggtggagtgagaagcaaacagcttgatgttaccaatgtaacggctgctgatgtcgccttcgttagcaatcgcaccaacgatatgacgaacttcaacaccatcatcgcggcccacttcaatgcggtacagctgcatatcgccaacatcacgacgttcacgacgcggacgatcttcacggtcaccacgcgggccacggtcgttacgatcgcgcggaccacggtcatcacggtcacggaattcacgtttcggacgcatcggcgcatctggcggtacgatcagagtacgttcaccctgtgccattttcagcagtgccgcagccagagtttcgagatccagctcttcaccttctgcagtcggctgaattttgctcagcagtgcgcggtattgatccagatcgctgctttccagctgctgctgtactttagcggcgaatttttccagacggcgtttgcccagcagttctgcgttcggcagttctacttccggaatagtcagcttcatagtacgttcaatgttgcgcagcagacgacgctcgcggttctcaacgaacagcagcgcgcggccagcacgacccgcacgaccggtacgaccgatacggtgaacgtaagactcagaatccatcgggatatcgtaattaactaccaggctgatacgctcaacgtccaggccacgggctgcaacgtcggtcgcaatcaggatgtccagacgaccatctttcaggcgttccagtgtctgttcacgaagcgcctggttcatgtcaccgttcagcgcggcgctgttgtagccgttacgctcaagagcttcagccacttccagagtcgcgtttttggtacgaacgaagataatcgccgcatcaaaatcttccgcttccaggaaacgtaccagtgcttcgtttttgcgcataccccagacagtccagtagctctggctgatgtcaggacgggtagtcacgctggactgaatgcgcacttcctgcggctctttcataaagcggcgggtaatgcgacgaatcgcttccggcatggttgcagagaacagagcggtctgatgaccttccgggatctgcgccataatggtttcaacgtcttcgatgaagcccatgcgcagcatttcgtcagcttcatccagaaccagaccgctcagtttagagaggtccagagtgccacgtttcaggtggtccagcagacggcccggagtaccgacaacgatctgcggcccctgacgcagggcgcgtaattgcacgtcataacgctggccgccgtacagagcaaccacatttacgccgcgcatgtgtttagagaaatccgtcattgcttcagcaacctgtaccgccagttcgcgggtcggtgccagcaccagaatctgtggtgctttcagctcaggatcaagattctgcaacagaggtaaagagaatgctgcagtttttccgctccccgtctgggccatacccagaacgtcgcggccattcagcagatgtggaatacactctgcctgaattggagatggtttttcgtaacccagatcgttaagggcttcaaggataggagccttcaggcccagatctgcaaaagtggtttcgaattcagccatgtagtacgtgtgcctcaaaattaatggcggccagtctacataactcatcatgaaattgatcagcaattttcattgaaaagtgtgaaccggctcaaagtaggtgtattaacgaacaacaacgccctcacccgttaaggtgatggcaatcaaaaaagattacgggctgatgtgtacgtcagctattgctggtccgattctgccaggtcatcttggtcctggcccaggagcgataattccaacaatgcgtatcggtgctcaacaaagttatgaacgttgttggcaaccgccagtttgaacagtgccgtggcgctgtccaaatcccccagacttaggtagtacttacctaaatagaagttggtttcactgagatgctcagcgagcgaggtgttatccgttgcgtccgccttgagcctttccattaacgtttgttcgctaatgttgcccaggtagaactcgacaatgttccatccccactgttccttatccgatttttcgaagtgctgtttcaacacttctttagcctgcttctcatcgagcttctgctcggcgagaaaaagccacagactacggaaaggatcattgggatcgtcttgataaaacgccagcagatcatcttgcgctaacttgtcacgaccgccgtaatataatgcgatcccgcgattcaagtgcgcgtagttgtaagttggatcaagctcaagtacagaatcaaacgcttcataggcagcatcaaaattgcctgcctgcgttaaatatatgcctaagtaattgaatacttcaggcatatccggtcggattgccagcgcttgcgaaaaatcgttacgcgctaatgccctcagaccgagactatcatacaacactccgcgctcatataaaagctgtgcgcgttcgtcatcggttaaagcccgactggcaaggatttgttccatacgtgccagaatcacttcctgctgtaaagtcggttgcaatggtaccgcgaggacttcacttttacgccaggaagtattactgcatcctgcaagcgtaagtgctgtcgcaacgaaacaccagcgcaaaaaaggcttcatttcccactcccgaagaccacggttgaatgaacgtcctgttcccggttgctaacaaggcgtcctgcccggttaaaagccccccgccgcagcggagggcaaatggcaaccttactcgccctgttcagcagccggagcttccggtgctgcagcaggttgagactgctcagtcgcttctttaatgctcagacggatacggccctggcgatcaacttccagaactttcaccggtacttcctgacccatctgcaggtaatcggtcactttctcaacgcgtttgtcagcgatttgagagatgtggaccagaccttctttaccgccgccgatggcaacaaatgcgccaaagtcaacgatacgggtcactttaccagtgtagacgcggcccacttcgatttctgcagtgatctcttcgatacgacgaatagcatgtttcgctttctcgccgtcggtcgctgcgatcttcacagtaccgtcatcttcgatttcgatggtagtgccagtttcttcggtcagggcacggataacagagccgcctttaccgataacgtctttgatcttatccgggttgatcttgatggtatggatacgcggtgcgaactcagagatatcgccacgcggcgcgttgatcgcctgttccattacgcccaggatatgcagacgcgcacctttagcctggttcagcgcaacctgcatgatctctttggtgataccttcaattttgatatccatctgcagtgcagagataccgtcgcgggaacctgcaactttgaagtccatatcgcccaggtgatcttcgtcgcccaaaatgtcagacagtacaacgtagttgtcgccttctttcaccagacccattgcgatacccgcaacggcagctttgattggcacacctgcgtccatcagcgccagagacgcgccgcacacggaagccatagaagaagaaccgttggattcggtgatttcagacactacacgtacggtgtacgggaatttgtccatatccggcatgactgccagcacgccgcgcttcgccagacgaccgtgaccaatttcacgacgcttcggagaaccgaccatgccggtttcgcctacggagtacggagggaagttgtagtggaacaggaaggtatcggtacgttcgcccatcagttcatcaagaacctgcgcgtcacgagcggtacccagcgttgcagtaaccagtgcctgcgtttcaccgcgggtgaacagcgcagaaccgtgagtacgcggcagcacgccagtacgcacatccagaccacggatcatatctttttcacgaccgtcgatacgcggttcgcctgccagtacgcggctacgaacaacgtttttctcgatagcgtgcagaatttcacccagttcgttttcgtccagggtttcgtcttcagcaagcagcgtcgcgatggtttcagatttgatgacatcaacctgcgcataacgctcttgtttgtcggtgatgcggtaagcatcgctcaggcgagcttcagccagtgcagcaacgcgcgcgttcagcgcttcgtttaccggctccggctgccagtcccaacgtggtttaccggcttctttcaccagttcattgatgttctgaataacaacctgctgttgttcatgaccgaacactactgcgcccagcatctggtcttcgctcagcagttcagcttcagattcaaccatcagaacagcggcttcagtaccggcaacaaccagatccagtttgctctctttcagctcgtcctgagtcgggttcagtacgtactggtcattgatgtaacctacgcgagcagcaccaatcggaccattgaacggaataccagacagagacagtgctgcggaagcaccaatcatcgcgacgatatccgggttaacttgcgggttaacagaaaccacggtggcgataacctgaacttcgttgacgaagccttccgggaacagcgggcgaatcgggcggtcaatcagacgcgcgatcagggtttcgccttcgcttgggcggccttcacgacggaagaagctacccgggatacgaccagcagcgtaggtacgctcctgatagttaacggtcagtgggaagaagtcctgacctggtttggcttttttctggccaacaacggtaacaaataccgcggtgtcatccatgctaaccataacagcggcagtagcctgacgagccatcatgccggtttccagagtcacggtgtgttggccgtactggaatttacgaacgatcggattaagcaatgtaatatcctttctctttcttagacagtaccttacggcactggtgttaatacccgatcttctgcgcatcctcgcgactaatgacaaccctaacccagctctatgtgggtaaagcctctcattagccgcgcgaacctctgcaacggaagatcattcatagcaacaatacattagtttccagtgaattgctgccgtcagcttgaaaaaaggggccactcaggcccccttttctgaaactcgcaagaattagcgacgcagacccaggcgctcgatgagctgggtgtaacgtgctacgtctttacgtttcaggtagtcgagcagtttacgacgctgagaaaccatgcgcagcagaccacgacggctgtggtgatcttttttgtgctctgcaaagtggccctgcaggtggttgatctgtgcagtcagcagtgctacctgaacttcggtagaaccggtgtcgtttgcgtcacgaccaaactcagaaacgattttagctgttgcttcagtacttagagacattttaaaactccaaagtatatagaatgaaaggacgccgatctctaattcagcgatcccagtgtacgttacgcaaagtgttaaacaatttacgcgacgttaagcggcagtattctactcgtagcgacctgttatcgcaagacggttaacattacgccgggtattcaaccaccaggcgacgaggcgcaacgcggccttcatcgtcaatttcgcccataccgataaatttgccgttctcaccttctgtaacgcgaaccagtccttccagcggcgcaccggatgtacgaactgggttaccatttttgaagtaaacagaagacgttaacggaagattcaccaccgggtagtccgaagctggactgtccattggcatcagtaatggatcaagtaactccgcagccggaatatcctgctgttcggcttgttcgaccagttcacgcagatgttccagggtcaccatccgttcaaccggatatttacttaccgccagacgacgcaggtaaataacatgcgcgccacaaccgagtttttcacccaggtcatcaatgatggtgcggatataagtgccttttgagcagtgaatttccagctccagctcattgccttcgtggcgaataaacagcaattcataaacggtaatcgggcgcgcttcacgcggtacttcaatgccctgacgcgcatattcgtacagttttttaccctgatatttcagtgctgaatacatcgaagggatctgttcgatatcgccacggaaagtatccagcgccgccgccagttgctctgcgctaaaggttaccggacgttcttcaacgatttgtccgtcggcatcagaagtatcggtacgctgtccaagacgcgcaatgacccgatagcgtttgtcggagtccagcagatactgggaaaacttcgtcgcttccccgaggcaaattggcaacatgccagttgccagcgggtccagcgcaccggtatgcccggcacggttggcgttataaatccgtttcactttttgcagcgcatcattgctggacataccctgcgatttatccagcaacaaaacgccgttaatgtcgcgaccgcgacgacgaggacgactcattagtcctccttgctgtcgtccgggttaacacgacgttcttcgtcatgtttgaccacgctggtcaccaggtttgacatgcgcatcccttcaaccagagagttgtcgtagaagaaggtcagttccggcacgatacgcaggcgcatcgctttccccagcaggctgcggatgaaaccagaagcttcttgcaacgctttgatgcccgctttaaccgcgtcttcatctttgtcattgaggaacgtcacatatactttggcatacgccaggtcgcgagacatttcgacaccggaaacggtggtcatcatgcccaggcgaggatctttaatttcacgctgcaggatgagagcgatctctttttgcatttcctgcgctacgcgctgcgggcgaccaaattctttcgccataataaattctcctgacaaaaaaggggctgttagcccctttttaaaattaatttcaggtggaagggctgttcacgttggcctgataagacgcgccagcgtcacatcaggcaatccatgccggatgcggcataaacgccttatcccgcatggaaccctaaaaaccttaagcgatggtacgttggatctcgatgatttcgaatacttcgatcacatcgccagtgcggacgtcgttgtagttcttaacgccgataccacattccataccgttacggacttcgttaacgtcatctttgaagcggcgcagggactccagctcgccttcgtagataaccacgttgtcacgcagaacgcggatcgggttgtgacgtttaaccacaccttcggtaaccatacagcctgcgatggcaccaaatttcggcgatttgaacacgtcacgaacttccgccagaccgataatctgctgtttcagttccggagacagcataccgctcatcgccgctttcacttcgtcaatcaggttatagatgacggagtagtaacgcagatccaggctttccgcttcaatcactttacgtgcagaggcatcagcacgtacgttgaagccaaccaggatggcgttggacgccgcagccagggtggcgtcggtttcggtgataccacctacgccagaaccgatgatcttcactttaacttcgtcagtagacagtttcagcaaggagtcggagatcgcttccacagaaccctgtacgtctgccttcaggacgatgttcacttcgtgaacttcgccttcggtcatgttggcgaacatgttctcgagtttagatttctgctgacgcgccagtttaacttcgcggaatttaccctgacgatacagtgcaacttcacgcgctttcttctcgtcacgtacaacggtaacttcatcacccgcagccggtacgccggacaggccgaggatttccaccggaatggacggacccgcttccagcacttcctgacccagttcgttacgcatcgcacgaacacgaccgtattcgaagccacacagaacgatatcgcccttgtgcagagtaccttcacgtaccagaacggtagcaaccggaccacgacctttatcgaggaaggattcgataaccgcaccgctcgccatacctttacgtaccgctttcagctccagaacttccgcctgcagcaggatagcgtccagcagttcatcgatgccggtacccgctttcgcagatacgtgtacgaactggctttcaccgccccactcttccggcaggatgccatactgggagagttcgttcttaacacgatccggatcggcttctggtttatcaatcttgttcactgcaaccaccaccggtacctgcgccgctttcgcgtgctggattgcttcgatggtctgcggcatcacgccgtcgtcggcagcaacaaccaggactacgatgtccgttgcctgcgcaccacgtgcacgcattgaagtaaacgcggcgtgccccggggtgtccaggaaggtgatcatgccgttttcagtttcaacgtggtatgcaccaatgtgctgggtaatgccgcccgcttcgccagaggcaactttcgttgaacgaatgtagtccagcagagaggttttaccgtggtcaacgtgacccatgatggtcacaaccggcgcgcgcggttcagccgcagcacccgtgtcacggtcgctcattaccgcctcttccagctcgttttcacgacgcaggataactttgtggcccatctcttcagcaaccagctgtgcggtttcctgatcgataacctggttgatggttgccattgcgcccagtttcatcatcgctttgatgacctgagagcctttaaccgccatcttgttcgccagttcgccaacggtgatagtttcgccgatcacaacgtcacggttaacggcctgagcaggcttctggaagccttgctgcagggaagaacctttacgttttccgcctttaccgccacgtactgctgcgcgtgcttcttcacgatcagcttttgattcagcgtgtttgttacctttcttcggacgcgctgctttcgcgttacgaccacggccacggccgccttcgacttcacgatcgctttcgtcttcggcctggcgagcatgttgagaagtagtgacgtgataatcgctggaatcttcagtcggttccgcgttatcagtccatttgttttcttccgccatacgacgtgcttcttcagcaacgcgacgtgcttcttcttcgagtttacgacgcgcttcttcttcagctttacgcttgagctctgcagcttcctgctcacggcgggctttttcagcctgggcgtttttagtcatatcgtcttgttgattgctcactttgtctttttccgcagcttcacgtttcgcttgttcagcagcttcacgcttagcttgttctgcggcctcacgttcagctttttgttgcgcctcgcgtttagccgattcttctgcctcacgacgggcttgctcttccgcttcacgctgcgcttgctcttccgctgcaaggcgttcagcctcttgcggatcgcgtttcacaaaggtgcgtttcttgcggacttcgatttgtaccgatttgctttttccaccggtaccaggaatgttaagggtgctgcgtgttttacgctgcagcgtcaatttgtccgggcctgaatttttctgattcaggtggtcaatcaaagtctgtttctcttgtgcagacacagagtcgtcagcagacttccggatacctgcatcagcaaattgctgtaccaggcgttccacggaggtctgtcgctctgcggccagcgttttaatcgttacatctgtcatgctgttccttcctgctacagtttattacgcttcgtcaccgaaccagcaaatattacgggcagccataatcagtgctccggctttttcgtcggtcaacccttcgatatcagccagatcatcaatgccctgttcggcgagatcttccagcgtacaaacgccacgggcggccagtttgaatgccaaatcacgatctaccccttcaaggttcagcagatcgtcagccggtttgttatcaccgaggctttcttcctgggcctgtgcaatggtggccagtgcatttttagcacgctcgcgcagtgcttcaacggtcggctcatcaaggccttcgatttccaacagctctttcatcggcacataggccagttcttccagcgtcgagaagccttcttctaccagaacagtcgcgaagtcttcgtcgatgtcgagatatttggtgaaggtgtcgatcgctgcgtgcgcttccgcctgatgcttagcctgcaggtcgtcaacggtcatcacgttgagttcccaaccgctcagctgcgaagccagacgcacgttctgaccgttacggccaatcgcctgcgccaggttaccggcttcaacggcgatatccatggtgtgtttatcttcatccaccacgatagaagcaacgtctgccggtgccattgcgttaatcacaaactgcgccgggttatcatcccacaggacgatatcgatacgctcgccgcccagttcagtagaaaccgcctgaacacgcgcgccacgcatacctacacaggcacctaccggatcgatacgtttatcgttggttttcaccgcgattttcgcacgagaacccggatcgcgagccgctgctttaatttcaatcacttcttcgccgatttctggcacttcaatacggaacagttcgatcagcatttccggcttggaacgagtgacgaacagttgcgcgccacgcgcttccgggcgaacggaatagagcacgccacgaacgcggtcgccagggcggaagttttcacgcggcagcatatcttcgcgcaggatcacggcttcagcattgttgcccagatccagagagatgttgtcgcggtttacttttttcaccacgccggtgatgatttcaccttcgtgttcacggaactgatcaaccaccatcgcacgttcggcttcacgcactttctgcacgataacctgttttgccgtctgggtagtgatacggtcaaaggtaacagactcaatctgatcttcaacgtaatcgcccaggttcaggctttcatcttcataacgtgcggcttcaagggtgatttccttggtcggctgggtgacttcatcaacaactaaccagcgacggaaggtgtcaaaatcaccgcttttgcgatcgatctgtacacggacgtcgatctcttgctcatattttttctttgttgctgtcgccagcgcgctttccaatgcttcgaaaatcttctcgcgaggtagcgccttttcattggatacggcttcaactacagccaaaatttctttgttcatcgcgggcttttcacctcatccagactattaaaagtggggaaccaggttcgccttctggatattactcagcgcgaacacttcatctttaccttcgacggtaaccgtgatcatttcaccgtctaccgctttgataacgccctgccatttacgacggttttgtaccgccatacggagaaccagagtcacctcttctccgacaaaacgggcgtagtgttcagccgtgaacagtgggcgatcgagacccggtgaggagacttccaggttataagcaacggtgatgggatcttcaacatccagcacagcacttacctggtggctcacatcagcacaatcatcaacattgatgccatcttcactatcaatatagatgcgcagtgtggatgtgcgaccgcgaataaattcgatgccaaccagttcaaaacccagggcctcaactggcgcagtaatcatctctgttaatttttgctctaatgtggacaagcccacccccaagacataaaaaaagggcctaaagcccagttattctgtagtcagataacaaaaaaccccgataaatcggggctttatataactgaaccctataaccgcaactgcggtctggagcactttccagaaggattttttcaaatcccactacgaaggccgaagtcttcacagtatatttgaaaaaggactctaagggaaagtggttgcgggggccggatttgaaccgacgaccttcgggttatgagcccgacgagctaccaggctgctccaccccgcgcctgaaacgtggcaaattctactcgttttgggtaaaaaatgcaaatactgctgggatttggtgtaccgagacgggacgtaaaatctgcaggcattatagtgatccacgccacattttgtcaacgtttattgctaatcatgtgaatgaatatccagttcactttcatttgttgaatacttttgccttctcctgctctcccttaagcgcattattttacaaaaaacacactaaactcttcctgtctccgataaaagatgattaaatgaaaactcatttattttgcataaaaattcagtgagagcggaaatccaggctcatcatcagttaattaagcagggtgttattttatgacgacgattctcaagcatctcccggtaggtcaacgtattggtatcgctttttccggcggtctggacaccagtgccgcactgctgtggatgcgacaaaagggagcggttccttatgcatatactgcaaacctgggccagccagacgaagaggattatgatgcgatccctcgtcgtgccatggaatacggcgcggagaacgcacgtctgatcgactgccgcaaacaactggtggccgaaggtattgccgctattcagtgtggcgcatttcataacaccaccggcggcctgacctatttcaacacgacgccgctgggccgcgccgtgactggtaccatgctggttgctgcgatgaaagaagatggcgtgaatatctggggtgacggtagcacctataaaggaaacgatatcgaacgtttctatcgttatggtctgctgaccaatgctgaactgcagatttacaaaccgtggcttgatactgactttattgatgaactgggcggccgtcatgagatgtctgaatttatgattgcctgcggtttcgactacaaaatgtctgtcgaaaaagcctactccacagactccaacatgcttggtgcaacgcacgaagcgaaggatctggaatacctcaactccagcgtcaaaatcgtcaacccaattatgggcgtgaaattctgggatgagagcgtgaagatcccggcagaagaagtcacagtacgctttgagcaaggtcatccggtagcgctgaacggtaaaacctttagcgacgacgtagaaatgatgctggaagctaaccgcatcggcggtcgtcacggcctgggcatgagcgaccagattgaaaaccgtatcatcgaagcgaaaagccgtggtatttacgaggctccggggatggcactgctacatatcgcttatgaacgtctgttgaccggtattcacaacgaagacaccattgagcagtatcatgcacatggtcgtcagttgggccgtctgctgtaccaggggcgttggtttgactcccaggcgctgatgctgcgtgactctctgcaacgctgggttgccagccagatcactggtgaagttaccctggagctgcgccgtgggaacgattattcaatcctgaataccgtctcagagaacctgacctacaagccagagcgtctgacgatggaaaaaggcgactcggtgttctcgccagatgatcgtattggtcaattgaccatgcgtaatctggatatcactgatacccgagagaaactttttggttatgccaaaactggcctgctctcctcctctgccacttcaggcgtgccgcaggtggagaatatggaaaacaaaggccagtaattcgacatcaaccctgcccttcaggggtggggttaccttgcttatcctctgtaaactcctttctgagcatcacataatcgaaaacatcatggtttgcatccacaacccgtgagtctcctttatagtgtgcaatcacttcctcaagcgtttgcggctgttccggctttgttacccccatccacgcattaataaggtaattattgtaagctgtcgaaaagatgttgttttccgttgtgcgatccacgccatccccaagaacggggctataccagataaacatcgggacatgatatgcctgctggctggcctccctgcctccatgaaaatagacgttcttcttcgtagggtcgcgttccaggccgtggtcggcaaaatacatgaccgaggcgcggcgatcttttaataattcaaaaacctgacctagcaaactgtctgtgtaatgaatggagttgtcatagcaggcatcctgatcgtcctgcggttgaaacacggcgctggattgcggataggcgctacaagccggttcatggcttccatttaaatgaagaacaatcagtttcttttgctgcgtcttttgctgtaacgcttgcgataaatgcggcaacaacaattcatcaaatcctctgacatagactgtttccatggcgcgcatggcgatactggtaactgctgtaccattctgccgaaaagcggattgcgagcttagccagaaagtctgaaatcctgcttgattagccatattaataatgttgtcggggtaattatgaatgtcatgactcaaaacagaatcagcagttaaagaaaggggaaccgacagcgcagtgtaaggtgcgccgcttattgcttgattaaacagtttgatctgttttctttgtgcttcaacttgcggtgtcgtagagcgtgtatatccatacaaagacatattgtcgacacgtacagactcccccacaatcaacacgtaggtatcaatacctgtatccctgactgataattgaaaatacggcaccgtgtttgcaattgagagtaatctttgatgctctttcgctgctaaagcaaaatagttgagattaaaaaacggcgtataggtagcaaatcgcgacgctagtatatatggactgaacgcttttttattttttgcatctttataagcaaattgacaagtggaaaataaactgcccgaaatgacaatcagcaataatattcctgtcactttttttgtcggcaaggaaacatcatattttattattactgccaaaaaaagaagggataaaaaagcaaaagcacatagataagggatatacatccccagcattttgacaacttcatccggatcactctgcagcacactaatcgcaaatccatcattgaaagttgtaccaaaggtacaccatgaatagaggctaatactcatgtctgccgcagtcagtaacacaaatggtgcggcaacaagcaggcgaagcggaagggatgatatacgtttaacaaccaggatggtcaggacgaagaacagcaatcgctgaaccatatgcgctccggaagaggcgactaagttcgtaataccaaaaacaataacacaaagatacaacaaccaatgagatttaaaacttctagcaaatttgttgaatactgtcatccagaaatccaagttcacaaccaatataaacaattatcaacaatgttcaattttatatcagacatgtttttcaactctgatccatatcagaccgaaacactgttagttttttctttttaaatgatgcggccattgttctcagtaattaaataacattatcaatgcgtctctaaacattacgcagaacgtagccatcagtagttatactgacaggagcaggatggtttatcgagaagtaaacatatccgtattcgtaccggaactggagttgacacaataaagtgccaattatgtcagcagtagggaaaagtttataactaaggcgtaccggcaccatcgtttcaaagtaccagctacgagtaaagcaactggacgagatacagatacctgacaaccattcctcagaccaggaccaaaacgaaaaaagacgcttttcagcgtctcttttctggaatttggtaccgaggacgggacttgaacccgtaagccctattgggcactaccacctcaaggtagcgtgtctaccaattccaccacctcggcacggatactactttttagttcgggatatcgctggtcggcttagccggagcagctggctgagtttgttcggttttcgccggcgcactcaggttttcccattcgctacctttattggttttattgctattgatgttacccagcaccagactgatgatgaagaataacgttgccagcagcgccgtcatgcgggtcatgaagttaccagaaccacttgaaccaaacagcgtagcggaagcgcctgctccgaaggaggctcccatatcagcgcctttaccttgctgcagcatgatcagaccaacaaggccaattgccacaataaggaaaactactaaaagagcttcgtacataatcaacctgttccttgcggagttgccgcgtaccaatgcttcaaccaataaagcgggagtttttaatctttcccactgaagcgggtgtgaatactaaccaaagcgaatgaccttcgcaagggcaattttatcgcattgtatcaactgcggaaaaaaacagcaaaaccgatgtgttcgctgagaaaaaaggcgacaatcgccgcctttttagccagttatctaacgctttaaacggcttttactgcatcggcgatgcggtgtgcaaattcagtcacctgcgcttcgtcttcgccttccaccatcacgcgaattaacggttcggtgccggatttacgcagcaacacgcgtccacggttgcccagcgcaacttcaacctctgcggtcacggctttaactgactcatgctcaagtggatcgccgctacctgcggtgtaacgtacgttaaccagaatctgcgggaacattttcatgccgctgcaaaggtcgtgcaggctcatatggttacgtgccatcgccgccagcacctgcaagccagcaacgatgccgtcaccggtagtagttttatccagcaggatcacatgaccggaattctctgcaccgatacgccagcctttctcctgcattttttccagtacgtagcggtcacccactttcgcgcgcgcaaatggaattcctaactgtttcagcgccagttcaagccccatgttgctcatcaatgtacccacagcgccaccacgcagctggccctgacgaagaccttcacgcgcgatgatatacatgatctgatcgccatcgactttattgccttcatggtcaaccataatcacgcgatcgccatcgccgtcgaaggcaataccgagatccgctttttcagccagcacacgagcctggagcgcgcgaacgtcggtagcccccacttcggcattgatgtttacaccgtttggctcacaaccgatagcgataacgttcgcccccagttcgcgcagcacgttcggcgcgatgtgataagtcgcaccgtttgcacaatccaccacaatcttcagttcactgaggctaagttcgttcgggaatgtggctttgcaaaactcgatatagcgacccgcggcatcaacgatacggctggctttacccagttctgccgaatcaacgcagctgatctccttttccatttccgcttcgatggcctcttctaccgcatccggcagtttggtgccgtcgatagagaagaatttaatgccattatcgtagaacgggttatgcgatgcagatatcacaattccggcctctgcgcggaaggtacgcgtcagataagccacggccggtgttggcatcgggccagtgaagagtgcggaaaggcccgctgccgccagacccgcttccagtgctgactccagcatatagccagaaatacgcgtgtctttaccaataataatcttacgggagccgtggcgcgccagcactttacccgcggcccaacccagcttaagcacaaaatcaggtgtgatcggcgcatcccctacacgaccacgaatcccatcggtaccgaaatatttacgattactcatagcgtttgttttcctttgcagacagagtggcttccaccacccgcatcgcttctacggtttctttgacgtcatgaacacgaatgatgtgcgcgccttgcattgcggcaatgaccgcacaggccagactaccgctcaggcgctcggacggccccacgttcagcagctgcccaatcatcgattttcgtgacatacccaccaacagcggcaggttgaaatggtgaaattcagccaggcgcgccagtaatgaatagttatgggagagatttttaccgaaaccgaatccggggtcgagcaacaatttctcttttgcgatacccgcctgctcgcaacgtgctatttgctcaataaagtagcgattcacttctgcaaagacatcgtcatacttcggagcttcctgcatggtttttggatttccctgcatatgcatcagacaaaccggtaaaccggtttctgcagccgcctccagagcgccaggttcggaaagggagcggatatcattaataatgtgagcgccaactttcgctgactcacggatgacttctggtttggatgtatcgaccgagatccagacttcgaagcgttgagcaattgcctcaaccacaggaataacacgttgcaactcttcttcaacgctaacttccgccgcccctgggcgcgtggactcgccaccaacgtcaatgatcgtcgcgccagcattgatcatcagattcgcatgtttcaccgcatctatcagcgagttatgcgtgccaccatccgaaaaggaatcaggcgtgacgttgaggatccccattacgtgaggatggctaaggtccagtgaagtaccctgggcaaagagtttcatgatgttatccctggtatgaattgataagaaaaaaccccggagcacgccccggggttttcggtacaaatacagtcatctgatgcgggaacttacttgtcgcctaactgctctgacatggtgttacccgggttcggcgtacgcggttcatcaaccggacgaggagcctttggactaccattgtcgccagaattgttagaagcgcctggttcttcccagcccgctggcggacgtacatcgcgacgtgccatcaggtcatcaatctgcggtgcgtcgatagtctcatatttcatgagagcatctttcatcgcatgcagaatatccatattgtcggtcagaagctgacgcgcacgattatagttacgctcaatcagtgctttcacttcctggtcgatgatacgtgcagtttcatcggacatatgtttcgctttcgctacgctacggccgaggaatacttcaccttcttcttccgcgtacagcagtggacccaatttctcagagaagccccactgggtcaccatgttacgtgccagattggtcgcaactttaatatcgttggacgcaccggtagaaacatgttccggcccatagatgatctcttctgccagacgaccaccgtacagcgtagaaatctggctttccagtttctgacggctggcgctgattgcgtcgccctcaggcaagaagaaagtcacacccagcgcacgaccgcgtgggataatcgtcactttgtgcaccggatcgtgttccggcaccaggcgaccgataatcgcatgacccgcttcgtggtaagccgttgattctttctgcgcttccgtcatcaccatggagcgacgttccgcacccatcatgattttgtctttcgctttctcgaactcaaccatcgacacaacgcgtttgttgccacgagcagcgaacagtgccgcttcgttcaccaggttcgccaggtcagcaccggagaaaccaggagtaccacgggcaatgattgccgcgtcgatatcgggggccaatggtacgcgacgcatgtgaactttcaggatctgctcacgaccgcgaacatctggcaagccgaccacaacctgacggtcgaaacggccaggacgcagcagggccgggtcgagaacgtccggacggttagtcgcggcgataacgatgataccttcgttaccttcgaagccatccatctcaaccagcatctggttcagagtctgttcacgttcatcgtgaccaccgcccagaccagcgccacgctggcggcctacggcgtcgatttcatcgataaagatgatgcacggtgccgctttcttcgcctgttcgaacatgtcacgaacacgggatgcacccacaccgacgaacatttctacgaagtcagaaccggagatagtaaagaacggaactttcgcttcgcctgcaatcgctttcgccagcaacgttttaccggtacccggaggaccgaccatcaggacgcctttcgggatcttaccgccgagtttctggaagcggctcggctcgcgcagatactctaccagttcagcaacttcttcttttgcttcgtcgcagcccgcaacgtcagcaaaggtcgttttgatctgatcttccgtcagcatgcgcgctttgctcttaccaaacgacatggcacctttgccaccgccgccctgcatttgacgcatgaagaagatccagacaccaatcagcaacagcatcgggaaccaggagatgaagatagaagccagcaggcttggttcttcaggcggttcaccgacaaccttgacgttcttggtcaacaggttatccagtaatttcggatcctgaaccggaatgtaagtggtataacggttactatctttcttggtaacgttgatttcacgtccgttgatacgcgcttcacgaacctggtcgttattgacctcttgtaggaaggtagagtaatccaccttacggccattagactcgctgggcccaaagctctggaatactgacatcagcacaacggcaatgaccagccagagtattaggtttttcgccatgtcactcaagggattaacctcttattacaactgtgttaaaaacagcgtcaggatactctatatccagcatctttcaaactttcgtctgaaatctcccggttagggtttacgcccggtcgctacaatatacacttcccgcgaacgtgcacgagaagagtccggcttacgaactttgacctcgtaaacagggagcgaatttcccttagatactcatcgaaaccttcgccctggaacaccttcactacaaaactgccacctggcgctaatacatcacgacacatttctaacgccagttccaccagatacatggcacgggggatatccaccgccggtgttccgctcatgtttggtgccatatcggacatgacaacctggactttgctgtcgccaacgcgctccagcagtgctttcatcaccagttcatcacgaaaatcgccctgaagaaagtccacaccaacgataggatccataggtaaaagatcgcaagcgatgatgcggcctttgccgccaatttgggtgaccacatattgtgaccaaccacccggagcagcaccaaggtcgacaaccgtcattcccggtttaaagagtttgtcactttgctgtatttcatcaagtttaaaccaggcacgggaacgtaacccctttttctgtgcctgttgaacatatttatcgctaaagtgttcctgaagccagcggctggagctggcagaacgcttcttacctgtcatttaactttcccatggggataactcatcgtaaccaattgcgtaaatttttacgcgcctatttggtgatatatgggagatggcggtagaatgacccgttttcaatcccaacgtaagcaaaaaatacgatgaatctgagtactaaacaaaaacagcacctgaaaggtctggcacatccgctcaagccagttgttctgcttggcagtaatggtttgaccgaaggggtgctggccgagattgaacaagcgttagagcaccatgaactcatcaaggtgaaaatcgccaccgaagatcgcgaaactaaaaccttgatcgtggaagctatcgtgcgcgaaaccggcgcctgtaatgtacaggtcatcggtaaaacgctggtgctttatcgcccaactaaagaacgtaaaatctcgctgccacgctaagattatcctaaagttacacacatttgctgtgtaaaacgaggggttttccgcaggcaggagagcaaaatgccacgctctgttcgttgataaaaggccgcatagcggcctttttcctttctttacaatacatcaacatcttgagtattgggtaattcttacaggtattccaccttaattacttcaaattctacttcgccgcccggcgttttgatgaccacaacatcatcttcttctttgccgatcaggccacgagcaataggcgagtttacagaaatcaggttttgtttaaagtcagcttcgtcatcgccaacgatgcgataagtctgttcttcgtcagaatccagattcagcaccgttacggtagcaccaaaaataacgcgcccattgttgggcattttggtgacatcaatcacctgcgcgttcgacagcttggcttcgatgtctttaatacggccttcgcagaaaccctgctgttcacgagctgcgtggtattcggcgttttctttcaggtcgccatgctcacgcgcttccgcgatagcagcaatgatttcaggacggcgcacagatttcagaaaatccagctcttcgcgtaatttttcagcgccgcgtaaggtcatcggaatagcttgcatttgttatacctcttgaatattcctgatggggcaagtcttcacccaccccggctgttcggcctgcccggcataactcctcaccgggaccagaagcaaaaaaataccgacccgggtacaagtcccaggtcagctacaattcacattttgatagtcattttaccctgaagttcccgaagggtcatcgtttactttatagggcgttgcgccgtagtatgacggctcgattccaggttgttagcgcgagattatgcgattttccagatttatcatcggattgaccagctgtatagcgttcagtgttcaggccgcgaatgttgatgagtacgttactcaactccccgctggtgccaaccttgccctgatggtgcaaaaagtcggcgcgtcggcccccgctattgattaccacagtcagcagatggcgctgcccgccagtacgcagaaagtgattactgcgctggcggcgttgattcaactcggccccgattttcgtttcaccacgacgcttgaaaccaaaggcaatgtggaaaacggcgtacttaagggtgacttagtggcgcgatttggtgccgatccgacgttaaaacgtcaggatattcgcaatatggtcgcgactttgaaaaaatctggcgtcaaccaaatcgatggcaatgtgttgatagatacctccattttcgccagccacgataaagcccccggctggccatggaatgacatgacacaatgctttagcgctccgcctgccgctgccatagttgaccgcaactgtttctccgtctcgctctacagtgccccaaaacctggtgatatggcttttatacgcgtggcatcttattaccccgttacgatgttcagccaggtacgcaccctcccccgaggttctgccgaagcgcaatactgcgaactggatgtcgtaccaggcgacctgaaccgctttacgctgacgggatgcctgccacaacgttctgagccgctcccgttggcttttgccgtgcaggatggagccagctatgccggggcaattctgaaagatgagttaaaacaggcaggtatcacctggagcggaacactgctgcgccagactcaggttaacgaacctggaacggtagttgccagtaaacagtcggccccgttgcacgatctgcttaagattatgctgaaaaagtcggacaacatgatcgccgatacggttttccgcatgataggccatgcgcgcttcaatgtgcctggaacatggcgggccgggtcggacgccgtgcgtcagatcctgcgccagcaagccggtgtcgatattggaaacaccattattgccgatggttcagggctttcgcggcataacctgattgcccccgccaccatgatgcaggtgttgcaatacattgcccaacacgacaatgaacttaactttatctccatgctgccgctggcgggctatgacggctctttgcagtaccgtgcaggtctgcatcaggcgggcgtggatggaaaagtctcagcgaaaaccggttcgttgcagggggtatataacctggcgggattcattaccacagcgagcgggcaacgaatggcgtttgtacaatatctttctggctatgcagtagaaccggcggatcagcgtaatcgccgtattccgttagtgcgttttgaaagccgtttgtataaagatatttatcagaacaattagtcaaaaagaaaccccggcacatggccggggttttgctgattaacgcttgtaaatgaactcaacgccttcttcgtcgtcttcgtcccagtcatcatcccagtcctcatcatcctcttcagcaatctcttcaagctgctggcgatgataatcatcccacatgaattcgactttctctggctgtttcgcttcttcagcctgcacgaccgggttttcaatgataaaggtcatcacatcccagcagagatctttcacgcccagtccactcgccgcagagatcagataatatttatcttcccagcccagcgcttcagcaatcgctttcgctttctcttcagcttctgccttatccagcagatcgatcttattgaacactaaccaacgcggtttcgccgccagatcctggctgtatttttccagctcgctgataataatacgcgcgttttcaaccggatcggtgccgtcaatcggatcgatatcgatgaggtgcaacaggacgcggcaacgttccaggtgcttcaggaagcggatacccagacctgcgccttccgcagcgccttcaatcagtcctggaatatcggcaacaacgaagctcttttcgttgtccattcgtaccacacccagacttggcaccagagtggtaaacggataatccgccactttcggtttagccgccgataccgcgcgaataaaggtcgatttacccgcgtttggcatccccaacataccgacgtcagccagcagcatcagctccagcagcagctcacgcttatcacccggcgtaccgttggttttctgccgtggtgtacggttaacggacgatttgaaacgggtattgcccagaccgtgccagccgcccttagcaaccagcagacgctgaccgtgtttagtcatatcgcccatggtttcaccagtaccctggtcgattacacgcgtacctaccggcactttaatcgtcacgtctttaccgcgcttaccggtacaatcgcggcttgcgccgttctgaccgcgctctgcacggaaagatttttcaaaacgataatcgataagcgtgttcaggttttcgtcggcttccatccatacgtcaccaccatcaccaccgtcgccgccatccgggccgcctttcggaatatacttttcgcggcggaagctcacgcaaccattaccgccatcacctgcaacgaccagaatcgatgcttcatcaacaaacttcattttattctccgtaaatcattcgcctgcgcggggttgcgataccaccgttgtatgcttacgtaatccgccccaaatacgatgaccaatggcggaatacatcgcgcccgcaaccacgacaaacgcaccgagataacctaaaaggtttaacatcggtctggcgaagaaatcgggccaggccagtgataaaagatctgaaaaaaacagcgtaaacagtggggtgagcgtgatgatcgcgctcacctgcgctgcctgccagcgagccatcgcttccgccagggcgccatatcctaccaatgtattcagtccgcaaaaaattaaacatgcgagctgccagtggctaagctgcgctatcactccagctttgccagagggaagagcgcaattgtacataaagtgtacagtaaaaacaggatctgcggtgaggccagccgacgcaataaaaccttttgcgccacgccataactcacccaaaccgtcgccgcaccgaccccaaagataactccccaggtgtaatcggtgagctttgtaaatatctcgaccagactggtgttaaaaaacatcaccaggccgctcaggagcatcaatgcccctacaacctgagtgctgcgcattttctctttcaggataaatacgctggcaaccatcatgccaactggcgagagttgcccaatcacctgcgaagcggtcggactcaggtattgcaaggatgagctgaacaggatgaagttcccaaacagcccggcggtcgccactgccaacaaaatcaaccagcgtggcttacgaaacacgcgtaatggcggcaacctcttcttcaccgcaagaatggcaccaaggccaatactcgccatcaagaaacggtaaaacacgattgtcggaggttccatcacctccagcacctgcttcattgcgattggcaacgccccccagcaaattgctgtggtgagcgccaaaagaatgccaatgcctgcctgctgcttcataccgtattccctgcaaagcgcatttgcggattaacgtcgcaccatgcgcatttttaccggttatcgaatgtaaaaagccccgcaacgtgttgcggggctttcatccgttaccgggacgcgaaaaacttattcagcttcgatgctgataaatttacggtttttcgggcctttaacttcgaatttcactttaccgtctgctttagcaaacagagtgtggtcacgaccgcaacctacgttagcgccagcgtggaatttggtaccacgttgacgaacgatgatgctacccgccagaacggattcgccaccgaaacgcttaacgcccaggcgtttagcttctgaatcgcgaccgttacgtgtggagccgccagcctttttatgtgccatttgaaatctctcctcaggtcttaggcgctgatgccagtaattttcacatcagtgaaccactgacgatggccctgctgcttacgatagtgtttacgacgacgaaacttaacgattttaactttctcgccacgaccgtgagcaacaacttcagctttgattacgccgccatcaacgaaaggaacgccgattttgacttcttcaccgtttgcgatcatcagcacttcagcgaactcaacagtttcgccagttgcgatgtccagcttttccaggcgaacggtctgaccttcgcttactcggtgttgtttaccaccactttggaaaaccgcgtacatataaaactccgcttccgcgcacaccttttcaatgattcagagtgcgctataaatattcacaatagggcgcgaatattacgcaaaacgcacgcctttgacaagtgctacagtcaatacacgaagaaaaaaaacacaacttgtacggtaacgtttatctgtgccatttttcagtacaatcaccctatattcctaaccataaaccctaagttgcctttgttcacagtaaggtaatcggggcgaaaagcccggcttttgcgatgaatttagaaaaaatcaatgagttaaccgcgcaagatatggcgggtgttaatgcggcaatccttgagcagcttaattccgacgtccaactgatcaatcagttaggctattacatcgtcagcggcggcggtaaacgtattcgtccgatgattgctgtactggctgcacgagctgttggctatgagggaaatgcgcatgtcaccattgctgccctgatcgagtttatccacacggcgactctgctacacgacgacgttgtggatgaatcagatatgcgcaggggtaaagctaccgccaacgctgcatttggcaatgccgccagcgtgctggtaggcgattttatttatacccgcgcgttccagatgatgaccagcctcggttcgctcaaagtgctggaagtcatgtcagaagccgtaaacgtcatcgcagaaggtgaagttctgcaactgatgaacgttaacgatccggacatcactgaagaaaactacatgcgcgttatctatagcaaaaccgcgcgtctgtttgaggctgccgcgcagtgttccgggattctggctggctgtacgccggaagaggagaaaggcctgcaggattatgggcgctatctcggcactgctttccagttgatcgacgatttactcgattacaatgccgatggcgaacagttaggtaaaaatgtcggcgacgatctgaacgaaggtaaaccgacgctgccgctgctgcatgcgatgcatcatggcacaccagaacaggcacagatgatccgtaccgccatcgaacagggtaacggtcgccatcttctggaaccggttctggaagcaatgaacgcttgtggatctcttgaatggacgcgtcagcgtgccgaggaagaagcagacaaagccatcgcagcattacaggtgctcccggacaccccttggcgagaagcactcatcggcctcgcgcacatcgctgttcaacgcgatcgttaatcccctcccttcatcccgcgcagtgcgcgggatgattccagtaaattccataaaaacactaattcagcgctataacacctgaaaaaaagggctgtgcatctttatatattctgaatattcacactttttacaggaactttttagagcaataggccatcaggagtatagtgatgcccgacagaagaagtgttctgaatgaaagcgactaacttaaggagtgaggaaagatggaaagtaatttcattgactggcatcccgctgacatcattgcgggtttgcgcaagaagggaacgtcaatggcggcggagtctcgcagaaatggtttgagttcctcaacgctggcaaacgcattatcgcgcccatggccgaaaggagagatgattattgcgaaagccctgggaactgacccctgggttatctggccatcacgctaccatgatccgcagacccatgagtttatcgacagaacgcagttgatgcgtagctacactaaaccgaaaaaatgagtggtctggcggtagccccgcgaacggggctgccagctctcagacgattactcgcctttcacacgctcaatatttgcacctaaagcgcgcagtttgtcttcaatgcgttcgtagccacgatcgatgtgataaatacgatcaaccaccgtcgtcccttccgcaatacagccagccagcaccaggcttgctgatgcacgcagatcggttgccataacctgtgcgccagaaagtttttcaacaccgtgacaaataacggtattgctttcgatttcggcatgcgcgcccatacggctaagctccggcacatgcataaagcggttttcaaagaccgtttcggtgatgaatccggtcccttctgccaccaggttcaacagcgtgaactgggcctgcatatcggtcgggaatgccggatgcggcgcggtacgtacgttaacagccttcggacgtttgccatgcatatccaggctaatccagtcttcgccgacttcgatgtccgctccagcgtcacgcagtttcgccagcacggcgtcgagagtatctggctgcgcgttacggcagataattttgccgcgagaaatcgccgccgccaccaggaaagtaccggtttcgatacgatccggtagcacgcgatagacaccgccgcctaaacgttccacaccttcgatgacgatacgatcggtgccctgaccgctaattttcgcacccagcgtaatcaggaagttcgcggtatcgacgatttccggttcacgcgctgcgttttcaataatcgtggtaccttccgccagggttgcagcacacatgatggtcaccgttgcgccaacgctgactttatccatcacgatatgtgcgcctttcagacgaccatcgacggaagctttaacgtaaccttcttccagtttgatggtcgcgcctaattgttcgaggccagaaatgtgtagatcaaccggacgcgcaccgatcgtacaaccgccaggcagtgaaacttgcccctgaccaaagcgcgctaccagcggccccagtgcccagatagaagcacgcatggttttaaccagatcgtaaggtgcgcagaatacattaacgtcgcgggcatcaatatgcacagaaccattacgttctactttcgcacccagctggcttagcagcttcattgatgtatcgacgtctttcagtttcgggacgttctggatctctaccggttcttccgccagtagagcggcaaaaggataggcagagcagcatttttagcgccggaaattgtgacttcgccctggagcttcgttggcccctgaacacgaaatttatccatttagtttgttctcagttaacaattcatatccgctaccggcgaatcgcccatagctcaaaagccgttcagtttgcgatcgcgcgcccactccgcaggggtatacgctttgatcgacacagcatgaatgcggttatccgcaatatattccatcagcgggccatagaccgtctgctgttttttaacccgactcatgccgtcaaacaactcacccacggcaataacctgaaagtggctgccatcgccggaaacgtggacttcctggagggagagagcgttcatcaacacgctctgaatttcattattttccatgggatcttcaatcatcagttaataaaccagcgaaacatcttagagcaaagttgcgctggcataaataagcaaaaagcctcgctgataaatcagacaaggctcgacttgcaggcaggtttgccggacaggcggttaacgccatatccggcctgaaaaaatttaacgaggcagaacatcagcaggcaaattatacaatttcgcgagggtatacactttgtcgtttaccccctgaagcgtcacgttgttgccctgctttttcgccagatcgataagatggagcagcagtgccagtccacccgtatccacgcgggacacacggctaagatcgatgcaggtaatccccttcaccgcttcctcacgcatttcccaaagcggtagcagaacgtcctgatccagctctccggataacgccagcgtgtcacccgtctgcatccagctcagtgactcgctcattattttttctcttccagagtgattttctgttgagaaatcgatttcagttgcgcagtcaggccgtcgatacctttggtacgcagcagcgttccccactcgttttgtttggtggtgatcatactgacgccttcagcaatcatgtcgtaagcctgccagttgcccgtctgggagtttttacgccactggaagtccagacgcaccggcggacggccattcgggtcaataatggtaacgcgaataggcacaatggttttatcgcccagcggctgttctggcgcaatctgataggtttgaccgtgatacatcgccagcgcctgaccgtaagcctgcttcaggtactcacggaaagcggcaaagtaggcttcacgttgagcaggggtcgcactcttgtaatactggcccagcaccagcgcaccggcgtatttcacctgtacgtatggcagcagttcctgatcaacaatggtacgcagataatccgggttggcccgaatttgcggttgctcattcttcaggcgatcgaacgttttctgcgccgcctcgtccatcagcttatacggattggtctggtctgccgcggttgccgcactcagaggtgcaatcaccagcaaagcgaccatcattaaacgtttaaacatgcgtcggttctcctgaaattatttcgttgtacccacaggttcagtggtttcattattacctggcgcagcagctggcgcatcgccactattcttattgtcatcgcctttactaccgtaaaggaactgaccaatgagatcttccagcaccatcgcagacttagtgtcctgaattgtatcgccatccttcaggatagcagtccccagttccgggtcttcaaaaccgacgtttaatgccagatattgttcccccagcaggccggaagtacgaatgctcagcgaactggtatctggaatgtggttataacgttgttcaatttccagcgttacgcgcggcagataggttttcgggtccagcgtaatatccgccacccgacccacaacaacgccaccaatactgaccggagagcgcgctttcaggccgccaatgttatcgaacgtcgcataaagcgtgtaggtcggttcagtacgtatggacgtcacgttcgccgccttcaggcaaacaaacagcgccgccagcagtgctgctaataaaaagatacccacccaaatttcatttttttcgtttgcatgaactcaattcccaaacatcaatgcggtcagcacaaaatccagccccagaacagccagagacgagtggacaacggtgcgagtggttgcccggctaatcccggcagacgtcgggatggcgtcgtagccgttaaacaacgaaatccacgtcaccgtgatggcgaacaccacgctcttaatcagacagttgaccagatccatacgccagtcgacggcattttgcattgccgaccagaagaacccgctatcaatgcctttccaactgacgccgaccagagatccgccccagatccccacggcgacgaaaataaccgtcaacagtggtaatgaaataaccccagcccagaaacggggagaaataacccgacgcagcggatccaccgccatcatctccatactggagagttgctctgtagcgcgcatcaggccgatttctgcggttagcgccgaaccagcacgcccggcaaacaacaacgcggcaaccaccggccccagttcacgcagtagcgataacgccaccagcatacccagactggtttccgcactataagtggtcagaaccagataaccttgcagccccaacaccattccgatgaacacgccagaaaccacaataatcagcatcgacaggacgccgacattatagagctggcgcaccagcagcggcgcatgtttgcgaaattccggtttgccgaccagcgcattgaataacattaacccggcccgcccgaacgttctcagggttttaatccctttatgtccgagcgacgccagcgcatttaacagcatgagtggcttaactccctggtaaaagatcagcgtgataatcgccggcaggatagcggaacggaacaggcccgtcagctatcccgtccagaaactgacgtacgcgcggatcaggattcgcctgcaacgcctgggcactgccatgagcgacaatttttttgtccgctaggatccaggcgtgatccgcaatacttaacacttccggcacatcgtgagaaaccaccacacaagtcacgcccagcgcgctgttcagctcagaaatcagcttcaccagtacgcccatggtgatgggatcttgcccaacaaaaggttcatcaaacatgatgagatccggctccagcgcaatcgcacgcgccagcgctgcacgccgcgccatcccaccggaaagttcagaaggcattagtttagccgctccacgcagccccacggcctccagcttcatcatcaccgtactatgcaacaatggcgcgggaagttgggtatgttcgcgcagtggataggcgacgttgtcaaatacgttcatatcagtgaacaacgccccggactgaaataacatgctcatccgtttgcgcactgtatacaggcgcgaacgagacatcgccggaatattctcaccatcgaaaaggatctcaccatgatctggtgcgatttgcccgccaatcagacggagtagcgtcgttttaccgatgcccgatggccccatgatcgccgtgatcttccctcgcggcacggtcagggaaatattatcgaagatgcagcgattgccacgcgtaaaactgacatcgcgcatatcgactaaattcgccacagactgctccataattcacccttcgtcttgcgttgattttctaagcatggcgctcaatttaaccttgaacccaacatatttacagaatattacccgccgtggttagcgaaagctggcatttgttttactttttagccgcataaagtcaaaattaagaatccgttacggctttctgaaaatcttcagcggaccggcgagtatacctgaagaaaggacgttagatgcttttagctacggcactgttaattgttggtttacttttggtcgtttacagtgccgaccgcctggtttttgccgcgtctattctttgccgaacctttggcatcccgccgctgatcatcggcatgacggtggtcagtattggtacatcgttaccagaaatcatcgtctcgcttgccgcgtctctgcacgaacaacgcgatttagccgttggtacagccctcggctcaaacattatcaatatattgctgatcctcggtctggctgcgctggttcgtccttttaccgtccattctgatgttctacgccgtgaattacccttaatattgttgttcagcgtggtggccggttccgtactctatgacggacaacttagtcgaagcgatggtatctttctcctctttctggctgtgctatggctgctgttcattgttaaacttgcacgtcaggctgaacgtcaggggactgacagcctgaccagagagcagcttgcagagctgccgcgtgacggcggattgcccgtcgcgtttttatggctcggcattgcgcttatcatcatgccagtggccacgcggatggtggttgataacgccacggtgctggcgaattactttgccatcagcgagttgacgatgggtctgacggcaattgctatcggaaccagcctgccggaactggcaaccgcaatagcgggggttcgcaaaggtgaaaacgacattgctgtcggaaatatcattggcgcaaacatttttaatattgtcatcgtgttgggtttacccgcgctgataacgccaggagagattgatccactggcgtacagtcgtgactacagcgtgatgttgctggtgagcattatttttgcgttgctgtgctggcggcgctccccgcaaccgggccgtggtgtaggggtattattaactggcggatttatcgtatggctggcgatgttgtactggttatcgccaatactcgttgaataactggaaacgcattatgtcgcacgtagagttacaaccgggttttgactttcagcaagcaggtaaagaagtcctggcgattgaacgtgaatgcctggcggagcttgatcaatacatcaatcagaatttcacgcttgcttgtgaaaagatgttctggtgtaaagggaaagttgtcgtcatggggatggggaaatcggggcacatcgggcgcaaaatggcggcaacgtttgccagcaccggtacaccttcatttttcgtccatcctggtgaagccgcgcatggtgatttaggcatggttaccccacaggatgtggtgattgctatctctaactcaggtgaatccagcgaaatcacggccttaattccagtgcttaagcgtcttcacgtaccgttaatctgcatcaccggtcgcccggagagcagcatggcgcgcgccgcagatgtgcatctgtgtgttaaagtagcgaaagaagcctgtccgttagggctggcaccgaccagcagcaccaccgccacgctggttatgggcgatgccctcgctgtcgcgctgttaaaagcacgcggctttactgctgaagattttgcgctctcacacccaggcggcgcactgggtcgtaaacttctgctgcgcgtaaacgatattatgcatacgggcgatgagatcccgcatgttaagaaaacggccagtctgcgtgacgcattgctggaagttacccgcaaaaatcttggtatgactgtcatttgcgatgacaatatgatgattgaaggcatctttaccgacggtgatttacgccgtgtcttcgatatgggcgtggatgttcgtcagttaagtattgccgatgtgatgacgccggggggaatacgtgtgcgccctggcattctggccgttgaggcactgaacttaatgcagtcccgccatatcacctccgtgatggttgccgatggcgaccatttactcggtgtgttacatatgcatgatttactgcgtgcaggcgtagtgtaaagattcaaggataaacaacaatgagcaaagcaggtgcgtcgcttgcgacctgttacggccctgtcagcgccgacgttatggcaaaagcagagaacattcgtctgctgatcctcgacgttgatggcgtactgtcagatggcctgatttatatgggcaataacggcgaagagctgaaagcgttcaatgttcgtgacggttatggcattcgttgtgcgctcacctctgatattgaagtcgctatcattaccgggcgaaaggctaaactggtagaagatcgttgtgccacattggggatcactcacttgtatcaggggcagtcaaacaaactgatcgcctttagcgatttgctggaaaaactggcgattgccccggaaaatgtggcttatgtcggcgatgatctcatcgactggccggtaatggaaaaagtgggtttaagcgtcgccgtggccgatgcgcatccactgttgatcccgcgcgccgattacgtgacgcgcattgctggcggtcgtggcgcagtgcgcgaagtttgcgacttattactcctggcgcagggcaaactggatgaagccaaagggcaatcgatatgagtaaagccagacgttgggttatcattgtgctatcactggcggttctggtgatgatcggcattaatatggccgaaaaagacgataccgcccaggtggtcgtcaacaacaatgatcccacctataaaagcgagcatacggacacgctcgtctataacccagaaggggcactaagctatcgattgattgctcaacacgttgaatattattccgatcaggccgtttcgtggtttacgcagccggtacttaccacgtttgataaggataaaatcccgacatggtccgtaaaagcagataaagccaagctgaccaatgaccggatgctctatttatatggacacgttgaagtcaacgcacttgtgccagactctcaacttcgcagaatcacgacggataacgcgcagatcaatctggtgacgcaggatgttacctctgaagacctcgtcacgttatacggaacaacatttaactccagcggtctgaaaatgcgcggcaacttacgcagcaagaacgccgagctgattgaaaaggttagaacatcctatgaaattcaaaacaaacaaactcagccttaatcttgtgcttgccagctcacttctggccgccagcattccggcatttgcagtaaccggagacactgatcagccgatccacattgaatcggaccagcaatctcttgatatgcaaggcaacgtggttacctttaccggtaatgtcatcgtcacccagggcaccatcaaaattaatgccgacaaagtggtcgttacccgtccgggcggcgaacaaggtaaagaagtgattgacggctacggtaaaccggcaacgttctaccagatgcaggacaacggtaaacccgttgaaggtcacgcttcccagatgcactacgaactggcaaaagattttgtcgttctgacgggtaatgcttatctgcagcaggtcgatagcaacattaagggcgataagatcacttacctggtgaaagagcagaaaatgcaggctttcagcgacaaaggcaagcgcgtaaccaccgttctggtgccgtcgcagctgcaggataaaaacaacaaaggccagaccccggcacagaagaagggtaattaattcgttatggcaacattaactgcaaagaaccttgcaaaagcctataaaggccgtcgcgtggtagaagacgtcagcctgaccgtcaactccggggaaattgtcggtctgctggggccaaacggtgccggtaagaccaccactttctatatggttgtaggcattgtgccgcgcgatgcgggcaacatcattattgatgatgacgatatcagtctgctgcctctgcatgcacgcgcgcgccgcggtatcggctatctgccacaggaagcctccattttccgtcgcctcagcgtttacgataacctgatggcggtactgcaaattcgtgacgacttgtctgctgaacaacgtgaagaccgcgcgaacgagctgatggaagagtttcacattgagcacctgcgtgacagcatggggcagtcactctccgggggtgaacgtcgccgtgtagaaattgcccgcgcactggctgcgaatccgaaatttattctgctcgacgaaccgtttgccggtgttgacccgatctcggttatcgacattaaacgcatcattgagcacctgcgcgacagcggcctgggcgtgctgatcactgaccacaacgtgcgtgaaacactggcggtttgtgaacgcgcttatatcgtcagtcaggggcatttgatcgcccacggcacgcctacagaaatcttacaagacgaacacgttaagcgtgtataccttggggaagacttcagactctgatagggtagaagtttgcgacgttttagcaggagagtacgattctgaacatgaagcaaggtttgcaactcaggcttagccaacaactggcgatgacgccacagctccaacaggcaattcgtctgttgcagttgtcgacgctggaacttcagcaggagctacagcaggcgctggagagtaatccgctgcttgagcaaatcgacactcatgaagaaatcgacacccgcgaaacgcaagacagtgaaacgctggacaccgccgacgcgctcgaacaaaaagagatgccggaagagctgccgctcgatgccagttgggacaccatttacaccgctggtacaccatccggcaccagcggtgactacattgacgatgagctgccggtctatcagggcgaaacgacgcagaccttgcaggattacctgatgtggcaggtcgagctgacaccgttttccgacactgaccgcgctattgctacctctatcgtcgatgccgttgatgacaccggttatctgactgtcccgctggaagatattctcgaaagtatgggcgatgaagagatcgacatcgacgaggttgaagccgtccttaagcggatccaacggtttgatccggtcggtgtagcggcaaaagatctgcgtgactgcctgctaatccaactctcccaattcgataaaaccacgccgtggctggaagaggccagattgatcattagcgatcatctcgatctgttagccaatcacgacttccgcactttaatgcgcgtcacgcgtctgaaagaagatgtgctgaaagaagccgtcaatctgatccagtcgctcgatccgcgccccgggcagtcgatccagactggcgaacctgagtatgtcattccagatgtgctggtgcgtaagcataacggtcactggacagtagaactcaacagtgacagcattccgcgtctgcaaatcaaccagcactacgcctcgatgtgcaataacgctcgcaatgatggtgacagccagtttatccgcagcaatctgcaggatgccaaatggttgatcaagagtctggaaagccgtaacgatacgctactgcgcgtgagtcgctgtatcgttgaacagcagcaagccttctttgagcaaggcgaagaatatatgaaaccgatggtactggccgatatcgcccaggctgtcgaaatgcatgaatcgacgatatctcgcgtgaccacgcaaaaatacctgcatagtccacgaggcatttttgaactgaagtatttcttttccagtcacgtcaataccgagggcggcggcgaagcttcctccacggcgattcgtgcgctggtgaagaaattaatcgcggcggaaaacccagcgaaaccgttgagcgacagcaagttaacctctttgctgtcggaacaaggtatcatggtggcacgccgcactgttgcgaagtaccgagagtctttatccattccgccgtcaaaccagcgtaaacagctcgtttgacccaaccgataaggaagacactatgcagctcaacattaccggaaataacgtcgagatcaccgaggcactgcgcgaatttgttacagccaaatttgccaaacttgagcaatattttgaccgaatcaaccaggtctatgttgttctgaaagtggagaaagtcacccacacctcagatgcaacactgcatgtaaacggtggtgaaattcatgccagcgcggaaggtcaggacatgtacgctgccattgatggcttaattgataagctggcacgccagttgaccaaacataaagataaactgaaacaacactaattgtccgggcaattagcatgtgcatggcggcctgttgtgcggcacaacgggccatttgtacggttaatgctccgagcctgttccactgtttgagtgggcaggttcttaggtgaaattatgacaaataatgatacaactctacagcttagcagtgttcttaacagggaatgtacgcgaagccgcgtccactgtcagagcaaaaaacgcgccctggaaatcatcagcgagctggcggcgaaacaacttagcctgccgcctcaggtggtttttgaagctatcctgacgcgggaaaaaatgggcagtaccggtatcggcaatggtattgcaattccgcatggcaaactggaagaagatactctgcgtgccgttggcgttttcgttcagctcgaaacgcctatagctttcgatgccatcgacaaccaaccggtggacttactttttgccctgctggtgccggcagaccaaactaaaacgcacctgcatactctgtcgctggtggcgaaacgtctggcggacaaaaccatctgccgccgtttacgcgcagcccagagcgatgaagagctgtatcaaatcattacggataccgaaggtactccggatgaagcgtagttattcggtaatgtctcttttagacgttgtgaggagaaacagtacatggtactgatgatcgtcagcggacgttcaggttcaggtaaatctgtcgccctgcgtgcgctggaagatatgggtttttactgcgtggataaccttcccgtagtgttgttacccgatctggctcgaaccctggccgatcgcgagatttctgccgccgtcagcattgatgttcgtaatatgccggagtcaccagaaatattcgaacaggcgatgagtaacctgcctgacgctttctcaccgcaactactgttcctggatgccgaccgtaataccttaattcgtcgttacagtgacacgcgccgactgcatccgctttccagcaaaaacctgtcgctggaaagtgctatcgacaaagaaagcgatttgctggagcctctgcgttcgcgagcggatctgattgtcgatacctcagaaatgtccgttcacgagctggctgaaatgctgcgtacccgtctgctgggtaaacgtgaacgcgaactgaccatggtctttgagtctttcggcttcaaacacggtatccctatcgatgcagattacgtctttgacgtgcgcttcttgccgaacccgcactgggatccgaaactgcgtccaatgacaggtcttgataaacctgtcgccgcgttcctcgaccgccacacagaagtacacaattttatctaccagacgcgaagctatcttgaactatggttacctatgctggaaaccaacaaccgtagctacttgacggtcgccattggttgtaccggcgggaagcaccgttcggtgtatattgcagagcaactggcagactacttccgctcgcgcggtaaaaacgtccagtcacgccatcgtacgctggaaaaacgtaaaccatgaccgtcaagcaaactgttgaaatcacaaacaagctgggcatgcatgcccggcctgcaatgaagctgtttgaattaatgcagggttttgacgctgaagtgctgttacgtaatgacgaaggcaccgaggccgaagccaacagcgttattgcgctgctgatgttggattctgccaaaggacggcagattgaagttgaagcgaccggcccacaggaagaggaagcactggccgccgttatcgccctctttaactctggttttgatgaagattaatcttcatcactttgacattcaaatcccttcaagctcccccgacaataagaaaagcgcgtactgaaatcgttctcaatcaacgtcatttgtacattttgtgcgcttttcactttcagaagaaccttaagaaaaccttaagaggcattgtttaggttttgtttaagttaatcgaccatactggagatcgtcagaaaatatttccaggagatggcatgattcgcttatctgaacaaaatcccctgggcaccggaagacatcggaaatgttatgcgcatccggaagatgcccaacgctgtatcaagattgtctaccatcgtggcgatggtggcgataaagagatccgccgtgagttaaagtactacgcgcatcttggtcgccggttaaaagactggagtggaataccgcgctatcacggtaccgttgagacggattgcggaaccggttatgtctacgatgtgattgcagattttgacggcaaaccctccattacgctgaccgaatttgctgagcaatgccgttacgaagaagacattgcacaactgcgccagctactgaaacagctgaagcgttatttgcaggataaccgtatcgtgacgatgtcgctgaagccgcagaatatcctctgtcaccgcatcagtgagtcagaggttatcccggtcgtctgcgacaacattggtgaaagcacattgattccactggcgacctggtcgaagtggtgttgtctgcgtaagcaagagcggttatggaaacgatttatcgcccaaccggcgctggctattgccctgcagaaagatctgcaacctcgtgagagcaaaacgctggccctcacttcgcgcgaagcttaatccagctggtgttgttgcataaacggctcaccgcctaactgatacatctgccgtaaaatccacgcctgacggctacgcacgtagcccgatggcgaggagactttgaaacgaagtggattaggtaatacagctgccagtaatgcagcttccgaccgggtaagtttgctcgcgggtttgtggaaataacgttgtgccgcagcttcgacgccaaacacaccgtcgccaaattcggcgatattcaggtaaaccgtcaggatacgctttttgctccagactgtttctatccccagcgttaatccagcttccagcccttttcgtacccagctacgcccatcccataaaaagagatttttggccgtctgctgagaaatcgttgaagcaccgcgaatacggttttcattgcgctcgttgtgcgccagggctttctcaatggaagcgacatcaaagccccagtgctcaggaaatttctgatcttctgcggcaatcaccgccagtcccatccacggcgagatttgatccatactgacccagtcagaatgtgccacgtaacgaaaattgccatacagccaggcgctgacctgtcgctcgaccattaccgctgagaagggaacaggcgcaacactaaacaacgcgatgcccccgccccagaaaacggcgaggacaaccattaaccgcaaaagaaaacggcgaacgaaactaaacaccgttaagcggcttttactcattcagccagaaccagcacgcgggaaaccagcttatcaatgccgctcgccgcttctgcaatgttctgcgccagcatatatgctggggtggtgacaatcttattgtcttcatcaaccacgatatcatcgacaggacagggcacatgctccgcgcccatctcttccagcacttctgcggtatcgatatcagtaccgatggtcaaacgcagcgggaaatcgaaaattttcggcagcatcgctggggcaatacacataaaaccaagcggttttccggcctgatgcatcgcttgtgccagcgcctttaattcacggtcaacggtgcattcgctaccaagagtggcaaaattgcttaaattcttcgccgcgccaaacccccccggcacaatcaacgcatccagttcagcggcatcggcctgggccagaggacggatttcaccgcgcgttattcgtgccgcttcaatcagcacgttgcgcgtttccgtcatcgcttcgccagttaaatggttgataacatcaacctgctgcttatccggtgcaaagcagaccgcctgcgcaccgctgcgtgaaatagctaacaacgtcaacaccgcttcatgaatttcagaaccgtcatagacgccgcatccgctcagaattacgccaattttcttcattgtgatcatcctttcgcaattgactgaaacacattaatttttttaataaaaatggtacgcatcacacatttaactgattcatgtaacaaatcatttaagttttgctatcttaactgcgtgcggcctgaaaaacagtgctgtgcccttgtaactcatcataataatttacggcgcagccaagatttccctggtgttggcgcagtattcgcgcaccccggtctagccggggtcattttttagtggcttttgccacccacgctttcagcacttctacgtcgtgacgccactcttctttcatctcttcaatccattcaccgacgttatcttcccaggcaggaaggtccggagactgaatttgctgacccagctgttgcagatggcgtaaccccactgaccccgccgcacctttaattttatgtccttcctctacaatgccttttttatcctgcgccgtcagattcgactccagcacgctgacatagcccggcatcatcttctcaaacaccgctaacccgtcggtgatcagcttcggtcctacaagttcgagatactgttccagcatgggaatatcgagcaatgcttctgatttactgttctcttctgtcgtcaccgtactctcctcatcatcctgggtatcccagaatttcttgatcatcgcggttagcgccggaaccgaaagcggcttactcagcacatcatccattccagcattgaggtactcttgtttgtctttcagcacgttagcggttaaggccaccagcggcggtaaatcctcgcgcggataacgcttcgtcagttcacgagagatatccagcccggtcatatctggcaactgaatatccagcaacaccaggtcgtattcgcccggtttaaacatctccagcgccgccttgccggtcatggcgacatcaacgctgttacctaatttttccagcacagaacgcgcaacaatcacgttcagttcaatgtcttccaccagcagcacattcagcgccggtaaaggcatatcgtcttcatcaaacgcatcatcgacctcttctgctaccgacggtgcgtggatcgtcaacgtaaaggttgaacctttgccctgttcgctggtaaccgtaatatcgccgcccatatttttcgccagacgacgagaaacggccagaccaataccggtgccggtggcaggtttaccgccatgactgtctttcacctggtaatacatggcgaaaattttatccagctcatcctgcggaatgccgataccagagtcttccacttcaaaatgcagcatatcgccttcatcgtagcgcacgcgcacggtaacctggccttgctgggtgaatttgacggcgttactgatgaggttccacaggatctgccgtaaacgcgtcccgtcggtaatgacctgatgcggtaatggcagcgtcggctccaggttaaagcgcaatcctttttgttgcgcctgcaatgcggagagattttccagatcggcaaggaagctggtgaaatcaaccggttgattatcaagctggaccttgcgccgttccatcttatccatgtcgataatatcgttaaagatattccccagcgtgacggccgaaacatggatggtcttgagatatttttcctgctcggcggtgagttcggtatccagcagaatacggctcaggccgacgataccgttcagcggtgtacgcaattcgtgactgatggtggagataaacgtcgttttgtcgcggctggcccgttcaagcgcatcctgataccgcttacgctcggtaatgtcgcgaccaaagcccatcaaaccgtgacgtttacccacgcggtcgtagtacggcactttacggatttcaaagcaggctttgcgcccgtccgggtaatccagccactgttcataggtcagtgacacattatgacggaacactttttcatcggtttcaatgacttttgcggcggcttccggtgagtaaacatcagcaggtttcaggtgaaccagttgtttttcgctttttccggtcagcagctccatcgcgcggttacagccggaaaactctttatcttcgttacgataaaaaaccaggtcgggtgaagcatcaaggaaggaacgtaagaatgaggattgctgctcgagctgaatttgtgtctcttcgcgctctttgatttcaattttcagttggccgaaggtttcctgcagttctgcttccgctttttcacgaacggcgatttcctgatttagctgggcaatattatcttttaactgaacgttgaggctcaaatcgcgctcgcgcatctcctccagtttttgcaccagccgtgacagacgttgtcgtgactcctccagttgctcgacgaccaccgatagaaagtagaccgcccacggcgtaatcagcaaaccaaagaagatagaacgaataacatcaatgctttcgacctgaccatgcagcaccatggttaccgccatttgtaccacaatggcaagaacgacgagggccagcgccagcaacattgagaagcgcaccagacctaacttcatcatcaggtcaacataatactgcgccagcagacgaatttgcttcattagggaattccttcacgacaacctgccccaataatacccaattctgacagttacgttataaattgtgtgagaaatgcggaattcccctcaacgacctactccgttggaggtatccacggacgttccagcgccgatccctgtacgccatgttcattcagatagcgatccagctcgaccattcccgtccatcgattttcgcaccacagaggagcaagcagcgtcgggcgacgggcgctggcggaaatgcggtggtagatcacttccggtggcgtatggcgaatcatttctccggcagtgagcgtgtaatcctccagttcaataccgttcaaacgccccgcttcccaggctttcgccataatgctgcctttcacaatatgcagcggatgcagctttatgccgtccacgccggtttcaaccactcgctccagcgtttgcaaacattcagcctgcccttcgccaggcaggccgacaattaagtgggaacacaccttcagcccgcgctgacgtgccagctgggttgtacgctgataacaggcaaaatcatggccgcggttgatgcgatgcagtgttttgtcgtgggcggtttgtagccccagctccagccacacttcgtaaccctggtccttatattcgcaaagcagatccagcaccgcatccggcacgcagtccgggcgggtaccaacacacaaaccgacaatattggcctggctcaccgcctgctgatacatagaacgcagcacctgaacttccgcaaaggtgctggtatacgcctgaaagtaggccagatagcgtttagcgcggttaactaaattcgcctggtgcgccagttgctcggcaatggaacgatgctgctgcgcttcatcggcaaacgaggcaacattacagaatgtgcagccaccacgcccgatggtaccgtcacggttagggcagctaaaaccgccgtgtagcgtcagcttatgcaccttttgcccataacgacgggtgagatcaccaccaaacatattgactaatttctgtaactgcataatctgatagaccgcgccttgaaaagaggccaaagcctgccatttttagctcaattcggcgatgacctggatcaatcgtcccggcctgcttttatcaactgcataatcaatcaaaattaccgaaatttcatgcataatcacataaatcacttttgcttatcttgtgtcagatttttttatctccttatggattttaggcaaaaacagtagcatgaaacgtcattaccaattaaggcagtataaaatgctggttttctcgtcagttcaaggcaggataagggttaacacgcctttatgacagtcaggaattgactgtttctctaacgacttcccttttagccttaaagataaaatccattttaatttcagtaatttaataaagaattttgcgctaaagcacatttctgtaccaataagcttgccatttgacctgtatcagctttcccgataagttggaaatccgctggaagctttctggatgagcagcctgctcatcatatttatgcagtaattgagatcccctcttcaccgtattaaccgatgcgaaaaggacaacaagggggcgaatgcgaggcgcgcgtatgacacgcaaaccccgtcgccacgctctttctgtgcccgtgcgcagcggttcggaagtggggttcccgcagagcctgggggaggttcacgatatgttgtacgataaatcccttgagagggataactgtggtttcggcctgatcgcccacatagaaggcgaacctagccacaaggtagtgcgtactgcaatacacgcactggcccgcatgcagcaccgtggcgcgattctcgccgatggtaaaaccggcgacggttgcggcttgctgttacaaaaaccggatcgcttttttcgcatcgttgcgcaggagcgcggctggcgtttagcaaaaaactacgctgtcgggatgctcttcctgaataaagatcctgaactcgccgctgccgcacgccgcatcgttgaagaagagctgcaacgcgaaaccttgtcgattgtgggctggcgtgatgtccccactaacgaaggcgtgctgggtgaaatcgccctctcctctctgccccacattgagcaaattttcgttaacgctccggcaggctggcgtccgcgcgatatggagcgccgtctgtttatcgcccgccgccgcattgaaaagcgtctcgaagccgacaaagacttctacgtctgtagcctgtcgaatctggtgaacatctataaaggtctgtgtatgccggcggatctgccgcgcttttatctggatcttgcggacctgcgtctggaatcggccatctgcctgttccaccagcgcttctccactaacaccgtaccgcgctggccgctggcgcagccgttccgctacctggcgcataacggtgaaatcaacaccatcaccggtaaccgccaatgggcgcgtgcgcgtacctataaattccagacgccgctgatccctgatctgcacgacgccgcaccgttcgtcaacgaaaccggttctgactccagttcgatggataacatgctggaactgctgctggcaggcgggatggatatcatccgcgccatgcgtctattagtaccacccgcctggcagaacaacccggatatggacccggaactgcgtgccttctttgactttaactccatgcatatggagccgtgggatggcccggcgggcatcgtgatgtccgatggtcgcttcgctgcctgtaacctcgaccgtaacggtctgcgtccggcacgctacgtcattaccaaagacaagctcatcacctgcgcctctgaagtcggtatctgggattatcagcctgacgaagtggtcgaaaaaggccgcgtcgggccaggcgaactgatggtgatcgacacccgcagtgggcgtattctgcactcggcagaaaccgatgacgatctgaaaagccgccatccatataaagagtggatggagaaaaacgtccgccgactggtaccgtttgaagatctgcccgatgaagaagtgggtagccgcgaactggacgacgacacgcttgccagctaccagaaacagtttaactacagcgcggaagagctggactccgtaattcgcgtactgggcgaaaacggtcaggaagcggtcggttcgatgggcgatgataccccattcgccgtgctctccagtcagccgcgcattatttacgactacttccgccagcagtttgcccaggtgactaacccgccaatcgacccgctgcgtgaagcgcatgttatgtcgctcgccaccagtatcggtcgtgaaatgaacgtcttttgcgaagcagagggccaggcgcaccgtttaagctttaaatcgccgattctgctctactccgatttcaaacagctcacgacgatgaaagaggagcactaccgcgcagatacgctggatatcacctttgacgtcactaaaaccacgctcgaagcgacagtcaaagagctgtgcgacaaagccgaaaaaatggtacgtagcggcaccgtgctgctggtgctctccgaccggaatatcgctaaagatcgcctgccggttccagccccgatggcggttggcgcgatccagacccgtctggtcgatcaaagcctgcgttgcgatgccaacatcatcgtcgaaaccgccagcgcccgcgatccgcaccacttcgccgtgttgctgggcttcggcgcgacggctatttatccataccttgcctatgaaacgctgggccgcctggtagacacccatgcgattgccaaagattatcgtaccgtgatgctcaactaccgtaacggcatcaacaaaggcttgtacaaaatcatgtccaaaatgggcatctccaccatcgcctcttaccgctgctcgaaactgtttgaagcggtcggtctgcacgatgatgtagtgggcctgtgcttccagggggcggtcagccgcattggtggggcgagctttgaagacttccagcaggatctgctgaacctgtcgaaacgtgcctggctggcgcgtaagcccatcagccagggcggcctgctgaaatacgtccacggcggcgaataccacgcttacaacccggacgtggtgcgcacgctgcaacaggcggtacaaagcggcgagtacagcgactatcaggaatacgcgaagctggttaatgagcgtccggcaaccacgctgcgcgatctgctggcaattacgccgggtgaaaacgcggtcaacattgctgatgttgaaccggcaagcgaactgtttaaacgctttgataccgccgcgatgtctatcggcgcgttaagcccggaagcccacgaggcgctggcggaagcgatgaatagcatcggcggtaactcgaactccggtgaaggcggcgaagacccggcgcgctatggcactaacaaagtgtcgcgcatcaagcaggtggcttctggtcgcttcggcgttactccggcgtatctggtcaatgccgacgtcattcagattaaagtcgcccagggcgcgaagccgggcgaaggcggtcagttgccgggcgacaaagtcactccttacatcgccaaactgcgctattcggtgcccggagtgacgctgatctccccgccgccgcaccacgatatctactctatcgaggacttagcgcagctcattttcgacctcaagcaggttaacccgaaagcgatgatctccgtgaagctggtttccgaaccgggcgtaggcaccatcgcgactggcgtggcaaaagcttatgccgatttaatcaccatcgcaggctatgacggtggcaccggcgcaagcccgctgtcgtcagtgaaatacgcaggttgcccgtgggagctggggcttgttgaaacccagcaggcgctggttgccaatggtctgcgtcataagatccgtttgcaggtcgatggcggcctgaaaaccggtgttgatatcatcaaagcggcgattctcggcgcagaaagcttcggcttcggcactggcccgatggtggcgctcggctgtaaatatctacgtatttgccatctgaacaactgcgcaacgggtgtagcaactcaggatgacaaactgcgtaagaaccactatcacggcctgccgttcaaggttaccaattactttgaatttattgcccgtgaaacccgcgagctgatggcacagctgggcgtaacgcgtctggtggatctgattggtcgcaccgacctgctgaaagaactggacggtttcaccgccaaacagcaaaaactggcgctgtcgaagctgctggagaccgccgaaccgcatccaggtaaggcactctactgcaccgaaaacaacccaccgtttgataacggcctgctgaacgcgcagttgctgcaacaggcgaaaccgtttgtcgatgaacgccagagcaaaaccttctggttcgatattcgcaacaccgaccgttctgtcggcgcgtcgctttcaggctatatcgcccagacgcacggcgatcaggggctggcagccgatcctatcaaagcgtacttcaacggcaccgcaggccagagtttcggtgtgtggaacgcgggcggcgtggaactgtacctgaccggggatgccaacgactatgtcggtaaaggcatggcgggcggcttaatcgccattcgtcctccggttggttccgccttccgcagccatgaagcaagtattatcggcaacacctgcctgtatggcgcgaccggtggtcgtctgtatgccgcaggccgcgcgggtgaacgtttcggcgtgcggaactccggtgctatcaccgtggtagaaggcattggcgacaacggctgtgaatatatgacgggcggtattgtctgtattctgggtaaaaccggcgttaacttcggtgcgggcatgaccggcggcttcgcttacgttctcgatgaaagcggtgatttccgcaaacgcgttaacccggaactggtcgaggtcttaagcgttgacgatctggcgatccatgaagagcatctgcgcggtcttatcaccgagcatgttcagcatactggctctcagcgcggtgaagagattctggcgaactggtcaaccttcgccactaaatttgcgctggttaaaccgaagtccagtgatgtaaaagcactgctgggtcatcgtagtcgtagcgcagcagagttgcgcgtgcaggcgcagtaaggggtagcaacaatgagtcagaatgtttatcaatttatcgacctgcagcgcgttgatccgccaaagaaaccgctgaagatccgcaaaattgagtttgttgaaatttacgagccgttttccgaaggccaggccaaagcgcaggctgaccgctgcctgtcgtgcggcaacccatactgcgagtggaaatgtccggtacacaactacatcccgaactggctgaagctcgccaacgaggggcgtatttttgaagcggcggaactgtcgcaccagaccaacaccctgccggaagtttgcggacgagtctgcccgcaagaccgtctgtgcgaaggttcctgcactctgaacgatgagtttggcgcggtgaccatcggcaacattgagcgttatatcaatgataaagcgttcgaaatgggctggcgtccggatatgtccggcgtgaagcaaaccggtaaaaaagtggcgattatcggcgcaggcccggcaggtctggcgtgtgcggatgtcctgacgcgtaacggcgtaaaagccgttgtcttcgaccgtcatccagaaattggcgggctgctgaccttcggtattccggccttcaagctggaaaaagaggtaatgacgcgtcgccgtgaaatcttcaccggcatgggtattgaattcaaactcaataccgaagtgggccgcgacgtgcagctggacgatctgctgagtgattacgatgccgtcttccttggcgtcgggacttatcagtcaatgcgcggcgggctggaaaacgaagacgccgatggcgtgtacgcagcgctgccgttccttatcgccaacaccaaacagttaatgggctttggtgaaacccgcgacgaaccgttcgtcagcatggaaggcaaacgcgtggtggtccttggcggtggcgacactgcgatggactgcgtgcgtacgtccgtgcgccagggagcgaagcacgttacctgtgcctatcgtcgtgatgaagagaacatgccgggttcccgccgcgaagtgaaaaacgcgcgggaagaaggcgtagagttcaaattcaacgtccagccactggggattgaagtgaacggtaacggtaaagtcagcggcgtaaaaatggtacgtaccgaaatgggcgaaccggatgccaaaggccgtcgccgcgcggagatcgttgcaggttccgaacatatcgttccggcagatgcagtgatcatggcgtttggtttccgtccacacaacatggaatggctggcaaaacacagcgtcgagctggattcacaaggccgcatcatcgccccggaaggcagcgacaacgccttccagaccagcaacccgaaaatctttgctggcggcgatatcgtccgtggttccgatctggtggtaaccgctattgccgaaggtcgtaaggcggcagacggtattatgaactggctggaagtttaagctctgtcccagcgccgcctcctcagaaaagagtcggcgctgaaattctcctttctttctggaaagcgcctcgcataatctgaagaaaaccaatgtaatacgctcatctggattgttaccggtagatgcccggcgtatagctgattccattattcaacgcagcgccatataaagggacagataatggaatcgctctcagagagaacctcaacaggctaccagcaaatccacgacggtattattcatctggtcgatagcgcccggacggaaacggtacgtagcgttaacgcgctgatgaccgcgacatactgggaaattggccgacgaattgtcgaatttgaacaaggtggcgaggccagggctgcgtatggtgcgcagctaatcaagcgactatcaaaggatttaagtctaaggtataagcgtgggttctctgcaaaaaacttacgccaaatgaggcttttttacctcttttttcaacatgttgaaattcgccagacagtgtctggcgaattaacaccattgggaattccgcagacaccatctgcagaattcccatcggcaaagatttggcagacgctgtctgccaaattgagaggctgtttgatatttccacagcttttgtattgcatctcctattttcggtttgtatattcatgcaaataaacgaaggaaagttgccatgatttacattgaacagcttgaattaatccataaaagtggtgatgtgttgtatccagtaaaaataaccagaaaatcatcaggaaaaactgccttccaccttgttccattcggcttaaataagactcacgaccttctagaggtggaagatgcttcagaagcaattcggctggtgattgatgaacgtcattccattcgctgcagtacacttacagcaactattacgaataaaaagggcaagcgaattaagcggacaggtatatacagtatcaagggtgttaacataaaagaatacaacgtcaggtaatggcacagagcggtccgtcagttcaggtttggctctgtgccaaagatgggtcaggtcacacctgatctaataaatttaagccattaaatcagccttaaccttcaccaccacctttttaatctcacccggctcgccaacaacgcatcccggcttatgcggctctcctggcataaacacggcgaacattcccggtttcaggatgatggtttgctcgttttcaatggcgctacaaagctggtaatcatcttcatggtggaactcttcacattggcgcgcagtgcctgccatgccaaacagaatccgttcctcaccgtttaataacagctggatatcaatgtattgctcgtgcaattccgcttttttctcgacgggcgattgagtgttaaacgtcatgacattcataaaaatattgtcgccctgtaattcgtaacgacccggcgctttttcttgcggtctggcagctaaggccagcgttaacgcgtcctgtaacgcaggatgtaacccagcagacggtaatgactgtacttcacccatcatcataatttttctccctgggccaacagcgcagccccaagtaaacctgcatcatggcggtagtgcgccgccagtaaatcaacatgaaatgccgctggctcctgcgccagatacatttccaccaacgccagatacccttctgccagaccaacgctgccaccaaccaccacgcactggcaatcagttgtggctttaatatcagcgatcagccttgcaagcgtacgtgcggagagatgaatcagttgctgcgcctgctcatcgccctgcccggcgcgtgtgaaaatagttctagcatccgcgccagccagctcgccctgcgctgccgccgcaatgccgcgaccagaagcaattgcttccacgcaacctgtgcgtccacagccgcagactgggccgtgtggatcggcaagcgtatgcccgatgtgcccgccagaccgccagggccggtaagcagtttgccaccgctcactacaccgccgccgacgccagtggaaacggtgataaagaccatatcggttatatcgccttccagcgcctgatactccgcccatgctgcagcctgcgcgtcgttaatggcaatggtcggcaaattggtaagttgttccagcgttttgactaacggaaagtgtagcaatccaccgagattatgcggattcagcgccagcaaactgccgtcgcgaataattccggttgaagcgatggcaacccgctgcgcatgagcttgcaacggagagactaatgcggataaggcatcacgcaaggcttctggtgtctggctggctggcgtaggaagttcacgacgatcgcggatctgcccgtcagcgccaatcagcgcggcggcaagtttagtaccgccgatatcaatcgccagcgtggtcatagcaccgcctttttcatcgctgtgttgtaccactgacaaatgtgttcaagacgcgtaatggcagaaccgaccgtcaccgcccacgcgccgtggcgcatcgcatctgccgcctgagcaggcgtgttgtaacgcccttcggcaatcacccgacatccggcgtcgctcaacgttttcaccagcgccagatccggctcttctggcgtttcaggcgtggtatagccagaaagcgtagtgccaataatttcggctcccagcttttggcatgccaggccgtcttccggcgttgagcagtcggtcatcgccagtaaaccgtgatggtgaatacgtgccagcagcgtttcaacaggcaccggacgcgggcggtcggtgccgtcaatggcgataatgtccgcgcccgcctgcgccagcgcatcgacatcttcaatataggccgtgatgcgtaccggagaatcctccagatcgcgtttcacaatcccgataattggcacgctcaccaccgcacgcgtggcttgcagatttgccacaccttcaatgcgaatggcaaccgcgcccgcctgctctgccgctaatgccatggcggcgacgatttcgggtttatcgagcggactgtccggaaccggctggcaggagacaatcaggccaccgttagcagcgattttttgatccagttgtgcaagtaacgacatacatcttcccttagcgaaaggcccggtacatagaccgggcaacaggattaacttttggttttgactaaatcgtttttggcgctgccaaatggcacggcaccgctaaatggtttgccgtcgatagcgtcatgagtacgcaatgcttccgggcgcagccaacgctgaacgcgggaaggcatatccagaccaatcagcaggatcaccacgaacgtcagactgaacgagagcgatgccagcgcagtacccagatccagacgttgagcgatcaacgcgccgatgattggggccagtgcgccgcccaatgcgccaacgttgtaggtaaagcccaggcccgctgcacgctggtcggtatcgaaataaccgccaatcagtttcggtaagatcccggcgatcccttgtccaagcatttgctggaagaacagtaacagaccgagcacccagacgtttgcgccgccaatcgcaaataccggaataatcagcagctgcgaggccagcaggctacaaacgtacgctttgcgggttcccagccagtcaccgaggaagccacctacgcagcatcccacggccgcgccaaagccactaaagaacagcacattggcgacagtatgcgggttataagccagatcggttttcagatacgttggcagcagcgcctgaatcggccatgagtagaggaaagcaaacaacacgaccaccatcagcattacgcccgttggccagcgtttacccgtactttgcaccataaagctgataaagattgcggcgcataacagcccgagaacagcgacgattgcagcattttgcaggttaccggcgaagcagaaccacagcgcagtagccgccgccagtgtcattacgatattggcaatgcgatgttcaccacggtagagaatatccaccattgtgcgtactggtgctttacctgcgtgtttctctttccagtcttccgcttccgggatgtttttacgcagccagagagcaaagatgattggcaaaatgccgataaagaacagcgcacgccaaccccagaccggaaccaccaggctatagacctgagcggcaacgacggcccccacagagaagcctgaaatcaaaaaaccactggctttgttacgcagatgttttggccagctttcaatgacataggtggcgctggaaccgtattcacccgccatccccatgccgatgaccagacgagcgataaacatggtgatgtagcctggcgcaaagccgcaggccagcgtcccggccgagaagagaacgatgctggtgaccattgccagacgacgcccgtagcggtcacccatagcgccgagcatcaggccgccgaaccagcgagagataaaggctgcggagatcagacttgccgcctgcaccgtcgtcagcccgaattcaccctgtacttcggtgagtaccagggcgattaaaacgaaatcaaaaccgtcaagcagatatcccaaccaggcagcggaaaatgcccgccattgtgcacgattgagatggcgataccacgggatattctgggttgtagtactcattgtgagtctcccgcggtgggcgatgcccacacgctttggtatgaaaattgtagggtacagatgcgtttatttcccctcacccggtaggggcgagcgaggggaaacaactcacccgcgctcttgcatcaactgctgggccagcgccttcagttctggcagatatttttcatctaccggaccaaacggtttgcggcacagcggcacagaaacgacatccatataatgcaggacagttttcaggccgcggaatacgcccgttttgatcagtaaatcaatgactttattacattcggtttgcagcttctgcgcggtctggatatcgccttctttcagcgccttcacaatcccctgataacgccagcccatgatgttgtaggtactaccgataccaccatcagcgcccgccagaagaccagaggcgaagatttcgtcgtaaccgttatagagcaccagatcaggatgttcacgacggatctgctccatctgatagagatcgccagaggtctgtttcagcgcacctacgccaggcaacgtaacaagtgtgttgatctgatccagggtcagttttaccccactcagggctggaatgttgtacaccaccatcggcaaaccatccgccgaatcaataattgcccgatagtgatcgcagtgttcttcaaagctgaaaggatagtagaacggcgtgacggcggagacggcatcgaagccataacgtttagccgatgccgcaagttgttggctttcggcggtgctgacgcaaccgacgtgggcgatgagtttaatcttacctttcgcctcttcggcgacgatttccagtacctgttcacgctcggaaaggctttgtacaaaggcctcgccggtcgaaccacccacgtataaaccgtcgatgccctgctgaatattgaactgaaccaggcgacgcagactcgctttatccagtgcttgttgttggtcaaaaggagtcaggagtgcagccattacgccacgtaaattcgttgccataaatacctctgaagtgatgcttgtctgataaacgatatacctttatacctgttataccagatcaattaagcaacaccccatacagaaagcttataatgcgatctgcttcactaaagtggcattatttctttttgttggtggtctgaccgaaagcgtgccaggtagcagagacgctgttgagatgcgattgcaacgcacgatcggcttcgtcaggatcgtggcggcggatcgcgtcaacgatcgcaatatgctgttgatagctaacgttgttatgctcgtgcagagcctgatcagccacggttggacgtgcggcgattagccagtcgagcagggcaacgtggatcgccatgaagattgggttacctgggatctccgccagcacgcggtggaaatcaacgtctgaacgaatgaatgccgcgttgttatccagcgactgactgttgatttccagtgcttttgccagcaaatcgatttgctcatcggtggcgtgttcagccgcatagcgcaccaggctggattcaaagaacagacgtaattgttcgaaatgggcaatcccaccaggatgagaaaggaaatctttcgccatgccggaaagctcaccgatgatagtgtccgcagaaggacgcgagacgcgagcgcgttcgccgttgtttatttgcaccagacctttgcgttttaacgctgccagcgcttcgcgcacagaaggacgcccgacgttaaagaacgccatcagttcgcgttcagacggtaattgttcaccttcgccaaattcacgacggcggatcatctgttccagctcttcttccaccatttcggagagttttttacgcgccagcgggcggctacgcaagttgcgaccaattgcaggtgaagaatcttcggtttgcgaatcaaatgcgttcataaggcccattctgtaaggtcagtgtgattaacatcatcagtgacatcctatcacaggattgaaagtaggggaaaatggcaggtttttctctttgtgcctcatcattaccataattaacggaataattaactattgcgaaaaattaatgtaacgcagataaaaacatcccgtttgaattattcataagactattcacgagcattatgaatattatgaatgtgttcttacaaaataatcataagcgcatattttttaatgaaaaaccacctcacctacaattaaaaacacgacatccgcaccataaatagacttgcaaaaaatataacatcattgttttcaatctgccgtttatgggattgaccgttttcttttgacacggagttcaacaatgttcggcataattatatctgtcatcgtattaattacgatgggctatttgatcctgaaaaactacaaacctcaggtggtgctggctgccgcaggtatcttcctgatgatgtgcggtgtctggttagggttcggtggtgtactcgatcccgccaaaagcagcggctacttgatcgtcgatatttataatgaaatcctgcgcatgctgtccaaccgcattgccggattggggctgtcgattatggcggtgggcggttatgcccgctacatggagcgcacaggagccagtcgcgcgatggtgagcttgctaagccgcccgttaaaactcattcgctcgccgtatattattctgtcggcaacttacgtcatcggccaaatcatggcgcagtttattaccagcgcctccggcctgggtatgttgctgatggtcaccttatttccgacgctggtgagtctgggagtaagtcgcctctctgcggtggcggttatcgcaaccacgatgtccattgagtgggggattctggaaacgaactccatttttgcagcccaggtcgcgggaatgaaaattgccacttacttcttccactaccagcttccggtcgcctcttgcgtcattatctcggtggcgatctcccactttttcgtgcaacgcgcttttgacaaaaaagataaaaatatcaatcacgaacaggcagagctaaaagctctcgataatgtcccgccgctctattacgccattttacctgtgatgccgttaatcttgatgctcggctcgctgttcctcgcccacatcgggctgatgcagtcagaactgcatctggtggtggtgatgttactgagtttgacggtgacgatgtttgttgagttcttccgcaagcataacttgcgcgaaacaatggacgatgtgcaggcgttttttgacggcatgggtacgcagtttgccaacgtggtaacgctggtggtcgcgggtgaaatatttgcgaaaggcttaacgacgattggcactgttgatgcggttatcaggggtgcggagcattctggtctgggcggtattggcgtgatgattattatggcgctagtcattgccatttgtgccattgtgatgggctctggcaatgcgccgtttatgtcatttgccagtcttattccgaatatcgcagccggactacatgtaccagcggttgtaattattatgccgatgcattttgccacgacgctagcgcgcgcggtttcgccgattactgcggtggtggtcgttacgtcaggaattgcaggcgtttcgccttttgcggtggtgaagcgaacagcgatccccatggcagtcggtttcgtggtgaatatgattgccacaatcacgctattttattaagccattaaaagacaaaacaggccaccagggcctgtttttgtattacttcacaacgcgtaatgccggtcgaccaccgcgtggtggctgcggaggttcatcgtcaggatgagtgtcatcatcgtgatctggcttgtcgccatcaataaccgacataacggtttcgttgtctgccgatgcctcttcatcattcatgatgctggtatcttcatcgtaggcagcttcaggctcaaacatcgtgcctgcgccattttcacgggcgtagatagccagcacggcagccagcggcacagaaacctgacgcggaatgccgccaaagcgcgcgttaaagcgtacctcatcattcgccagttccagattgccgacagcacgcggcgcaatgttgagtacgatttgcccgtcacgcgcatattccataggaacctgcacgccagggagcgtcacatccaccaccaagtgcggcgtgagctggttatccagcaaccactcatagaatgcacgcagcagatagggacgacgtggtgttagctgtgacaaatccatacagattaactccggcccagacgcatttcacgttctgcttcagttaaagaagcaaggaaagagtcacgctcaaagacgcgggtcatatagcctttcagctctttcgcacccgggccgctgaactcgatgcccagttgcggcagacgccacagcagcggagcaagatagcaatcgaccaggctgaactcatcgctcaggaagtacggcttctgaccgaagaccggcgcaatcgccagcagttcttcgcgcagttgcttacgtgcggcatctgcttcagaagctgaaccgttgatgatggtgttcatcagcgtgtaccagtctttttcgatgcgatgcatgtacagacggctttcaccgcgagctaccgggtaaacaggcatcagtggcggatgcgggaaacgctcatccagatattccataatgatgcgagattcccacagggtcagctcacgatccaccagggtcggaacgctctgattcgggttgaggtcaatcagatcctgaggcggattgtccttttccacgtgttcgatctcgaaacttacacctttctcagccagcacaatgcggacctgatggctatagatgtcagtaggaccggaaaacagcgtcattaccgaacgtttgttggcagcgacagccatgaaaacctccaggtatagtcagaatttttactgctaccagccaccaggtggccagtcagaagttgtgttacccagtaaggaacgactctctttgttcgaaaatcaaacaaaaaatgagcaatacccgacatttgggcagaaaattggatgatagtttaccagattttgcgacctttgtggtgagtcgatgccggaaatggggaaaagagatgcgctttagtctgaaatagttgacttagtcccttattggcgatgtggtttttgttttgcctgtctgtcagacggtagcaaaaagcaactttccaatttttacgctgattcagaatttaaccataaaaaaacccgccgaagcgggttttttcgcaaattgttttctgccggagcagaagccaattaacgtttggagaactgcggacgacgacgtgctttacgcagaccgactttcttacgttcaacctgacgagcgtcacgagtaacgaagccagctttacgcagttcagaacgcagggactcgtcgtattccatcagagcgcgggtgataccgtgacggatcgcaccagcctgaccagagataccaccacctttaacggtgatgtacaggtccagtttctcaaccatgtcgaccagttccagcggctgacgaactaccatgcgagcagtttcacgaccgaagtactgttccagagaacgttggttgattacgattttaccgttgcccggtttgatgaaaacgcgagctgcggaacttttgcggcgaccagtgccgtagtattgattttcagccattgcctataatcccgattagatgtcaagaacttgcggttgctgtgccgcgtggttgtgctcgttacccgcgtaaactttcagtttacggaacatagcacgacccagcgggccttttggcaacatgcctttaaccgcgatttcaatcacacgctcaggacggcgagcaatcatctcttcaaaggtcgcttgtttgataccaccgatgtggccggtgtggtgatagtacactttgtcagtacgcttgttgccggttacagcaactttgtcagcgttcagaacgatgatgtaatcaccggtatctacgtgcggagtgtattccgctttgtgcttaccgcgcaggcgacgagccagttcagtagccagacggcccagagttttaccggtcgcgtcaacaacataccagtcgcgttttacggtttctggtttagctgtaaaagttttcattaaaagcttacccaataaatagttacacgttggtgaacacccaaacgtcttcaattgttgaggttcacacgacaaagtccggcaaacctaccccttcgaatagcctatgccagcacacaaaaagttttgggaaaaaaactttcttgtaacgtggggtcgcaggattatagagaagtcggggtcaaagatcgacccctttttgtgatttgtgacaggttttaacccgccaaatgctcgcgcttcagatactcttcgctttgcatctcttgcagacgtgacaggcaacgctggaactcaaacttcagccgatcgccctgataaatttcatacagcggcacttctgcactcaccactaatttgacatggcgctcgtaaaactcatccaccagcgcaataaagcgccgcgcttcgctctccatcaaccgcgtcataactggtacatcaaacaacatgaccgtatgaaagagacgtgagagcgcaatatagtcatgctgactgcgggcgtcgacgcacagcgtagtaaaagagaccgccagcgtctggttctcgacgcccattgtcgccaatggccgatggttgatttctaacgtcggtgaattttctcgtttcgcccccgccagcgccaaccatagtttatccatctgcgcccgggtttcatcgttgagtggcgaaagccacagatgcgcctgagtgagtgtacgcagtcgataatcaacaccagcgtccacgttcattacatcacaatgctgtttaatggcatcgattgcaggcagaaaacgcgcacgttgcaggccatttcgataaagttcgtccggcggaatatttgacgtcgctaccagggtaataccgcgggtgaacagggctttcatcagaccgccaagtagcatggcgtcggtaatatcagaaacaaaaaattcgtcaaaacagagcacgtcagtttcggctttaaagcgatcggcaataatttccagcggatcggtctgcccctgtaaggcagttagctcttcatgcacccgcagcataaaacggtgaaagtgcaggcgctgtttccgctctcccggcaggctttgatagaaaaggtccatcagccaggttttcccgcgtcctacaccgccccacatatataagccacgcactggcgtatgctttgtgtcttcgcgtttaccccacagcttaccgacccgcgccattagcccactcgtcctgggggctggtggcgtgctattgatgagttcctgataaataatttccaggcggctgacggcctctttttgaacgtcgtcgggttgatggctgccttcattgagcgccttcaggtattgcgatgttggggtaacgctttgcatgatcttattgttattccttgaataatcggtgcgccgttgttcacggttgacgaaaaaaaggccgttctacactacgcgatatgcagtcgggattccacttctgtggaattaacggttatagtggcataatcagccgcaggcatggagcctgaagccaacaccctacggaaacaaaagacaacgggagatgttcatgacctgggaatatgcgctaattgggttagtcgtcggcatcattattggtgctgtggccatgcgttttggtaatcgtaaactacgccagcaacaggcgttgcagtacgaactggaaaagaataaagctgaactggacgagtatcgcgaagagctggttagccactttgcccgcagcgcggaattactggataccatggcgcacgactatcgccagctgtatcagcacatggcgaaaagctccagcagcctgctgccggaactgtctgctgaagcaaacccgttccgtaatcgtctggcagaatctgaagccagcaacgatcaggcaccggtgcagatgcctcgcgactattctgaaggcgcatccggcctgctgcgtactggcgcgaagcgcgactaatttatttttcgggcgcagccattgcgccctcctcttctctccctccccgactatcatttaatctggtgtctcattgttagccgtctgaaaattcaataacatcaaactgttttgaatctcttttcttatcattcaggtacgagagcaggaataatgaaaaaacaaacccagctgttgagtgcattagcgttaagtgtcgggttaactctctcggcgtcatttcaggccgtcgcgtcgattccaggccaggttgccgatcaggcccctctccccagtctggctccaatgctggaaaaagtgcttccggcagtggtgagcgtacgggtggaaggaacggccagtcagggacagaaaatcccggaagaattcaaaaagttttttggtgatgatttaccggatcaacctgcacaacccttcgaaggtttaggttccggtgtcatcatcaacgccagtaaaggctatgtgctgaccaacaaccatgtgattaatcaggcacagaaaatcagtattcagctcaatgatgggcgcgagtttgatgcaaaactgattggtagcgatgaccagagcgatatcgccctgttacaaattcaaaacccgagcaaattaacgcaaatcgctattgccgactccgataaattgcgcgtcggtgattttgccgtagcggtcggtaacccatttggccttgggcaaaccgccacctctggcattgtttccgcattaggccgcagcgggttgaatcttgaaggtctggaaaactttatccagacagatgcttccattaaccgcggtaactccggcggtgcactattaaaccttaacggtgagttaattggcatcaacactgcaatccttgcgcctggcggcgggagcgtcgggattggatttgccatccccagtaatatggcgcgaacactggcgcagcagcttatcgactttggtgaaatcaaacgcggtttgttaggcatcaaaggcaccgagatgagtgccgatatcgccaaagccttcaaccttgacgtgcagcgtggcgcgtttgtcagcgaagtgttgccaggttctggctcggcaaaagcgggcgtcaaagcgggcgatattattaccagcctcaacggcaaaccgctgaatagctttgctgagttgcgctctcgtatcgcgaccaccgagccgggcacgaaagtgaagcttggcctgctgcgtaacggcaaaccactggaagtagaagtgacgctcgataccagcacctcttcgtcggccagcgctgaaatgatcacgccagcgctggaaggtgcaacgttgagcgatggtcagctaaaagatggcggcaaaggtattaaaatcgatgaagttgtcaaaggaagcccagctgctcaggctggcttgcaaaaagacgatgtgatcattggcgtcaaccgcgatcgggtgaactcgattgctgaaatgcgtaaagtgctggcggcaaaaccggccatcatcgccctgcaaattgtacgcggcaatgaaagcatctatctgctgatgcgttaatgtcgtaaaccgggcatcaggcttacgtgtgatgtccggttaactcgtggtatgctgctgccgttcccttttttaatgacgcctccatcatgtttgtgaagctcttacgttccgttgcgattggattaattgtcggcgctattctgctggttgccatgccttcgctgcgcagccttaacccgctttccactccgcaatttgacagtaccgatgagacgcctgccagttataatctggcggttcgccgcgccgcgccagcggtggttaacgtttacaaccgtggtttgaacaccaactctcacaaccagcttgagatccgcaccttgggatccggtgtaatcatggatcaacgcggttatatcatcaccaataaacacgtcatcaacgacgccgatcagatcatcgtcgccttacaggatggtcgtgtatttgaagcattgctggtgggatctgactctctaaccgatctggcggtacttaaaattaatgccactggcggtttacctaccattccaattaatgcacgtcgcgtaccgcacattggcgacgtagtactggcgatcggtaacccgtacaacctcgggcagaccattacccaggggattattagtgccacgggtcgaatcggtctgaacccgaccgggcggcaaaacttcctacaaaccgatgcttccattaaccacggtaactctggcggcgcgctggtgaactcgctgggagaactgatgggcattaacacgctgtcgtttgataagagtaacgatggcgaaacgccggaaggtatcggctttgcgattcctttccagttagcaaccaaaattatggataagctgatccgcgatggtcgcgtgatccgcggctacattggtatcggcggacgcgagatcgcaccactgcacgcgcagagcggtggtatagatcaactgcaagggatcgtggttaatgaagtgtcacctgacggcccagcggcgaatgcgggtattcaggtcaacgatctgattatttcggtggataacaaaccggccatctctgctctggagacgatggatcaggtggcggaaattcgccctggttcggtgatcccggttgtagtgatgcgtgatgataagcagttaacgctgcaggtcaccattcaggaatatccggcaaccaattaagtcgagtgctcaaaacaaaaaaccggagtctgtgctccggttttttattattcgctaattaattacttattaacgaactcttcgcccagggcgatatctttcttcagcgtatccagcataccttccagtgcgctctgttcaaatgcgctcagggtaccgatagatttacgctcttccacgccgtttttacccagcagcagcggttgagagaagaaacgggcgtactgaccgtcgccttcaacgtaggcacattcgacaacgccttgttcgccctgcagtgcacgaaccagagacagaccaaaacgtgcagctgcctggcccatagacagggttgcagacccaccaccggctttcgcttcaaccacttcagtacctgcgttctggatacgtttggtcagatcagccacttcctgctcggtaaaactaacgccaggaacctgtgacagcagcggcagaatggtaacaccagagtgaccgccaataaccggcacttcaacttcgcctggctgtttgcctttcagttccgcaacaaaagtgttggaacgaatgatatccagcgtggtaacgccgaacagtttgtttttgtcataaacaccggcttttttcagcacttcagcagcaatcgcaactgtggtgttaaccgggttagtgataataccaatgcacgctttcgggcaggttttcgcaacttgctgtaccaggtttttcacgatgccggcgttaacgttaaacaggtcggaacgatccatacccggtttacgcgctacacctgcagagataagaacgacatctgcgccttccagcgccggagtcgcatcttcaccagaaaaacctttgattttcacagcagtagggatatggctcagatcgacagccacaccgggagtcactggagcgatatcatacagagagagttctgaacctgaaggcagttgggtttttaacagtagtgcaagcgcctggccaataccgccagcagcgccgaggactgcgactttcatcctaaactccttattatattgataaactaagatatgttgctccgctgccgcgaccttaatccacaaaattgccgtttacaatgaccacatctcaagaatgtgtagtcacgcaagtttagcgtttatgcatttaattgccgtaatcaggaacctaacttacgtaattaacagtcgcttatgcattagcgcaacattccaacaggtggtgacaatataccctaccgttcagccaaaacaacatcaatttgataacaattaatttacttttaagcagaatttgcatgccgtgacgcaggcatgtttctcaataacgaaatttgataaaatcccgctctttcataacattatttcagccttcttcagggctgactgtttgcataaaaattcatctgtatgcacaataatgttgtatcaaccaccatatcgggtgacttatgcgaagctcggctaagcaagaagaactagttaaagcatttaaagcattacttaaagaagagaaatttagctcccagggcgaaatcgtcgccgcgttgcaggagcaaggctttgacaatattaatcagtctaaagtctcgcggatgttgaccaagtttggtgctgtacgtacacgcaatgccaaaatggaaatggtttactgcctgccagctgaactgggtgtaccaactacctccagtccattgaagaatctggtgctggatatcgactacaacgatgcagttgtcgtgattcataccagccctggcgcggcgcagttaattgctcgcctgctggactcactgggcaaagcagaaggtattctgggcaccatcgctggcgatgacaccatctttaccacccctgctaacggtttcaccgtcaaagacctgtacgaagcaattttagagctgttcgaccaggagctttaatctctgccccgtcgcttctggcggcggggaaaatgttgcttatccctctcattccccttctttctcctgcgatacatttaacgaatagtgcgttttaccgcgacacatcattcacaaaatgaatacatacggtaaaaaaagcacattatgcaaaattcattatctaattgaaaatactataattaataataaataaccgtgttttttatacttttttgttattaaaattcacatttttaacacttagtatcaactgaaacagttagcgtggtattaattagttcaataattagtgtatacttgattttgtgatatgggtcacgaaacaaaggcccagctaaaagattatgtcgaggtaaaaatcatgaaaatcaaaaccactgtagctgcattaagcgtactttctgttctctctttcggtgcattcgctgccgactccattgatgctgcacaagcacaaaatcgtgaagcaatcgggaccgtatccgtaagtggtgtggcgtcttcgccaatggatatgcgtgaaatgctgaacaaaaaagcggaagagaaaggcgcaacggcctaccagattactgaagctcgtagcggtgacacctggcacgctacggctgaactgtacaaataaaccctcatcgtcttgtccgacgatattgcccccggttcgggggctttttttcgcgctaatgacgaacattaaaacgcaaatgcccttccagctcttcctctgcctcatcaaacagcaatattaacgcgccaaaacggcgacgcgttttctctcccagatgaacaaattcaatctcaagtggtagcggcaggacatcgttcattaacacatcccatagtgagtcgagatcgcgtaccttatctttagccagaccaaaggtttggctaaagtcacgataaaaatcctcctgactctcaatctcatcaaaatcaaaggtataaatattcatctgttgccaccgtcacgtttcgcggcgagttctgccgtgcatcgctaagtatagccatgaaaaaaccgacgcttttggcgtcggttttgacttaactatcggtcaacgcatgttgatacttatggagcatccccgccagccgatgaaccggttccgtcacctgcggtggcgcttgccagatgcgtagcttttcctggtagatttccagttcttccagcaactggccaaagtaccgacgacgtttatcatcgctacgggcagatatcacatggtctgctgtgcggcgcatttgtcggtgaaacgccgataaatcctcgttaaccgggatcggcgcatcacgcaggcgctggtgcgcgataatcatcgtcagcgccaggcgaaatttcggcaaatcccctgggaacttattcatcagcaaaaacagctgctgataaagtgccgggaggtggttctctttacgacgtgccacattggtagtcatcgcggaaacagcggcagaaacaaactgattaagcagtacacgtccggtcctgtcgcgcgatttatcccgcacaagcaaaataacggtgaacgcgagcacacagccgacgatttgccctaatgcgctgtcgagaaactgactgaaatggaaagtcatcgggttatccagcacgataatatttatggtgctggccagcgcccccatcgagcccagtcgccgtttctgtacttctataccgaggaaaaatcccagcactgccaggctaatacacagcagcaacatgctctgttgggtattagggataatcaccaaaaagtagagcagccctaacggcagcgcggccagcgtcccgtagataaagtcgatcgccaccatgcgtggattcggcaaacgcattgccagtgacgtcactaccgcaatcatcaccattgcaccactgccggaagtccagcccgtccacagccagaaaagcgtgcccagaatgcaggaaagtgtggttcgccagaagttaaccatcgcatgatgacgttcggctgactctactttgacttccggttcgccttgcaggatctcttcttcggtggcgttgatttttgtgttactgataacgccgcgcttgagaagctgataacgcgttgccgccgcgacccagctataaatggtgacaggcgtttcccgttccccggtccaggcgataactctccgcaggcgtttgagctgcttgtggacgtcctgcgcggtttctaccggcgtgtcaaaaaattcgcggaaagtatcagtgatcaattccgggcgcgtattctgaataagataagtttcgcaggattgggtaatcagcgtcagcgatagcgtattgatcgcttttaaacgtcgattggcccgcgcccagcgggaagattccatattcaggttgctgcgcatgccttgtagcgccgtggtgcgtcgcaccaggtcgccccaggctttatcgacaacttcaccatcgccatgcttgatacagagttgcattaattgatattgcgcgaccagcaaactttccagctctcgatccacttcttgtttgatcgatcgcggagaaaagagcaaatccgccataatcgcacacacaataccgataacgatctcgctacaacgttcgacggcaaactgcggcgtaagcaatggttccggctgaatggtgatcacaatgatcagcgcggtataaccggccagcccccacgcgtacgagttttctattcgtaccagcgaggatatccaggtacaaaaaccggcccagatacagcacaccagaatcatcaataatggtgcgcggatcatcgcaatgatgatcaccagtccggcaatacagccaataaatgtgccgatgatgcgcaaaaagccacgatagcgaatagcgccagaatacggttcacctcccgcagcaaaggccggaccggcggcaacaatcgccgctgtcagtaccgcccagcgtggcgtttccagctggaagtgaaagccaacaaacagcgccagtacaatggcggtcgccagttttaccgcaaagcgaatatgttggttagcaatggagaaaatacccatcgtgattaaccaaactcacgcaggcgatgggccattttacggaagaacgaatcctggctttcgtcgcgatcttgtttgccagtgaccaccactgtagcagtggtgcccgcaggccagatgttctcttgctggttgtcgagacgaatacgaaccggaacacgttgcgccaaacgcacccattcaaggttagagtcgatggtcgccatccctttgtcgtcacgcgtgctgctggcgttggtgaccccagcggcaacactatcaacagtccctttcagcactttgttactgccaagcggcgtgatctctgcacgataccccggacgcaccccttccagcttagtttcttccatataggccagtacatagaaggagttctgtttcaccagcgcaaccgccgttgatcctcgagtaataaactcaccggtatagacgttgaggttggtcacccagccatctgctggcgcgcggatcaccgtgcgttcaagatccagttttgccagatcgcgggtcgcctgcgctttcgctaactgatgcagaaccgtttgtagtacgttgttagcctggtcgatctcttcgcgagacatcgcctgcacaccgagacggttacgacgtccggcctcctggcgtttctcctgtgccagtacctgataataagcaacatcggcttgcgcttcctcaagcgccttttgatagcgcggctggtcgatggtgaacagtatctgtccttttttcaccagctggttatcatgaacattcacctgggtaatgagtccagaaacgtccggcgcgatcgcaacgacgtcagcgctaaagcgcgcgtcacgcgtccagggggattcggtgtaatagacccaggcattaaaaattgcgatgaaggccagaatgactaatacgaccgtgatggccgtacgggagaattttcttattagtgttttcacttcaacctcaaacgaacagtcgcgatatcaaataaaacaagcagcaatagagcgcggtgttgaacaacgccggatgccagacaaagtcgtagatacctgttggcacaagtacccggcgcaccagccagaaaatcgccagtgataaaagcaattcaaaaaatatcggtgggaaggacagcccaaacaccacgataacgggaaacaaactcatgttgaccttggttgtatagagagagcaggcgttattattttcagcatctgtcgccgcagagaagggcatggaaagccgggcgagagcaacattgctgtagattgatatttaatatattagcgtaactgttatgctgttatctatattatgtgatctaaatcacttttaagtcagagtgaataatggaacgactaaaacgcatgtcggtgtttgccaaagtagttgaatttggctcttttaccgccgccgccagacagctacagatgagcgtttcgtccatcagtcagacggtgtcaaaactggaagatgagttgcaggtaaagctgttaaaccgtagcacacgcagcattggcctgaccgaagccggtagaatttactaccagggctgccgtcgtatgcttcatgaagtgcaggatgttcatgagcaactgtatgccttcaataacacccccatcgggacgctacgcattggctgttcttcaactatggcacaaaatgttctcgccgggctgacagccaaaatgctgaaagaatacccaggtttgagcgtcaatctggttaccggaattccagcccccgacctgattgccgacggtctggatgtggtgatccgcgtcggcgcgttgcaggattccagcctgttttcccgccgtcttggcgcgatgccaatggtggtgtgcgccgcgaaaagctatctcacacaatacggcataccggaaaaacccgccgatttaagtagccattcatggcttgaatacagcgtgcggcccgacaatgaatttgaactgattgcaccggaagggatctcgactcgcctgatcccgcaagggagatttgtgactaatgatccgatgacgctggtgcgctggctaacggcgggtgccgggatcgcctacgtgccgctgatgtgggtgatcaacgagatcaatcgcggtgagctggagatcctgctgccgcgttatcagtcagatccacgcccggtttatgcgttatataccgaaaaagataagctgccgctgaaggtacaggtcgtgatcaactcgctgacggattattttgttgaggtcggtaaattgtttcaggagatgcacgggcgcgggaaagagaagtaattcatattgtactgttacgttctacaaacctgtgccaacgggttcccctcaccctaaccccagaggagcgaggggaccgttcgtgcacgtagaaagattaattatccttctgaaaataatgaaattattacgcagtaccgccaacagtcaggttatcaactttcagcgttggctggcccacgccaaccggcaaactttgcccttctttaccgcagacacccacgccgttatccagtttcaggtcgttgccaaccatcgaaatctgctgcatggtttcgataccggaaccaatcaacgtcgcgcctttcaccggcttcgttactttaccgttttcaatcagatacgcttctgaagtggagaaaacgaatttgccggatgtaatatccacctgaccgccaccaaagttcggtgcatagataccgtactcaacggattcaataatttcctgcggggtcgatttacccggcagcatataggtgttggtcatacgcggcatgggcagatgggcgtaggattcacggcgaccgttgccagtcggcgtcatccccatcaaacgcgcgttgagtttatcctgcatgtagcctttcagaatgccgttctcaatcagcacgttgtactggcctggcgtaccttcgtcatcaatcgccaccgaaccacggcgatcgaccatcgtgccgtcatcaaccacggtacacagttctgaagccaccagctccccgacctgcccactaaatactgaagtgccgcggcggttgaagtcgccttccagaccgtgacctaccgcttcatgcaacagcacgcccggccaacctgcgccaagtactaccggcatggtgcccgctggtgcagcaacggcagaaagattgaccagcgccatacgcactgcttcttttgcccatgcatccgcacggacttcgccgtcaagatcggcaaggaagaactcataaccaaaacgaccgccgccgccactggcaccgcgttcgcgtttgccatcttcttcgaccagaacgctcacggaaagacgcaccagcggacgaacatccgccgccagcgtgccgtcggtggccgcaaccagaattaattcataaacgccgctgaggctggcagtcacttcttgtacgcgcttgtccgcttcgcgggcaaccttatcgacgcgacgcaggatatccagcttctcttcacggctcatgctttgcagcggatctaccgaggtatacaacgggctatgctctaccgcgcccagcgtctgtactttgccatcaccactatcacggacgatggtgcgcgccgcttgcgcactctgttccagcgccagcaggctgatttggtcagcgtaagcaaatccggttttttcaccactgattgcacgcacaccaacgccctgatcgatgttgtaagaaccatctttaataatgcggtcttctaaaacccaggattcgtgatagctcgactgaaaatagagatcgccataatcaaggcgacgttcggccagttgaccgaggatcgcgaacaagtcctgatgtttcaggccgttcgccgctagcaattgttcacttaccaggttaagactcatcgtttttgctactcgttagttactgcagtagaggattttttacggctgccggatgcggcgtgaacgccctatccgacctacggttatgttctggctcgttggcctttggcaacgattatcatatgagattggggcaattacgcgccctcgtcaaatcattgcgctttttctttacgcggttggcgcaacacttcgttgatttgcggatcgtccagcggacccgaaatgtgatagcgcaaaatggagactttgctccacagcggccccagcactttactggcggcaaacactgccgcgccaacaatggggttaaccgcaaaagccgcagccacgcccaccgtcgcagaaatctctggtgcgacaaccgcttccatattcaggtcgcgacgtaccagatttaccgaccctttcatggcgatatccgcctccaggccatccaccagcgtgtcgtcggtgtgcataacgccgtctttaatccacgcggtgctgcgaatggagtcaaaatagaacccttcgccaaaagtgtctctgaaatcaaaacgcagcttacgcatcagggcatctacgctcaataagcgcagcaattgcccggcatgtccggtattgatttcggtaatttcgcctttacccagttgagtatgaatgatgccattcaacgtcgcttcatctggctgccagggtgctttgcgccagtgtaaatcgtaatccacattaaatgacgactggcgtatgggcgtcgtgacaccaaaaaattctgcggcggcatcaattttctgcccgcgcagttttcctttcagcgaggtacgttcattccccggattattaacccattcaccatcggcagtaagccgcgagaaaccagtatcaatcagtccattggtcagcgttaacgtatcgccagaaatggtgagatcactgtcaatacgaccgaatttttgcccccagaaccagcactctgtgcatcgtatttgtgcgtccggccagccacggaagttaatgcgctccgttgtcgggaaaggtgatgacggtgttgaatcaccacgagttttcgccacgctcgggttgtaataaagatatttgatattcgccagccacggcgcgttattacgcatcgccagcgtggcattgatttcacgcccctgcgcctcaaccagggtgccatttgccgtcggttgcgaaacaatactcaggttattccattgctgatttcccagtgacaacataggcgtacgtaacgttatgtgttgtgggaaactcgctgcaccaccgacactctccgcagcgcctttctggaacagggccagccactcggcaccattcatcggcggcatattgagttcaacgccactttgttccggcaacggcgggagcgttttactgtctgccgcccaaatagcacgatcgagcgtcagcttttgaccaagcaaccagcggctattgaaatggttatccgcaccagcctgtccggttaattcaaagctgttgagattgccatcaaccttaacgtttaccggcagtggttcacccgcaggtttggctaacggtgaaggtaagtgactgctcacattcttcagatcgccgttcagctctacgttataggtcgcgccagcatgataaggcagctcaatgcccactttaccatcccacgccacgctgccactcaatgcttcgttcaccgcttcaggcagaacgccggttttcgccggttgccagttaccgttgaggtttaccgctacctggtaggcttttgccccttctttggtggaaaaatccacgttcaacggctgattaaaccagcttgctgtcagtggttcactttgcagatcgccattgataaagctgaatttaccgctcaaatttttcagggtgctgtcgagtggtttgataaacagactgttattacgcagcgtcacttcacctttcgcggttaccaactcgccgttcagcgggatatcaagatgtaagcgagcattcacatcgccgtcgagctgaagttcttgcagggtcgcacccagggaatctttcagcggtgtctcatcaaagtaagggcctacggctttacccggacctttaatgtcagcgtcaatcagcagtttttcttttgagtagtcagggatcactgcggtgagattactcgcgcgcacgccgcccagattaacgccatcggttttcatccataaaccgtcgttaataaagtccagttcaatatcaaggttagttaatgcaggccagtccggctggaaggcaaacttcgcgttgcgcagcggcaccagcacttcaaactgaccttcgttgtgtttataggggaagagttgcggattgccaccataaaccagcgtcgcgttatccgcttcaccgccctgaatcgcaccacttaaataatcaaccaggtctttacccatcaagttttccgggaaatagcgccaggcttgtgaaccatcatcggtactgatgccagccagaatacccagccagggttcatcgttagcaggttgcaggtaacgaaaaccgccgcgcgcatggacggctttggctttaacgtcaatattacgcccatccagctggaaacctttgtcattgttcagccagcttatagttgcctggccgtcggcgatttccagtggcgcacggaataccgtttcgtaaggcatctttgcctgcttcatcgacgcggtaagcaaaccattttcaacgctgccggaaagcgtcccggagaagtgttccgcacccggtaataatttccattgcttccaggccagatcgctccacgatgcctgaaaacgggtcttgtctgccgcctgaagcgggatatccagcgccagagtgttaatcttgccgctcggttgtgtggagcgccaaacatcacccagtgcaggtgaaagtttcgcggccagcgggcgtacgccctccaggcctgccagctccagattactggcgcgaatccggagttcgtcactgcgtttattgtctttgccgccaacgtcctgttccggtatccaggccagcgtcaatgctccgctcggccagggtttgccgtccatcgtgatccgtgtatcgggaatagagaactgccagcccggattttcacgcgtaatatgcgcggtcagattatccaccgacagcgtatgcgtttgcttctcgcccaaccagctggcaccgccctgtttcagccagacgtcaccgccggttacatcgcctttgtcgatcgtcatccagccttcaagggagaactgtgccgtttccagagcaatattgtcctgcatccatttaccgagccacggcttcaggtcgatgtcatccgcctgtagccagacgcgaccattgcttaacaacccctcatcatcgcgcaaatccatacgcacctgcatcacgccgtgctgtccggtaaggctggagaggcttaccaggccttccgcacggtgtcgacgtggatcgttcagccaggtgagttgtgggatcgccagctcggcgcgctgaccggatggcgtcagaaaactgacttcactgtcgcggagatcgaaatggtcaaattgacgaagaaacagatcgctgatgtgactggcttccaggctatcattaccaccaccgctggtgataggagtgttggtgcgaaagcgcagctgccagaaagtgaggtcgcgaaactgccagcgcatatgtaacaagctctgccagacatccagcgccagagtaacgcgtttaaccgaaaattcgccgccatcttttagttctgcacggatgtcgtgtgcttcaagcgtcgggccaaaattctgccagctggctgagagctgactggcttctaccggcatgccagtcgcggattctattttgttgaggatttccggacgccaggcgtcaagatgcggtaaagcaatacgcaggccgctaaccagcagggctgcgatcacaacgagcgcggctccagtaagcagtaaaatccccggcaatcgcctcacccgtcactccttgtctgctaaaaatgtgactcaaaaaccctttgccggatggcggcccagcatctgtttacatcattacgacgtcaaactgctcctggttatagagcggttcaatttgtactttaacctgtttaccaacgaaaatttccacttccgccagcgagtgtgactcttcgcctttcaaggcttcagctactgccggagaagcatagaccaggaaacggtcggagtcgtaagcatggtggacacgaacaatctcgcgcatgatttcatagcataccgtttccacggttttcaccgttccgcgaccgtggcaggttgggcattcgttacacagtacgtgctcaatgctttcgcgggtgcgtttacgcgtcatctccaccagccccagcgccgaaaaaccattaacgctggttttcacccggtctttgctcaacgcctgctccagcgagtgcagcacgcggcggcggtgatcttcattattcatatcgatgaaatcaataatgataatcccacccagattacgcaaccgtaactggcgagcgatagcctgcgtcgcttcaatattggtattgaaaatggtgtcgtccagattgcgatgaccgacaaacgctccggtattgatgtccacggtggtcatcgcttcggtctggtcgataatcagataaccaccggatttcagttctactttgcgttccagcgctcgctggatttcgttttcgacatcaaagagatcgaaaatcggctggcgtccggtgtaatgctccagcttgctggtcatctcgggaatgtactccgaggtaaactccagcaatgcttcgtaagtcaggcgtgagtcaacgcgaatgcggtccagttcggcgtcggcgaaatcacgcagaacacgctgcgccagcgccagttcgccgtacagctgataacgggtctgcgggcgttttttacgctccataactttggtccagacgcgtttcagataagcggcatcggaggccagttcagcctcgccaaccccttccgctgcggtacggatgataaacccgccctgctcgtcgcaatactctgcgaccacttttttcaggcgttcacgttctgattcgctttcaatacgttgggaaacaccaacgtgagaagcccctggcataaagaccagatagcgagaaggcagcgtgatatcggtggtcaggcgcgcccccttagtgccaagcggatctttcaccacctgcaccatcagatcttgcccctgacgaaccagttccgagatgtcgcgcaccgtgaattgcttttgttcttcacccgccacacattcggtgtgcggcatgatatcggatgcatgaagaaacgcggctttatccagcccaatatctacaaaagccgcctgcatacccggaagtacacgacttacacgacccttgtagatattgcctactattccgcgtcgcgcctcacgttcaatatgaatttcctgcagaataccgccatcaatatacgccactcgcgtttccgaaggcgttacgtttactaacaattcagccgtcatgtttatcccttttctcacgcagtgcgttaaaattacttaataattcatacgtttcaaccagcggtaagccgactacggcgtgatagctgccatttatcttcctgacaaaacagccacccagcccctgaataccgtatgcacctgctttatctaacggttcaccgctggcgacatagcccgcgatgtcttcgtctgttaacgttctgaaagtcacatcggtgaccaccaggcaatcgagaatgtgctggctgtcggccaacgccactgccgtcatcacctgatgggtctgacccgataatttgcgcaacatctgcgccgcatgctctgcgtcgcgcggtttctccagcacttctccattcaggataacgatagtatccgcacccagcaccgggagatcctgcgccgtttgcgcgacacccgcctgtgctttctcgcgcgccagacgcacaacatactgctgcgcgctctcctgcggctgacgctgctcctcaatgcccgtaacaatacgttcaaaggtcacgccaagttgcgcaagtaactcctgacgacgcggagaaccggaagctaaatacagagaagtcatagaaacctttattgcactgcaaactgctgacggactttacgcatcagcaagaaaatccacggccagagcaccccattgactacactactccagaacacttccggtctgaaagagacgttaatcactaaaaactctgcccagaaaacaataatatccaccaccagcgaaagcaacatgacgaccagcgcctgctgccataatgcgaggttgcggaaaagctggtatttcagcgccaccaggtaagcaatgatgctcatcgccaatacgcgtacgccaagcgtcgagccgctgatcagatccagtatggcacccatcacaaaacctgtgcccacatttacgcgatgaggcaaggccaggatccaatacaacaagatgagtaacacccagtttggccggaaaacaatcaggttatccggccagggcatgatttgcagcaacagcgcaatgaggaaagagagccagattacccaacgtccctggctacgatagctcgccactattgccctcccggcgcacgcgcaggcggttgagcaccactttgcggcggcgtagccctttgtggagagcgattagcagcaggctgtgtgggcgcagcaggcgcagtagctgcatttcctgtcgtcggttgctgcggagtcggctgagcgatccccgttgccggttcaggtaactttggccccatcgcgtctggcgaaggcaatacctgcggcatcatctgcatcagacgttcattagcaacacgatgcacctcttccggcgtcatcgggttagcgccgttacgatccgcgccccacagcagcagcagataacgcaaacgttgcagtcctgcagtcggacgcgcctgaatcacagtataagcgcgctgggtatcgagttttacggaagagacaaccgcgaccggatagccttccgggaaacgaccgcccagaccggaggtcaccagcacatcaccaacacgaatatccgtattcgctggcagatgctcaagctgcaaatcatccgtacaaccgttaccggctgcaattacgcggatatcgttgcgcagcacctggattggcagcgcgtgggtcgcatcacaaatcagcagcacgcgactggtcagtttagcgacggccaccacctgaccaacaacacctttgtcgctgatgaccggctggccttcataaacgccattaacgctacctttatcgataacaacttgatcgctataaggatcgttaaccgtggagataacctgagtcaccattttctgctcatcctgacgcagcggggaacccagcagctcgcgcagacgcgcgttctcctgtttgtattgtccaagcatcagcagttcactgtttttcagcaacagttcctgacgtaacgcccggttttcaagttctagttggtcacgcgaggccagcgtctgcgatacgccatccagcaattcacgaggagcattggaaacaaagtagaaaggactgacggcggtatccatataagtacggatttgactgaacgtccccaggcggctgtcggcaataataatgccgagcgccaccagcaccgccagaataaggcgaatctgtagcgacgggccacggctaaaaattggcttcataagttatgcgtattctcgtatcagaccaggcagggtaaacagacatttcccctgcctgcatccgattactcttcgctgaacaggtcgccgccgtgcatgtcgatcatttccagcgctttgccgccaccgcgcgccacacaggtcagcgggtcttcagcaacaacgactggaatgccggtttcttccattaacaaacggtcaaggttacgcagcagtgcgccaccaccggtgagcaccatgccgcgctcggagatgtcggaagccagttccggcgggcactgttccagtgcaaccattaccgcgctcacaataccggtcagcggttcctgcagtgcttcgaggatttcgttggagttcagggtaaaaccgcgtggaacaccttctgccaggttacggccacgaacttcgatttcacggacttcatcgcccgggtaagccgaaccgatttcgtgcttgatacgttctgcggtggcttcaccgatcagagaaccgtaattacgacgcacatagttgatgatagcttcgtcgaaacgatcaccaccaatgcgcacggaagaggagtaaaccacgccgttcaaggagataacagcaacttcagtggtaccaccaccgatatcaaccaccatagaaccggtcgcttcagaaaccggcaggccagcaccaattgcggcagccatcggttcttcaatcaggaagacttcacgggcaccagcgccctgcgcggattcacgaattgcgcggcgttcaacctgggtcgcgccaaccggtacacaaaccagaacgcgcgggcttggacgcataaagctgttgctgtgcacttgtttgatgaagtgctggagcattttttcagtcacgaagaagtcggcgataacgccgtctttcattgggcgaatggcagcaatattgcccggcgtacggcccagcatctgcttcgcgtcatgacctactgcagctacgcttttcggtgaaccggcacgatcctgacgaatggccaccacggaaggctcattcaatacgatgccttgtccttttacataaatgagggtattcgcagtacccaggtcaatggacaagtcattggaaaacatgccacgaaattttttcaacatactaagggataatcctgaaagctggggcggaaaagaaaatccgcttactttaccaaccacacgcagcagcgacaaggcgcaaaaatcatctgctacggtgaaaattagtgcagttcgtttcctttgttacaaatctctgcctgagtccagaaaggcttaatgcatcagcagcattcctcgcctgtttgcaaccgcgtaaggtcattcatctgcatatgtgctgcaacaatctggcgagcagacaagcacactcccatgagacgcagcgcgcgttattctacgtgaaaacagattaaacggcaggttaaaccgagtatctttgtgaatattttttcacgttagtatcaagtggctgtgaggacgcgaaaaaatccccttgcccgcctgtaacaccgcgctgaatcagggcctgccactcgcttcgcgaacgcacaccggtggcgtaaacttgggtgctggtcccggagcaggcttccaccaggctttgaaccagcagctggttctccgttcgcttctcaatgtttctgaccagccccggatggagcttgagtaactcaacattaagttctttgatccaactggtgcttaccagcgtcaaaccagcctggttgacggctacccgtacccctaaagcattcactaaacgaataacaggttgtaaacgactgatatgttgacctacatcggcctctgcaagttcaataattatgcgttttcgttgtgatttttcacattgcattaacgtatcgcgcagccaacgctgaaaacgcgggcgaatcagcgactcaacggtaacctgaatcgccagattttcctctggccagtaacgcaatagtggaataagacggctgatttgcagacggtcatactcttccgataagccaaactgcaagaccatcggcatatactccgccgagctaacctcttcattaccatcgaagatgcggcacatgagttcgcgatgatgaacctgaccttcgcgagtaaccgccggtttttgataaaggcgcgggccgccgcgactgagcatttgctcgataagcgtacgccagcgaacattaccgcgtcctttttcaggcaacgagtcatcgtaaatagcccagctattgccgccctgcaatcccgcattacgcgtggcagactctgcatgttccattacctgctcggtatcctgaccactacgccaggcgcagataccaatgtggatcatatcgtcgcgatcgagcattttattgttcggcaaggtatcgacggctttgattaactgaccggcgatgctctctgcctcttttaacgtccggtgcggtaacagcgcagcaaaatcactgcggtggtaacgcgccagcagtgcgccagggtagcgcatcataaatgtcgacagcagattcgtcagagtgaagaactgttcttcaacctggctgtgcccccaggtatcgctcaacatattgaaatccggcagacgaatcatcatcacgatcccgtgggtacctactttctcctgatcttccagtaacgttgctaactgattatcgaaaaagagtcggttattgaggccggttttcacgtcctgggcggcataagagcggatcagcgtatcaagacggctgtgttgttcgcgtgcgttctgaatttcacgaagcagcgtatctagcgcactgctggttctgggcggccattcatagatggttcccaacacattagagccacgctcaccgtttaagatacgagtagcccgggtttccagcaattcttgcccggcaagttgccgttgtaaccagcgtaccgccaggaagagcataacaatgataaagccaatcgcccccgtgagcggcgcggtagtcattaaagaatggaaatagttgcccatcggatcctgataaaccagacgcagcgacatccccggatgctttatcaacggaacactcagttcgcgaaacagatcgctggagccaaccggacgataactaccatttctggccagggtataaacctgtttatcaccatggagcaggtctacacgaacgatatctgccgacatcattaattcggtaatttgtggccttaatgtgctgaagtcattcgacacaaggtgggtatcaatcgccgtcgccaccgcctgaacgcgatgactaaacttatactgaattgcgttgtagaaacttagcgaacagcccagcaaagtcacaaaaattgttaacccggtgagcagcgtaacaaaggccgaaaatttcgtcgttaatctcatccttgtgttaactccgatagtgaggaagcgggcatactagcaaatcagatttatctcgcaatttattgcgcttcatcggctttgcttttccattagcgagtatagtcttcagaaattattttccaatccatcatgcacatgaggaccacttatgcaggcgttacttttagaacagcaggacggcaaaactctcgcatcggtacagacacttgacgaaagtcgcctgccggagggcgatgtcacggttgatgttcactggtcgagcctgaactataaagatgcgctggcgattaccggtaagggaaaaatcatccgtaattttccgatgattcctgggatcgattttgccggaactgtacgcaccagcgaagatccgcgttttcatgccggtcaggaggtgttactcactggctggggcgttggtgaaaaccactggggtgggctggcggagcaggcgcgagtgaaaggtgactggctggttgccatgccgcaagggctggacgcgcgtaaagcaatgattatcggtactgccggttttaccgccatgctgtgtgtgatggcgctggaagatgccggtgttcgcccgcaggacggggagattgtcgtgacgggtgccagtggtggcgtcggcagtaccgccgtggcgctgctgcataagttgggttatcaggtcgttgccgtttccggtcgcgaaagtacccatgaatacctgaaaagtttaggtgccagtcgtattctccctcgtgatgagtttgccgaatcccgtcctctggaaaaacaagtctgggctggggcaattgacactgttggcgacaaagtgctggcaaaagtgctggcgcaaatgaattacggcggctgcgtggctgcctgtggtctggcgggtggttttactctgccaaccacggtcatgccatttattctgcgtaatgtccgtttgcaaggggtggattcagtaatgacgccaccagaacgccgcgcacaagcctggcagcgactggtcgccgatttaccggaatcattctatacccaggcggcaaaagagatatctctgtcagaggcaccgaactttgccgaggccatcattaataaccagatccagggtcgcacgctggtgaaggttaactaaccatttagcaaggaataataagagagggaactcattttgacatcattattcaatcggttaacgggaaaagcggttagccggacagctttcgtcgaacaccttggtcaggaagttgtacaacatcatccaaactggaaagtcatgatttcgactgaccacaaattgatgcgcattgatactcctctaaacagccattattgatatgcctccgtcgcctgttaggtttatggtgctttgcctgggcgacactacgcttaacctattactgatttctggtcccatggggtgaataatctgattttatttgactacaaattaaccactcgaacctatttaatgctgagaattgtcagtcggttgattttgcgtgctttagcattcacatctatccagacgatgcagtgaaaattgggtaatccccagcaaccgctgcgtaatgtcgtctatcttgtcgcgatcctggcatccctacattatttgtggtctgtgaagattatctcattgcagcccctcatcttcgcagggctggctttacagcttttcaccttacgttataagaagttccgtcgatgatggcgctaatttcgtgaattgtgcggcttgttgcaaattacacggtgttgaaggttatttacatgttagctgttgattatcttccctgataagaccagtatttagctgccaattgctacgaaatcgttataatgtgcgacctcgtcctccctgacacagtttttgcgctgcggaaaaggtgacattggcgcaacgaaggtatattttgttttttgccggaggatagcagcagatcgctgcacaatgtccgtcaagtctaacattgacactctggggcaaaatagaccggcgtcccggcctgctggaatttatcgctatgcatacagctgtcggggcatacgctttacagacggcggtgaaacgcctgtcacaatcacactaaacaaagagtacggaacccactcatggatattcgtaagattaaaaaactgatcgagctggttgaagaatcaggcatctccgaactggaaatctccgaaggcgaagagtcagtacgcatcagccgtgcagctcctgccgcaagtttccctgtgatgcaacaagcttacgctgcaccaatgatgcagcagccagctcaatctaacgcagccgctccggcgaccgttccttccatggaagcgccagcagcagcggaaatcagtggtcacatcgtacgctccccgatggttggtactttctaccgcaccccaagcccggacgcaaaagcgttcatcgaagtgggtcagaaagtcaacgtgggcgataccctgtgcatcgttgaagccatgaaaatgatgaaccagatcgaagcggacaaatccggtaccgtgaaagcaattctggtcgaaagtggacaaccggtagaatttgacgagccgctggtcgtcatcgagtaacgaggcgaacatgctggataaaattgttattgccaaccgcggcgagattgcattgcgtattcttcgtgcctgtaaagaactgggcatcaagactgtcgctgtgcactccagcgcggatcgcgatctaaacacgtattactggcagatgaaacggtctgtattggccctgctccgtcagtaaaaagttatctgaacatcccggcaatcataagcgccgctgaaatcaccggcgcagtagcaatccatccgggttacggcttcctctccgagaacgccaactttgccgagcaggttgaacgctccggctttatcttcattggcccgaaagcagacactattcgcctgatgggtgacaaagtgtcggcaatcgcggcgatgaaaaaagcgggcgttccttgcgtaccaggttctgacggcccgctgggcgacgatatggataaaaaccgtgccattgctaaacgcataggttatccggtgattatcaaagcctccggcggcggcggcggtcgtggtatgcgtgtagtgcgcggcgacgctgaactggcacaatccatctccatgacccgtgcggaagcgaaagccgcattcaataacgatatggtttacatggagaaatacctggaaaatcctcgccacgtcgagattcaggtactggctgacggtcagggcaacgctatctatctggcggaacgtgactgctctatgcagcgtcgtcaccagaaagtggtcgaagaagcaccagcaccgggaattacaccggaactgcgtcgctacatcggcgaacgttgtgctaaagcgtgtgttgatatcggctatcgcggtgcaggtactttcgagttcctgttcgaaaacggcgagttctatttcatcgaaatgaacacccgtattcaggtagaacacccggttacagaaatgatcaccggcgttgacctgatcaaagaacagctgcgtatcgctgccggtcaaccgctgtcgatcaagcaagaagaagttcacgttcgcggccatgcggtggaatgtcgtatcaacgccgaagatccgaacaccttcctgccaagcccaggcaaaatcacccgtttccacgcacctggcggttttggagtgcgttgggagtctcatatctacgcgggctacaccgtaccgccgtactatgactcaatgatcggtaagctgatttgctacggtgaaaaccgtgacgtggcgattgctcgcatgaagaatgcgctgcaggagctgatcatcgacggtatcaaaaccaacgttgatctgcagatccgcatcatgaatgacgagaacttccagcatggtggcactaacatccactatctggagaaaaaactcggtcttcaggaaaaataagactgcaaaagcgtcaaaaggccggattttccggccttttttattactggggatcgacaacccccataaggtacaatcctcgctttcttcacccatcagggacaaaaaatggacactcgttttgttcaggcccataaagaggcgcgctgggcgctggggctgacccttttgtatctggcagtttggttagtagccgcttacttacctggcgttgcccccggttttaccggctttccgcgctggtttgagatggcctgcatcctgacgccgctgctgtttattggactgtgctgggcgatggtgaaatttatctatcgcgatatcccactggaggatgacgatgcagcttgaagtaattctaccgctggtcgcctatctggtggtggtgttcggtatctcggtttatgcgatgcgtaaacggagcaccggcaccttccttaatgagtatttcctcggcagccgctctatgggcggtattgtgctggcgatgacgctcaccgcgacctatatcagtgccagttcgtttatcggcgggccaggagctgcttataaatacgggctgggctgggtattgctggcgatgattcagcttcctgcagtctggctttcactcggtattctcggcaagaagtttgcgattcttgcgcgccgctacaatgcagtgacgctgaacgatatgctgtttgcccgctaccagagtcgtcttctggtgtggctggcgagtttgagtttgctggttgcgttcgttggtgcgatgaccgtgcagtttatcggcggtgcgcgcctgctggaaaccgcggcgggtattccttatgaaaccgggctgctgattttggtatcagcattgcgttatataccgcctttggtggctttcgcgccagcgtgctgaacgacaccatgcaagggcttgtgatgctgattggcaccgttgtgctgcttattggcgtggtacatgccgctggcggcttaagcaacgcagtacagaccttgcaaaccatcgatccgcaactggttacgccacaaggcgctgacgatattctgtcgcctgcctttatgacgtcgttctgggtactggtgtgctttggcgtgattggcctgccgcatactgcggtgcgctgtatctcttataaagacagcaaagcggtacaccgggggatcatcatcggtacgattgtagtcgcaatcctgatgttcggtatgcacctggccggagcgttaggtcgtgcagtgatccccgatctcaccgtaccggatctggtgatcccgacgttaatggtaaaagtgctgccaccgtttgctgccgggatctttctggctgcacctatggctgcgatcatgtcgacgatcaatgcccagttgctgcaaagttccgctacgatcattaaagatctctatctgaatatccgtccggatcaaatgcaaaacgagacgcgtctgaagcggatgtcggcggtaattacgttagttctcggcgcgttgctgctgcttgccgcctggaagccgccagaaatgatcatctggctgaatttgctggccttcggtgggctggaagccgttttcctgtggccgctggtgctgggtctttactgggaacgcgccaacgccaaaggcgcgctaagtgcgatgatcgttggcggcgtgctgtatgccgtactcgcgacgctgaatattcagtacctgggcttccaccctattgtgccctcgttactactaagtttgctggctttcctggtcggaaaccgtttcggtacatccgtcccgcaagctaccgttttgactactgataaataaagagttttgccatgccttggatccaactgaaactgaacaccaccggcgcgaacgcggaagatcttagcgatgcgctgatggaagcgggtgccgtttctatcacttttcaggatacccacgatacgccagtatttgagccgctgccgggcgaaacgcgcctgtggggcgacaccgatgtgattggtctgttcgacgctgaaaccgatatgaacgacgtggtggcgattctggaaaaccatccgctgctcggcgcaggcttcgcgcataaaatcgaacaactagaagataaagactgggagcgcgaatggatggataatttccacccgatgcgctttggtgaacgactgtggatctgccctagctggcgtgatgtgccggacgaaaacgccgtcaacgtgatgttagatccagggctggcgtttggtacgggtacccatccaaccacctctctgtgcctgcaatggctcgacagcctcgatttaaccggtaaaacagtcatcgactttggctgtggttccggcattctggcgatcgcggcgctgaaactgggtgcagcaaaagccattggtattgatatcgatccgcaggcgattcaggccagccgcaacaacgccgaacgtaatggcgtttctgaccgtctggaactctacttaccgaaagatcagccagaagaaatgaaagccgacgtggtggtcgctaacatccttgcaggcccattacgtgaactggcaccgttaatcagcgtcctgccggtttcaggcggtttgctgggcctttccggtattctggcaagccaggcagagagcgtttgtgaagcttatgccgatagcttcgcactggacccggtcgtggaaaaagaagagtggtgccgtattaccggtcgtaagaattaaccttcgcatcgccgtagggtgacgcggggcgaagtgcgagcaagctcacaaaaggcacgtaaatttgccggttatttacgcaaatttgcgtgccaaaattttcattcataaagaaaaattgagaacttactcaaatttctttgagtgtaaattttagtcactattttctaatatgatgatttttatgagtaattatcgcaccacgctcattttaaatgcaattctttgatccatctcagaggattggtcaaagtttggcctttcatctcgtgcaaaaaatgcgtaatatacgccgccttgcagtcacagtatggtcatttcttaactcatgcgcatcggacaatatcagctcagaaatcgcctgatcgcagcgcccatggctggcattacagacagaccttttcggacgttgtgctacgagatgggagccggattgacagtatccgagatgatgtcttctaacccacaggtttgggaaagcgacaaatctcgtttacggatggtgcacattgatgaacccggtattcgcaccgtgcaaattgctggtagcgatccgaaagaaatggcagatgcagcacgtattaacgtggaaagcggtgcccagattattgatatcaatatgggttgcccggctaaaaaagtgaatcgcaagctcgcaggttcagccctcttgcagtacccggatgtcgttaaatcgatccttaccgaggtcgtcaatgcagtggacgttcctgttaccctaaagattcgcaccggctgggcaccggaacaccgtaactgcgaagagattgcccaactggctgaagactgtggcattcaggctctgaccattcatggccgtacacgcgcctgtttgttcaatggagaagctgagtacgacagtattcgggcagttaagcagaaagtttccattccggttatcgcgaatggcgacattactgacccgcttaaagccagagctgtgctcgactatacaggggcggatgccctgatgataggccgcgcagctcagggaagaccctggatctttcgggaaatccagcattatctggacactggggagttgctgcccccgctgcctttggcagaggttaagcgcttgctttgcgcgcacgttcgggaactgcatgacttttatggtccggcaaaagggtaccgaattgcacgtaaacacgtttcctggtatctccaggaacacgctccaaatgaccagtttcggcgcacattcaacgccattgaggatgccagcgaacagctggaggcgttggaggcatacttcgaaaattttgcgtaaacagaaataaagagctgacagaactatgttcgaacaacgcgtaaattctgacgtactgaccgtttctaccgttaactctcaggatcaggtaacccaaaaacccctgcgtgactcggttaaacaggcactgaagaactattttgctcaactgaatggtcaggatgtgaatgacctctatgagctggtactggctgaagtagaacagcccctgttggacatggtgatgcaatacacccgtggtaaccagacccgtgctgcgctgatgatgggcatcaaccgtggtacgctgcgtaaaaattgaaaaaatacggcatgaactaattcaggttagctaaatgcttgattaaaaaggcgctactcggcatggggaagcgccttttttataggtgtcacaaagggagtgaccatgagaacaggatgtgaaccgacccggtttggtaatgaagctaagaccattattcacggtgatgcgcttgccgaacttaaaaagatccccgccgaaagtgtcgatctgatctttgccgacccaccatataacatcggtaaaaattttgatggtctgatcgaagcctggaaagaagatctgtttatcgactggctgtttgaagtgattgcagagtgccaccgcgttctgaaaaagcagggcagcatgtacatcatgaacagcacggaaaacatgccctttatcgatctccagtgccgcaagctttttaccatcaaaagtcgcatcgtctggtcatatgacagttctggagtacaggcgaaaaaacactacggctccatgtacgaacccatcctgatgatggtgaaagacgcaaagaactacacattcaacggtgatgctattctggtagaagccaaaaccggatcgcagcgcgcgttgatcgattatcgcaaaaatcctccacagccatacaatcatcaaaaagtaccgggtaacgtctgggattttccgcgcgtgcgttatttgatggatgaatatgagaaccacccgacgcaaaaaccggaagccttactgaaacgcattattctcgcctcttccaacccaggcgatatcgttctcgacccgtttgccggtagctttactaccggtgccgtagccgtcgccagcgggcgaaaattcattggtattgagatcaacagcgagtacatcaaaatggggcttcgacgactggatgtcgcgtcacattactccgcggaggaactggcgaaagtgaaaaaaagaaagacgggcaaccggtcaaaacgatgtcgggttagcgaagttgaccccgatctcattgcaaagtaaaggaagtgtaagcctggttttcagattattcatttcgtgtatatttcctgccagacttggttaaacatacacaggctcaggtaatgattcgcaagtattggtggctcgtcgttttcgctgtcttcgtttttctgtttgatactttactgatgcagtggattgaactgctggcaacagaaacagacaaatgccgcaatatgaactcagttaatccactaaaactggttaactgtgacgaactgaattttcaggacagaatgtgaatttacatgacacttaattcattcgtttgatgaattaatttcgttatgttttcatctggcatgaacattcttaatacgttatcgaccagagcgggggcttgtttataaagatcataacccgccatattcattaaccagttttgaacaattccgctgaaggcaccattaataataatcatcacaacatctaaatcgaggttatttgctacacaaccttgttgctgacacgcctgcaatacttcgcggagagtctgcggattgaagcccatcttttcgcgtatcactccctcggccagcatctcatcattaaattcacatttgtgatataagattttcagcaacgcctgctggcggggaattttggcaatatattgcaagccgacaatcaatttttcacgcaattgttgaaacgggtcatgctctaatccagccgtcaagtgttcctggattaactcccgcaatgaaggctgttgcaaccacatctcattaaacagttgagtcttgttttcgaagtgccagtagatagcgccacgcgtaacgttagcagcgtcggcaatgtcgttgagtgtcgtcttgcttacgccatgctgcgcaaactgggcgatggcagtttcaatcagttcttgccgggtcttcagagcttcggctttggttctttttgccatgattaattattcaggaaataaatatattcgatacagagtgagaaaatagcgaaggttaatctatcacctaatgtgtatttatacgagaggctaatattgagttgctataaatcgtcaaataaataatatatattatttacctaaaatacattcgccacatgaatatatatttcaatttacgaggttttaattctgcctctttcaacccgcgtcaaaataaaacagtagaatattaatctttttttgtgtttatgtgccttgagacgccagtattcataactattccttacatcgacgaatgataatttgtaggatagcaaactgtatttttctttctgcgagttaacgcgttgcctttctgggtaaataacgcgcttttggttttttgaggaatagtaatgacgaaacatgccaggtttttcctcctgccctcctttattctgatctccgcggctttaatcgccggttgtaacgataagggagaagagaaagctcacgtcggtgaaccgcaggttaccgttcatattgtgaaaacggccccgttagaagttaagactgaattaccaggccgcaccaatgcttaccgtatagccgaagttcgcccacaggttagcgggatcgtactgaatcgtaatttcactgaaggcagcgatgtacaagcaggccagtccctgtaccagatcgatcccgcgacctatcaggcaaattatgacagcgcgaaaggcgaactggcgaaaagtgaagccgccgccgccatcgcgcatttgacggtaaaacgttacgttccgctcgtgggtacgaaatacatcagccagcaggagtacgaccaggccattgctgatgctcgccaggccgatgctgccgtgattgccgcaaaagccacagtcgaaagcgctcgcatcaatctcgcttataccaaagtgactgcgccaattagcggacgtatcggcaaatcgaccgtgaccgaaggcgctcttgtcactaatgggcaaacgactgaactggcgactgtccagcagctcgatcctatctacgttgatgtgacccaatccagcaacgattttatgaggctgaagcaatccgtagagcaaggaaatttgcataaggaaaacgccaccagcaacgtagagttggtcatggaaaacggtcaaacctatcccctgaaaggtacgctgcaattctctgatgtgaccgttgatgaaagcaccggctccataaccctacgtgccgtcttccctaacccgcaacatacgcttttgccgggtatgtttgtgcgcgcacggattgatgaaggcgtccaacctgacgccattcttatcccgcaacaaggcgttagccgcacaccgcgtggtgatgcaaccgtgctgattgttaacgataaaagtcaggtggaagcgcgccctgtcgttgccagtcaggcgattggcgataaatggttgattagcgaaggtctgaaatctggcgatcaagtcattgtcagcggcctgcaaaaagcgcgtccgggagagcaggttaaagccactaccgatacccccgcagatactgcatcgaagtaaggtaatctgacatggcaaacttttttattcgacgaccgatatttgcatgggtgctggccattattctgatgatggcgggcgcactggcgatcctacaattacccgtcgctcagtatccaaccattgcaccgcctgcggtttctgtttcagcaaactatccgggcgctgatgcgcagaccgtgcaggatacggtgacgcaggttatcgaacagaatatgaacggtatcgataacctgatgtatatgtcctccaccagcgattccgccggtagcgtgacaattacccttaccttccagtccgggaccgatcctgatatcgcgcaagtgcaggtgcagaacaaactccagctcgccacgccgttgctgccgcaggaggttcagcagcaggggatcagtgttgaaaagtccagtagcagctatttgatggtggcgggctttgtctctgataacccagacaccacacaggacgatatctcggactatgtggcctctaacgttaaagatacgcttagccgtctgaatggcgtcggtgacgtacagcttttcggcgcacagtatgcgatgcgtatctggctggacgccgatctgctaaacaaatataaactgacaccggttgatgtgattaaccagttgaaggtacagaacgatcagatcgctgccggacagttgggcggaacgccagcgttaccagggcaacagttgaacgcctcaattattgctcagacgcggttaaaaaatccggaagaattcggcaaagtaaccctgcgcgtaaacagtgacggctcggtggtacgcctgaaagatgtcgcacgagttgaacttggcggtgaaaactataacgttatcgctcgtatcaacggaaaaccggcggcgggcctggggattaagctggcaaccggcgcgaatgctctcgataccgcgaaagccattaaggcaaaactggcggaattacagccattcttcccgcagggaatgaaggttctctacccttatgacaccacgccattcgtccagctttctattcacgaagtggtaaaaacgctgttcgaagccattatgctggtgttcctggtgatgtatctgttcttgcagaatatgcgagcaacgctgatccccaccattgcggtacccgtggtgttattagggacgtttgccatcctcgccgcttttggttactccatcaacacactaacgatgttcgggatggtgcttgccatcgggctgctcgtcgatgatgcgatagtggtggtggagaacgtcgagcgcgtgatgatggaggataagctcccgccaaaagaagcgacggaaaaatcgatgtcgcaaattcagggcgcactggtgggtatcgcgatggtgctgtcagcggtatttattccgatggcattcttcggcggttctactggggcaatttatcgccagttctctatcaccatcgtttcggcaatggcgctttctgttctggtggcattgattcttacccctgcgttatgtgcaacactgctcaaacccacctcagctgagcatcacgaaaataagggtggtttcttcggctggtttaataccaccttcgatcatagcgttaaccactacaccaacagcgtcggcaaaatcctcggttccacaggacgatatttactgatctatgcgctgattgttgcaggaatggtggtgttgtttttacgtcttccgtcttccttcttacctgaagaggatcagggtgtctttctgaccatgattcagttacccgctggcgcgacgcaagagcggacgcaaaaagtgttggatcaagtgacggattactatctgaagaacgagaaagcgaacgttgaaagtgtctttacggttaacggctttagcttcagcggccaggcacaaaacgccggtatggccttcgtcagtctgaaaccgtgggaagagcgtaatagtgatgaaaacagtgcggaagcggtaatccatcgtgccaaaatggaattgggcaagatccgcgacggttttgtcattccattcaatatgccagccattgttgaactgggcacggcaacgggtttcgactttgagttaattgatcaggctgggctgggtcacgatgccctgacccaggcccgtaaccagttgcttggcatggcggcgcaacatcctgccagcttagtcagcgtgcgtcctaatggcctggaagacaccgcgcagtttaaactggaagttgaccaggaaaaggcgcaggcattaggtgtttcactttctgacatcaatcagaccatttcaacggcgttgggtgggacttacgttaacgacttcatcgaccgtggtcgcgtgaaaaaggtgtatgttcaggcggatgccaaattccgtatgctgccagaagatgtcgataaactttatgtccgcagcgccaacggcgaaatggtgccattctcggcctttaccacttcacattgggtgtatggctctccgcgactggaacgctacaacggtctgccgtcaatggagattcagggggaagccgcgccaggaaccagttccggcgatgccatggcgttgatggaaaaccttgcgtcaaaattacctgcgggcattggttatgactggacgggtatgtcgtatcaggaacgcttatcgggaaaccaggctcccgctctggtagcaatttcctttgtggttgttttcctgtgccttgctgcactctatgaaagctggtcaattcctgtctcggttatgttggtagtgccgttagggattgtcggcgtgctactggcggcaacactctttaatcaaaaaaatgacgtctactttatggtgggcttgctaacgacaattggcttgtcggccaaaaacgctattttgattgttgagttcgctaaagatctcatggagaaagagggtaaaggtgttgttgaagcgacactgatggcagtacgtatgcgtctgcgtcctatcctgatgacctctctcgcctttattctcggcgtattaccgctagctatcagtaacggtgccggcagtggcgcgcagaacgctgtgggtatcggggtaatgggaggaatggtctctgcaacgttgctggcaatcttcttcgtaccggtgttctttgtggtgatccgccgttgctttaaaggataaatcagaaacataaaggcgctttcgggtgcctttattatttccagtgaaacccataaaaattaataagatattcttctgctcactctttaaaagctttctatagttcccgctcccttcactatttttacaattcacataatttgtcattattcattccgcaagatttataacctccggtgataaaatggcattcagctcgttaataagagagttaacttattaagcgttagcgtttattactgaggtaacaccatgaaaagattaattcctgtggcattgctcaccgcattgctggcgggctgtgctcacgattcgccctgcgttccggtttatgacgatcagggtcgtctggttcacaccaatacctgtatgaaaggcacgactcaggataactgggaaacggctggggctattgctggcggggcagcggctgttgctggcctgacgatggggatcatcgctctgtcgaaataactgaacagggcgcggagtttcgcgctctgtttaacgatacagtatctttacataagataaaatattgctatattctgctggctaattctctgctgatttagcatgttatatcgcgttatttcgctgctttcgaaataacgcatcaatttaactttcacacttcccaccagaaatatactcacgctaacaatcattattctgcttagtaaaacacgcgtaaatattttgcgccaaaatgtggcgcatgtttcattttcgcaccattgcggggcgctgtttttattatttcctgtctacactcagcttattgcgacgcgaaatcgggcgcaaaagctggcactacttttgcttataagaggatggccacagacaggtaaaagacgtttcccaaacgtcctataacgataattttcgcctcacaggaagcattatgaaaaagatgatgatagccacactggctgccgccagcgtgctgcttgccgttgcaaatcaggcgcatgctggcgcgacgcttgatgccgttcagaaaaaaggttttgtgcaatgcgggatcagtgatggattacctgggttctcttatgccgatgcagacggtaagttttcaggtattgatgttgatgtttgtcgtggtgttgccgctgctgtatttggtgacgacacgaaagtgaaatataccccactcacagcaaaagaacgcttcaccgctttacagtcaggggaagtggatttgctctcccgtaatacgacctggacttcatctcgcgatgccgggatgggaatggcatttaccggcgtcacttattacgacggcattggcttcctgacgcacgataaagcggggctaaaaagcgcgaaagaactggatggcgctaccgtctgtattcaggcgggtactgataccgaactcaacgttgccgactatttcaaggcaaacaatatgaagtacacaccggtgactttcgatcgctctgacgaatcagcgaaggcactggaatctggtcgctgcgatacgctggcctcggatcagtcgcaactgtatgccctgcgcatcaaattaagcaacccagctgaatggattgtcttaccggaggttatctctaaagaaccgcttgggccggtagttcgtcgtggcgatgatgaatggttctcgattgtacgctggacgcttttcgccatgctgaatgctgaagagatgggcatcaattcccagaacgtcgatgaaaaagcggctaatccagcaacgcctgatatggcacatctgctgggtaaagaaggcgattacggcaaggatctgaagctggataataaatgggcctataacatcatcaaacaggtgggtaactactcggaaattttcgagcgtaacgtaggttcagaaagcccgctgaaaattaaacgtgggcaaaataatctctggaataacggcggtattcagtacgcgccgcccgtgcgttaagtcagtgtgaggtaacgggcgtcgctacggcggcgctctcttcagcgttatgctttccgaggtttctatgtctcatcgccgctcaaccgttaaaggctcactctcttttgccaaccctacggttcgcgcctggttattccagatccttgccgttgttgctgttgtcggcattgttggttggttatttcacaacactgtaacgaatctcaataatcgtggcattacttcaggttttgcctttctggatcgcggcgctggcttcggtattgtccagcatttgatcgattaccagcagggcgacacctacggacgcgtttttattgtcggcttactcaatacgctactggtttctgcattgtgtattgtgttcgcttctgttttaggcttctttatcggtctggcgagactttcggataactggctgctacgaaaactatccacaatttatattgagatcttccgtaatattcccccgctgctgcaaatcttcttctggtactttgccgtgttgcgcaatttgcccggaccacgccaggctgtgagcgcgtttgatctggcctttttgagcaatcgtgggctttatattccgtcaccgcagctgggagacggatttattgcgtttatcctggctgttgttatggctatagtcctttctgttgggctattccgctttaataaaacataccagataaagaccggacaactgcgccgcacctggccgatcgccgcagtgttgatcattggtttgcctttactggcgcaatggctttttggcgcagcactacactgggatgtcccagccctacgaggctttaacttccgcggcgggatggttttaattcctgaactggcagccttaacgctggcactttcggtttatacatctgcatttatcgccgagattatccgcgctgggatccaggcagtgccttatggtcaacatgaagcggctcggtcactgggattacccaacccggttacgctacgccaggtcattattccccaggcactgcgagtgattattccgccgttaaccagccagtatctcaacatcgtcaaaaactcctctcttgccgccgctattggctatcccgatatggtttcgctgtttgctggcaccgtgctgaaccagacggggcaagccatcgagacgatagccatgaccatgtcggtctatctgattatcagcctgactatctcgctgctgatgaatatctataaccgccgcatcgcgatcgttgaacgctaaggagtcatgatgacaaaagtattgctgtctcagccctcgcgcccagcgagccataactcaagccgcgcgatggtgtgggtgcgaaaaaatctgttctccagctggagcaatagcctgctgactattggctgcatatggttgatgtgggaactgatcccaccgttgctgaactgggcatttttgcaggctaattgggttggctcaacgcgtgccgactgcacaaaagccggtgcctgttgggtcttcatccacgaacgatttggtcagtttatgtatggactttacccacacgaccaacgctggcgaattaacctggcattactgattggccttgtgtcaatcgcaccaatgttctggaaaatactcccgcatcgcggtcgctatattgcggtctgggcggtgatttacccactgattgtctggtggctgatgtatggcggtttttttggtctggagcgggttgaaacccggcaatggggcgggctgacgctaactttaattattgcatccgttgggattgcgggggcgctaccgtgggggatcttactggcgttaggtcgccgctcccatatgccgattgtgcgtatcttatcggtcatttttatcgagttctggcgcggcgtaccgctgattaccgtattgtttatgtcttcggtcatgctgcctttgtttatggcagaaggcaccaatatcgacaaactgatccgcgcgctggttggcgtgatcctgtttcagtcagcatatgttgcggaagtcgtgcgaggcggattacaggcgctgcctaaagggcaatatgaagcggcagagtcgctggcgttgggttactggaaaactcaggggctggttattctgccacaggcgttgaagctggtaattcctgggctggtaaataccatcatcgcactcttcaaagataccagcctggtgatcattatcgggttgttcgatcttttcagtagcgttcagcaggcaaccgttgatcccacctggttgggtatgtcgacggaagggtatgttttcgccgcgctgatctactggatcttctgtttcagcatgtcgcgctatagccagcatctggaaaacgttttaacaccgggcgtacaccgcattgaggacactatgagccaaattttactgcaacctgctaacgcgatgattacgctggaaaacgtcaataaatggtatggacaattccatgttttgaaaaatataaatttaaccgcgcaaccgggagaacggatcgttctgtgtggcccttcaggttccggtaaatcgacaaccattcgttgtattaatcatctggaagaacatcaacagggacggatcgtggtagatggcatcgaacttaatgaagatatccgcaatattgagcgcatccggcaggaagtgggaatggtctttcagcatttcaatctcttccctcatctgaccgttctacagaactgtaccctggcaccgatttgggtacgcaagatgccaaagaaagaggctgaagctctggcgatgcattaccttgagcgggtgagaattgccgaacatgcgcataagtttcccggacaaatttctggtggtcagcagcaacgcgttgccattgcgcgttcgctgtgtatgaagccgaaaattatgttgtttgatgagccaacgtcggcgctcgatccggagatggtgaaagaggtgctggatacgatgattgggctggcgcagtcgggtatgacaatgttgtgtgtaacacatgagatggggtttgcacgtaccgtcgctgaccgggtaatttttatggatcgtggggagatagtggaacaagctgcacctgatgaattttttgcgcatcctaaatcagagcgtacgagggcatttttatcgcaggtaatccattaattgaatgttagttcgaaaagcaaaaaggccatcctttcggatggcctttcgcttgatttgatgtctggcagtttatggcgggcgtcctgcccgccaccctccgggccgttgcttcgcaacgttcaaatccgctcccggcggatttgtcctggttgggagagtgttcaccgacaaacaacagataaaacaaaaggcccagtcttccgactgagccttttgttttatttgatgtctggcagttccctactctcgcatggggagaccccacactaccatcggcgctacggcgtttcacttctgagttcggcatggggtcaggtgggaccaccgcgctactgccgccagacaaattcttttctaatctgccgaactttaacctaaaaagtggtgctgatacccagagtcgaactggggacctcacccttaccaagggtgcgctctaccaactgagccatatcagcacgctaaatttgatgcctggcagttccctactctcgcatggggagaccccacactaccatcggcgctacggcgtttcacttctgagttcggcatggggtcaggtgggaccaccgcgctacggccgccaggcaaattctgttttatcagaccgcttctgcgttctgatttaatctgtatcaggctgaaaatctttctctcatccgccaaaacagcttcggcgttgtaaggttaagcctcacggttcattagtaccggttagctcaacgcatcgctgcgcttacacacccggcctatcaacgtcgtcgtcttcaacgttccttcaggacccttmaaggagtcagggagaactcatctcggggcaagtttcgtgcttagatgctttcagcacttatctcttccgcatttagctaccgggcagtgccattggcatgacaacccgaacaccagtgatgcgtccactccggtcctctcgtactaggagcagcccccctcagttctccagcgcccacggcagatagggaccgaactgtctcacgacgttctaaacccagctcgcgtaccactttaaatggcgaacagccatacccttgggacctacttcagccccaggatgtgatgagccgacatcgaggtgccaaacaccgccgtcgatatgaactcttgggcggtatcagcctgttatccccggagtaccttttatccgttgagcgatggcccttccattcagaaccaccggatcactatgacctgctttcgcacctgctcgcgccgtcacgctcgcagtcaagctggcttatgccattgcactaacctcctgatgtccgaccaggattagccaaccttcgtgctcctccgttactctttaggaggagaccgccccagtcaaactacccaccagacactgtccgcaacccggattacgggtcaacgttagaacatcaaacattaaagggtggtatttcaaggtcggctccatgcagactggcgtccacacttcaaagcctcccacctatcctacacatcaaggctcaatgttcagtgtcaagctatagtaaaggttcacggggtctttccgtcttgccgcgggtacactgcatcttcacagcgagttcaatttcactgagtctcgggtggagacagcctggccatcattacgccattcgtgcaggtcggaacttacccgacaaggaatttcgctaccttaggaccgttatagttacggccgccgtttaccggggcttcgatcaagagcttcgcttgcgctaaccccatcaattaaccttccggcaccgggcaggcgtcacaccgtatacgtccactttcgtgtttgcacagtgctgtgtttttaataaacagttgcagccagctggtatcttcgactgatttcagctccatccgcgagggacttcacctacatatcagcgtgccttctcccgaagttacggcaccattttgcctagttccttcacccgagttctctcaagcgccttggtattctctacctgaccacctgtgtcggtttggggtacgatttgatgttacctgatgcttagaggcttttcctggaagcagggcatttgttgcttcagcaccgtagtgcctcgtcatcacgcctcagccttgattttccggatttgcctggaaaaccagcctacacgcttaaaccgggacaaccgtcgcccggccaacatagccttctccgtccccccttcgcagtaacaccaagtacaggaatattaacctgtttcccatcgactacgcctttcggcctcgccttaggggtcgactcaccctgccccgattaacgttggacaggaacccttggtcttccggcgagcgggcttttcacccgctttatcgttacttatgtcagcattcgcacttctgatacctccagcatgcctcacagcacaccttcgcaggcttacagaacgctcccctacccaacaacgcatcagcgtcgctgccgcagcttcggtgcatggtttagccccgttacatcttccgcgcaggccgactcgaccagtgagctattacgctttctttaaatgatggctgcttctaagccaacatcctggctgtctgggccttcccacatcgtttcccacttaaccatgactttgggaccttagctggcggtctgggttgtttccctcttcacgacggacgttagcacccgccgtgtgtctcccgtgataacattctccggtattcgcagtttgcatcgggttggtaagtcgggatgacccccttgccgaaacagtgctctacccccggagatgaattcacgaggcgctacctaaatagctttcggggagaaccagctatctcccggtttgattggcctttcacccccagccacaagtcatccgctaatttttcaacattagtcggttcggtcctccagttagtgttacccaaccttcaacctgcccatggctagatcaccgggtttcgggtctataccctgcaacttaacgcccagttaagactcggtttcccttcggctcccctattcggttaaccttgctacagaatataagtcgctgacccattatacaaaaggtacgcagtcacacgcctaagcgtgctcccactgcttgtacgtacacggtttcaggttctttttcactcccctcgccggggttcttttcgcctttccctcacggtactggttcactatcggtcagtcaggagtatttagccttggaggatggtccccccatattcagacaggataccacgtgtcccgccctactcatcgagctcacagcatgtgcatttttgtgtacggggctgtcaccctgtatcgcgcgcctttccagacgcttccactaacacacacactgattcaggctctgggctgctccccgttcgctcgccgctactgggggaatctcggttgatttcttttcctcggggtacttagatgtttcagttcccccggttcgcctcattaacctatggattcagttaatgatagtgtgtcgaatcacactgggtttccccattcggaaatcgccggttataacggttcatatcaccttaccgacgcttatcgcagattagcacgtccttcatcgcctctgactgccagggcatccaccgtgtacgcttagtcgcttaacctcacaacccgaagatgtttcttgcgaaccatcatcgtgttgcgaaaatttgagagactcacgaacaactctcgttgttcagtgtttcaattttcagcttgatccagatttttaaagagcaaaacttcgcagtgaacctttgcaggtacactctgaagtattttttatttaatcactacagagatggtggagctatgcgggatcgaaccgcagacctcctgcgtgcaaagcaggcgctctcccagctgagctatagccccataacatgtagttaaaacctcttcaaatttgcggtgcaaatttggtaggcctgagtggacttgaaccaccgacctcacccttatcaggggtgcgctctaaccacctgagctacaagcctgtagaggttttactgctcattttcatcagacaatctgtgtgagcacttcaaagaacgcttctttaaggtaaggaggtgatccaaccgcaggttcccctacggttaccttgttacgacttcaccccagtcatgaatcacaaagtggtaagcgccctcccgaaggttaagctacctacttcttttgcaacccactcccatggtgtgacgggcggtgtgtacaaggcccgggaacgtattcaccgtggcattctgatccacgattactagcgattccgacttcatggagtcgagttgcagactccaatccggactacgacgcactttatgaggtccgcttgctctcgcgaggtcgcttctctttgtatgcgccattgtagcacgtgtgtagccctggtcgtaagggccatgatgacttgacgtcatccccaccttcctccagtttatcactggcagtctcctttgagttcccggccggaccgctggcaacaaaggataagggttgcgctcgttgcgggacttaacccaacatttcacaacacgagctgacgacagccatgcagcacctgtctcacggttcccgaaggcacattctcatctctgaaaacttccgtggatgtcaagaccaggtaaggttcttcgcgttgcatcgaattaaaccacatgctccaccgcttgtgcgggcccccgtcaattcatttgagttttaaccttgcggccgtactccccaggcggtcgacttaacgcgttagctccggaagccacgcctcaagggcacaacctccaagtcgacatcgtttacggcgtggactaccagggtatctaatcctgtttgctccccacgctttcgcacctgagcgtcagtcttcgtccagggggccgccttcgccaccggtattcctccagatctctacgcatttcaccgctacacctggaattctaccccctctacgagactcaagcttgccagtatcagatgcagttcccaggttgagcccggggatttcacatctgacttaacaaaccgcctgcgtgcgctttacgcccagtaattccgattaacgcttgcaccctccgtattaccgcggctgctggcacggagttagccggtgcttcttctgcgggtaacgtcaatgagcaaaggtattaactttactcccttcctccccgctgaaagtactttacaacccgaaggccttcttcatacacgcggcatggctgcatcaggcttgcgcccattgtgcaatattccccactgctgcctcccgtaggagtctggaccgtgtctcagttccagtgtggctggtcatcctctcagaccagctagggatcgtcgccttggtgagccgttaccccaccaacaagctaatcccatctgggcacatccgatggcaagaggcccgaaggtccccctctttggtcttgcgacgttatgcggtattagctaccgtttccagtagttatccccctccatcaggcagtttcccagacattactcacccgtccgccactcgtcagcgaaacagcaagctgtttcctgttaccgttcgacttgcatgtgttaggcctgccgccagcgttcaatctgagccatgatcaaactcttcaatttaaaagtttgatgctcaaagaattaaacttcgtaatgaattacgtgttcactcttgagacttggtattcattttcgtcttgcgacgttaagaatccgtatcttcgagtgcccacacagattgtctgataaattgttaaagagcagttgcgacgcagctttcagctcactgtcgcgaggggcgtatattacgctttcctctttcagagtcaaccctgaatttcaggattttttctcttcgttgttacgaccatcttgtgaagtgtttcacgttgtcgtctcaacggaggcgcattatagggatcccaattttttgcacaagtacttttttgatctttttttctgtttgttgttttttcaccctttttgctgcattcgcacacaaaacggtgcttttttgcatactaaaagacttgcacaaggccaataatgcccccaaagtcattagtaaatcatttattgctgaggtaagtatgtctgatgttttacgcccataccgcgatctttttccacaaatcggtcagcgcgtaatgatcgacgatagcagtgtcgtgattggtgacgttcgtctggctgatgatgtggggatctggccgctcgttgtgattcgtggagatgtacattatgtacagatcggagcacgcaccaatatccaggatggcagtatgttgcatgtcactcataaatcctcgtacaacccagatggcaacccattaaccattggcgaagatgtcactgttggtcacaaggtgatgctccacggctgcaccattggcaatcgagttttggttgggatgggctcaattttacttgatggcgcaatagtagaagatgatgtgatgattggtgcgggtagtctggtcccacaaaataaacggctggagagcggatatctgtatctcggtagccccgtcaaacagatccgcccgttaagtgatgaagagaaggctgggttacgctattccgcgaataattacgtgaaatggaaggacgaatatctggatcagggtaaccagacccagccttgatcatcttcactttgttcctgaattaagttttccgcttcttcttccagatcccagcgatgctgacgaaaactcgctaaccactgttctggcgtatctccagtaaaacgatacgccagactctcgccagagatcgcacatgtcagttgcatgccattcacgagagcgggaaaacatacacattttttattctcgtcccactcttctctgtccggaaactggatggcctgattcacgcggacaattcctcctgcaattgctttataactggttctacgtcaggcagaacaccgtgccagagaagaaaggcatgagccgcctgtgccaccagcattcctaaaccatcagcattacgctttgagcctcgctgctcacaccatgccagaaaaggagtttttcctttctgatagaacatgtcatagcaataaatgcctggatgaatgagcgatgacgggatcgccggaatatcaccactgatgccactggatgttgcattaataatgagatcaaactcatgaccttccagttcgtccatacccaacgcctgaatactgccagtgtgcgcaaacaatttagccaactcttccgcgcgggataccgtccgattagtgattgtcaccgcacagtccagggaaagaagtggcagtagtacgccgcgagatgctccaccagcgccgatgagcagaatacgtaaaccaggacggataaaagacagacgttccagatcgcttaacaaacctataccatcggtattgtcacccagcaggcgtccatcttctaaccgcttgagggtattaacagcaccagccaacgctgcccgttcagtaagctcatccgctctggcaaaagcctcttctttaaaaggcaccgtcacattcgcacctttaccaccagcacgaaagaaagcgttcagtgtgttgatgaaatcattgatgggtgccaacacgcgcccatagggatgttcaatattcagttgctgagcaaattgctgatgaatgaatggcgatttgctgtgggctatcggattaccaaaaacagcataggtttccattatgttacccctgtcgaaacagttcacccgtcagggcatcgcggatttctgaaggatttaaacgcccccccgtttcaccaggcacaaccgggaacgccgcgccaaattgtgcgcgaacttcgtctactgttcgacaaggtggcaatccactcaagttggcactggtagaaaccagcggtttaccataagcctggcacaaagcaaccaccaacggatggtcggtgactcgtacagcaagcgaatcaaagcggcccgtcaaccagcgcggtgttgtcgcaggcgcgggaaagacaaaggtgacaggacctggccagcgggaaaaaatggtttcacgctgcgcatcagtcagcatggtgtcatcaatatagggtttaagctgctcgtaatttgccgcgattaaaatcagccccttatcaaccggacgctgttttaactccaacagtctcatcactgctgtttcgctatcaggatcgcacccaacaccgaaaacggcttccgttggataggcgatgacacgttcttcattgaggacatctatcgcagctgcgatagcgtctccttgcaggttattattcacgttattattccgccgaaaccggctttccacattgtttactggcacaaaagtgttttacaccctgcgcggttttcttttcgatgagtagtggataatgacactcagggcattctccagctatgggtttgaagttaatggcaaattgacactccgggtagcgatcacaggagtgaaatgttttgccataacgggagcggcgctggaccagatggcccgtccggcattgggggcatgtaattgctgtttcgtccggtttatcgataagttcggtatgttcgcattcagggtagttactgcaaccaataaacataccaaagcgtccctggcgtaataccagatttgcgccacatgcaaggcaaacctgcccctccagaactttgacaatatgtccatccgctgaagatttcagaggacggacgtagtcacacgccggatactgtgagcatccaagaaacggaccgtgtttcccggatcgaataaccagttcagccccgcactttgggcaggactcattattacgcaccgtgaacagtgctgatttcgccataacaacttatgctgaattaaagaaatgattaatgcagcataccttcattcacttcaaagagtaattcttccatttgctggtacgcattttcgcagcccggaatattgaacaacaccatcaggattacccatttcaggtcttccaggtcgaactctgcggtatccagcgcgagcactcgctctatcaccatttcacgggtttcaaggttaagcacctgaatttgctcaaggaaaagcagaaaaccacgacagctggcatccagtctttcacactcctcaggggtataaatacgcatggagagtggatcagaggccagttgcatcggttctgccagtccttcctgataatccgcaagcttttccagccaaagcagggcattgtagatatcttctcgatcaaatcctgcgtcggtaagatcctgttcaagtttgtcttgatccacacgcaactcagcttctgtgtgaatataggtttcaaacaaatacattagtacgtcgaacatggcatgccctcctcaatcggacatagccgccgggtacagctgcgatccatcctgctaactccagttcgagtagttgagtaactacctctggcacaggttggccggcacgttcagcgacgacgtcaacaggtgttacctcatctcctacgttagccaggagctcaggaaatggcaatgccacgtcttgctgatctggtgaataaaatgaattttcaggggcgtctggcaaccagtgcaatccaaattgcaagttttccagaatttcttccggttccgtcacaagaatcgcaccttgttttattaaccagtgaggcccttcgcttcccggattccctattggacctggcaaggcaaaaacttcacgcccctgctcaagcgcacaacgtgctgtcaccagcgaaccactgcgcaaagccgcttccaccaccagtacacctttacttagaccactgataatgcgatttcttcgtgggaaattgtaagcaaggggtggaacatcgaggggaaattccgagacgagagctccgccatgttcaagcagactggcagccagtcgggcatggcggcggggatgaatggtattaagtccattccccaatacagcaatgctgacgccatttacctgtaaggccgctttatgcgccacaccatcgattccacgcgccagtccactcgtaattgtcactccacgcgtcgccagagtttcgcaaaataaccgtccccatcgctcgccataccatgaatgcgcccgactccccactacggcaagctgaaatgaatgcagcgcgtgcagttctccttcaacaaacagtgcgccggggtaatctgtcgtcaccagaagttgaggaggataaaattcgctgtccgcagggattaaatgatggttgggttgctccaaccaacaaagtgagctttcgatactctttcgcggaaatgaaagaaagcgttgtgcctgccgcaatgtaagccctgtttgctgcaatccaaccgcatcaatttgcgactgttttgccagccagtgagctatacggaccatatcatcgccgtacaagctgctgatactcattaaacgcagccaaatttctgtatcgaccatccttatctccctgccataagcagccttagcaatctttgcgattggtcagtgatgctgtcaatcagagggggatttgtctagaatagaagaaataatctttctaactcctgaacacatctctggagatttatgtcagttttgcaagtgttacatattccggacgagcggcttcgcaaagttgctaaaccggtagaagaagtgaatgcagaaattcagcgtatcgtcgatgatatgttcgagacgatgtacgcagaagaaggtattggcctggcggcaacccaggttgatatccatcaacgtatcattgttattgatgtttcggaaaaccgtgacgaacggctggtgttaatcaatccggagcttttagaaaaaagcggcgaaacaggcattgaagaaggttgcctgtcgatccctgaacaacgtgctttagtgccacgcgcagagaaagttaaaattcgcgccctggaccgcgacggtaaaccatttgaattggaagcagacggtctgttagccatctgtattcagcatgagatggatcacctggtcggcaaactgtttatggattatctgtcaccgttgaaacaacaacgtattcgtcagaaagttgaaaaactggatcgtctgaaagcccgggcttaaggataagaactaacgtgtcagaatcactacgtattatttttgcgggtacacctgactttgcagcgcgtcatctcgacgcgctgttgtcttctggtcataacgtcgttggcgtgttcacccagccagaccgaccggcaggacgcggtaaaaaactgatgcccagcccggttaaagttctggctgaggaaaaaggtctgcccgtttttcaacctgtttccctgcgtccacaagaaaaccagcaactggtcgccgatctgcaggctgatgttatggtcgtcgtcgcctatggcttaattctgcctaaagcagtgctggagatgccgcgtcttggctgtatcaacgttcatggttcactgctgccacgctggcgcggtgctgcaccaatccaacgctcactatggcgggtgatgcagaaactggtgtgaccattatgcaaatggatgtcggtttagacaccggtgacatgctctataagctctcctgcccgattactgcagaagataccagtggtacgctgtacgacaagctggcagagcttggcccacaagggcttatcaccacgttgaaacaactggcagacggcacggcgaaaccagaagttcaggacgaaactcttgtcacttacgccgaaaagttgagtaaagaagaagcgcgtattgactggtcactttcggcagcacagcttgaacgctgcattcgcgctttcaatccatggccaatgagctggctggaaattgaaggacagccggttaaagtctggaaagcatcggtcattgatacggcaaccaacgctgcaccaggaacgatccttgaagccaacaaacaaggcattcaggttgcgactggtgatggcatcctgaacctgctctcgttacaacctgcgggtaagaaagcgatgagcgcgcaagacctcctgaactctcgtcgggaatggtttgttccgggcaaccgtctggtctgatagtccactcttctaagcccggtcttgccgggcgtttttatacttatgaaaaaacaacgtaatttacgtagcatggcggcccaggccgttgaacaagtcgtcgagcaagggcaatcattaagcaacattctgccaccgctccagcaaaaagtttccgataaagacaaagcacttcttcaagagttgtgctttggcgtactgcgtacgctttcgcagttagactggctgattaataagttaatggcccgtccgatgaccggcaaacagcggaccgtgcattacctgattatggttggtttgtatcaactgctttatacccgcattccacctcatgctgcgctggctgaaacggttgaaggcgctatcgcaattaagcgtccgcaacttaaagggttgataaacggtgtattacgccagttccagcgtcagcaagaagagttattagccgagtttaatgccagtgatgcacgttatctgcatccttcctggttgctgaagcgtctgcaaaaagcgtatccagagcagtggcaatccatcgtcgaagccaataaccagcgtccgccaatgtggctgcgcgttaatcgtacgcatcattcccgcgacagctggcttgcattgttggatgaagcaggaatgaaaggtttcccgcatgcggattaccctgatgctgtacggctggaaacacctgcacctgttcatgcgctacctggttttgaagacggatgggttaccgttcaggatgcatcagcacaaggttgcatgacctggcttgcgccacaaaacggtgaacacattctggatctttgtgccgcccccggcggtaaaacaacgcatatccttgaggtggcaccagaagcgcaggttgttgcggttgatattgacgaacagcgcctctctcgcgtttacgacaatttaaaacgccttggtatgaaagcgaccgtgaaacaaggtgatggccgctacccttcccaatggtgtggcgagcaacagtttgatcgcattttattagatgcgccttgttcagcaaccggtgtgattcgtcgccatccggatattaaatggttacgtcgcgatcgcgatatcccggaactcgcgcaattgcagtctgaaattctcgacgccatttggccgcatttaaaatccggtggaaccctggtctatgccacctgttcggtgttaccggaagagaatagcctgcagattaaagcctttttgcaacgtaccgctgatgccgaactttgcgaaacaggaacaccagagcaaccgggtaaacaaaatctgcctggtgccgaagagggcgacggcttcttttacgctaagctaatcaaaaagtgatgagataacgggtcgcgactgatgaaaattatcattctgggtgccggccaggttggcggcacactggcggaaaacctggttggcgagaacaacgatatcactgttgtcgataccaacggtgagcgtctgcggaccttgcaggataaatttgacctgcgagtcgtgcaggggcatggctctcatccacgcgtattgcgggaggcaggtgccgacgacgccgatatgctggttgctgtaaccagttcagatgaaaccaatatggttgcctgccaggtagcctactcacttttcaacacccctaatcgcatcgctcgcatccgctcaccagactacgtgcgcgatgccgataagctatttcattcagatgctgtaccgattgatcatctgatcgcaccagagcagttggttatcgataatatttaccgactgattgagtatcccggcgcattgcaggtggtgaacttcgctgagggtaaagtcagcctcgctgtggttaaagcctattatggcggcccgctgattggtaacgcactttcgaccatgcgcgaacatatgccacatatcgatactcgtgtggcagcaattttccgccacgatcgccccattcgtccacaaggttcgaccattgtggaagctggtgatgaagtgttctttattgccgcttcacagcatatccgcgcggtgatgagtgaattacagcgactggaaaaaccgtataagcggatcatgctggttggtggcggtaatatcggtgcagggctggcgcgtcgtctggaaaaagattacagcgttaaactcatcgaacgtaatcagcagcgcgctgccgaactggcggaaaagttgcagaatacgatcgtcttttttggtgatgcgtcggatcaagaactgctggccgaagaacatatcgatcaagttgatctgtttattgccgtcaccaacgatgacgaggccaatatcatgtccgccatgcttgccaaacgtatgggtgcgaaaaaggtgatggtattgatccagcgtcgcgcttatgtggatctggttcaggggagcgtgatcgatattgcgatttcaccacaacaagcaactatttctgcgttgcttagccatgtgcgaaaagcagatattgttggtgtttcctcattgcgccgcggcgtagcagaagctattgaagccgttgctcacggtgatgaaagcacctcacgcgttgtcggcagagtcattgacgaaatcaagctaccgccaggaacgattattggagcggtggtacgtggaaacgacgtgatgattgccaatgacaatctgcgcattgagcaaggcgatcacgtaattatgttcctcacagataaaaagtttattaccgacgtcgaaagactcttccagccaagccctttcttcttgtaattaataaggcgtctaatgacgccttattatttccctttgattatcaaggattaattaaattcattcctggcaggaaaatggcttaacatttgttagacttatggttgtcggcttcatagggagaataacatgagcattattaaagaatttcgcgaatttgcgatgcgcgggaacgtggtggatttggcggtgggtgtcattatcggtgcggcattcgggaagattgtatcttcactggttgccgatatcatcatgccacctctgggcttattaattggcgggatcgactttaaacagtttgctgtcacgctacgcgatgcgcagggggatatccctgctgttgtgatgcattacggtgtcttcattcaaaacgtctttgattttctgattgtggcctttgccatctttatggcgattaagctaatcaacaaactgaatcggaaaaaagaagaaccagctgccgcacctgcaccaactaaagaagaagtattactggcagaaattcgtgatttgctgaaagagcagaataaccgctcttaacaagcgcctgaaagcagaagaccagtggtaaaaaagtgatttactttcttgccactggcctcccagttcccccgattgccatgttttccttttcgcatgtaactgcctttccccttcttatttttctctacgcgctgtcggaataagggatcatgtagtaatgcttctatcgcattatcctttatctgccctttagtatgctgatatcggctcataaaaactccaattggttattttacggcgcgagtgtaatcctgccagtgcaaaaaatcaacagccactcttaacgccactcgccccttgttcaagagcttcaagaatcgaacaataaacactgctatgggcggtcccacaacaggcatcgttaaggcgttgcaaggaacgctgcatactctgcaactcggctatccgtgcttcgacttcctgcaatctttcctgcacaatgccttttgactcctgacaggtatggtgttcaggatcgatacggatcgacagcaactcgcggatcgactccagactgaaacctagttgtctggcatggcggataaatttcaatcgctggagatcgctttcggtatacaggcgaaacccaccttcagtacgcacttcatgctccatcatctgctgtttttcgtaataacgaatcgtgtcgggtgttacttccgccatttttgccagctcaccaatgcgatacatacatactccactagttatcgttgattttattcaacaacttgtcagcataatcgccgcgtaaaaaatcggtactcagtccagcttgtcgcagcttcaattccagtaatgacaatcgacggctaacctcttgatattgcggatcatcgtgacggatacctttgagaatatccagaagctgaattgcttccctccgttgctcaagttctggcggtaagcaaccgccattcttcaacaagcgataccccgcacgtaattccggtggcacgtgagaatcatcatccagtatcaatggttcgccgctacctgccaggttatcaaactcacctttcgcttgcgcttctgctatatgacgctctgcccactggtcaagtaaccacatatatactccaggggatgaacaaaaagagtacagctattgtagataagtggggatgctacgggtataaaaaaacccgccggggcgggtttttttacgttgcttcagattactctgcagcagcttctgctttctctgaacgatcaaccagctcgatgtaagccatcggcgcgttgtcgcctgcacggaagccacacttcagaatacgagtgtaaccaccggcacggctcgcgaaacgcgggcccagttcgttaaacagttttgccacgatctcgttatcacgagtacgggcgaatgccagacgacgattagcaacgctatcagtcttggcaagagtaatcagcggctcaactacgcggcgcagctctttcgctttaggcagagtcgtcttgatgatttcatgacgaaccagtgaacctgccatattgcggaacatagcctggcgatggctgctgttgcggttcagttgacgaccactcttacgatggcgcatgaccttatccttctcagtaaaaccttaacctgtgatccggttactcgtcagcgatgcttgccggtggccagttttccaggcgcatgcccagagacagtccacgggaagccagcacgtctttaatctcagtaagagattttttaccaaggttaggcgttttaaggagctcaacctcggtacgctgtaccagatcaccgatatagtggatagcttctgctttaaggcagttagcagagcggacagtcaattccagatcgtcaacagggcgcagcaggatcggatcgaactctggtttctcttctttcacttcaggctgacgtacatcacgtaagtcaacgaaagcttccagttgttcagccagaatggttgccgcacgacgaatcgcctcttcaggatcgattgtgccgttggtttccatttcgatgaccagcttgtccaggtcggtacgctgttctacacgcgctgcttcaacattgtaggcaatacgctccacagggctgtagcatgcgtcgaccagcagacggccgattgggcgctcatcttcttccgaatgaattcgggtagaagccggcacataaccacgaccgcgctgaactttgatacgcatgctaatagacgcgttctcatcggtcaggtggcagatcacgtgctgcggcttgacgatttcgacatcaccgtcgtgggtgatatcggctgcagtcacagggccaatgccagatttattcaaggtaagaataacttcatctttgccctgaactctcaccgccagccctttcaggttgagcaggatttccaggatatcttcctgaacgccttctttggtgctgtactcatgtagtacaccatcaatctcaacctcggtcaccgcgcaacccggcatcgatgagagcagaatacggcgcagtgcgttacccagagtatggccaaagccacgctctaaaggctcaagggtcaccttggcgtgcgtcgaactcacttgctcgatatcaaccaggcgcggttttagaaactctgtcacagaaccctgcattgtgtcctctctttggtactaagctttacttggagtaaagctcgacgatcaggtgttcgttaatgtccgcagacagatcagaacgctccggcttacgcttaaacgtaccttccatcttgccagcatcaacttccagccaggttggcttttcacgctgctcagccagctccagagcggctttcacgcgagactgcttcttcgctttctcacgaatgcttacaacgtcattcggactaacctgataagaagcgatgttaacaacacgaccgtttaccataattgctttatggctaaccagctgacgtgcttctgcacgagtggcaccgaagcccatacggtatacaacgttgtccagacgaccttccagcagagccaacaggttttcaccggtgttgcctttcagacgtgctgcttctttgtagtagttacggaactgacgctccagcacaccatagatacggcgaactttttgcttttcacgcaactgcacaccatagtcagacagacgcggtttacgcgcaccgtgctggccaggagcttgttcaattttacacttggtatcgatcgcgcgaacgccagacttaaggaataagtcggtgccctcacgacggctcagcttgagcttaggacccaaatatcttgccattttctttctccaacaaacctggaaaacgaggcgttatacgcgacgttttttcggcggacgacaaccgttatgagggatcggagtcacatcagtaatattagtgatgcggaaacctgcggcgttcagagcacgaatagtagattcgcggcctggacccggacctttaaccataacttccagattcttgatgccgtattctttcacggcgtcagcgcaacgctctgctgcaacctgagctgcaaacggagtggatttgcgagaaccacggaaaccggaaccaccggctgttgcccaacccaacgcgttaccctgacgatcagtgatagtcacgatggtgttgttgaaagaagcatggatatgagccacgccgtcagagacttgttttcttacacgtttacgtgcacgaattggtgcctttgccattattcaatcaccccgattatttcttgatcggtttgcgcggacccttacgggtacgtgcgttggtcttggtacgctgaccgcgaaccgggagaccacgacgatgacgcaaaccgcgatagcaaccaagatccatcaggcgcttgatgctcatgctgatttcacggcgcagatcaccttcaacgacaaatttggcaacttcgtcacgcagcgtgtcgatttgtccttcagacagctcactgatcttaacatcttcagcgatacccgctgcagccaggatggctttagaacgggtcttgccgacgccataaatcgaagttaatgcgattacggcatgcttatgatcaggaatgttaatgcctgctatacgggccactatgcactcctactatttaatatgtacgttccatgctgaaaagcccgttttcaggatactcaaatggaaacgcacagacatacaaaagattggctggctaatctagccagctcaacccaactttgcaagaaaaatatgcgaaaaaatcagccttggcgctgtttatgcttcggctcggcactgcaaatcacacggatgacaccatcacgcttaacgattttgcagttacggcataatttcttgacggaagcacgaactttcatttttactctccgtaacttctcgggcgaccaattatcggccgtagcctttcaggttcgccttcttcaatgcagactcatactgactggacatcatcagagtttgcacttgagccataaagtccataatcacgacaacaacgataagcagtgaggtcccaccgaagtagaacggtactttcattgcatcacgcatgaactccgggatcaggcagataaaggtaatatacagcgcaccaaccagggtcaggcgggtcattactttatcgatatacttcgccgtttgctctcccggacgaattcctggtacaaatgcaccggacttcttcaggttatctgctgtttcacgcgggttgaaaaccaacgccgtgtagaagaaacagaagaagatgattgcagacgcatagagtaacacataaagcggttgcccaggctgcaaatacagcgaaattgttgtcagccagttccaaccagtaccgcccccgaaccatgacgcgatggtcgccgggaacagaataatactggaagcgaagattgccgggattacccccgccatattcactttcagcggtaaatgtgtgctctgtgcagcatagacacgacgaccttgctgacgtttcgcgtagtttaccacaatgcggcgttgaccacgctcaacaaatacaacaaagaacgtcactgcaaatactaatactgcaaccaacagcaacacgaggaagtgcaggtcgccttgacgcgcttgctcgatagtatgggcaatggctggcgggagtcccgcgacaataccggcgaagataatgattgaaataccgttgccgatacctcgttcagtaatctgttcgcccaaccacatcaggaacatcgttcctgtgaccagacttacaacagcggtgaagtagaatgcaaagcctgggttaatcaccaggccttgcataccaggcatattcggcagaccggtagcaataccgatcgactggaatattgccagcaccagagtaccgtaacgggtgtactggctgatcttacgacgaccagactccccttctttcttaatttctgccaacgttgggtgaaccaccgtcagcagctggataatgatcgacgccgaaatatacggcatgatccccagagcaaagatagaagcacggctgagagcaccaccagagaacatgttaaacatctcaatgatggtgcctcgctgttgctcaagcagtttggcaagtacagcggcatcaataccagggatcggaataaaagagccaatacggaacacaatcagcgcaccgataacaaacagcagtctgcgtttcagctcgcctaagccacctttggcactttgaaaatctaatcccggttgtttagccatctgctacttattcctcgattttaccgccagcagcttcgatagcagcacgagcgcctttagtaacacgcaggccacgaacagttaccggagtcgttacttcgccagccaggatcactttcgcgaactcgatctggataccgataatgttagccgctttcagcgtgttcaggtctacaacaccgccttctactttagccaggtcagacagacgaacttcggctgtaatcgctgctttacgagaagtgaagccgaatttcggcagacgacggtacagaggcatctgaccaccctcgaaaccgcgacgtacgccaccgccagaacgagatttctgacctttgtgaccacgaccaccggttttaccgaggccagaaccgataccacgacccaggcgtttacccgcctttttggagccttcggccggagacagagtatttaaacgcatctcttactcctcaactttaaccatgaaggaaaccgcgttgatcataccgcgaatagcaggagtatcctcgcgctctacggtgtgaccaatacgacgcagacccaggccaagcagcgttgccttgtgtttcggcagacgaccgattgcactgcgggtttgagtaattttaatagtctttgccatggtttatttccccagaatttcttcaacggatttaccacgcttggcagcgaccatttctggagaattcatattttccaggccatcaatagttgcacgaaccacgttgatcgggttggtggaaccatatgctttagccagaacgttatgaaccccagcgacttccagaacggcgcgcattgcaccaccggcgatgataccggtaccttcggaagccggctgcatgaatacgcgagaacccgtgtgaacacctttaacagggtgttgcagagtgccgttattcagcgcgacgttaatcatattgcgacgggctttttccatcgctttctggatcgctgctggaacttcacgcgctttaccgtaaccaaaaccaacgcgaccgttaccatcgccaactacagtcagagctgtgaaggagaaaatacgaccacctttaacggttttagatacgcggtttaccgcgatcagcttttcctgcagttcgccagcttgtttttcgatgtgagccatcttacacctctaccttagaactgaaggccagcttcacgggcagcatctgccagtgcctggacacgaccatgatattggaacccggaacggtcaaaggatacatctttgatgcctttttccagagcgcgttcagcgacagctttacccacagctgcagccgcgtctttgttaccggtgtacttcagttgttcagcgatagctttttctacagtagaagcagctaccagaacttcagaaccgttcggtgcaattacctgtgcgtaaatgtgacgcggggtacgatgtaccaccaggcgagttgcgcccagctcctggagcttgcggcgtgcgcgggtcgcacgacggatacgagcagatttcttatccatagtgttaccttacttcttcttagcctctttggtacgcacgacttcgtcggcgtaacgaacacccttgcctttataaggctcaggacgacggtaggcgcgcagatccgctgcaacctggccgatcacctgcttatcagcgcctttcagcacgatttcagtctgagtcggacattcagcagtgatacccgcaggcagctgatggtcaacaggatgagagaaacccagagacaggttaatcacattacctttaaccgctgcacggtaacctacaccaaccagctgcagcttcttagtgaagccttcggtaacaccgataaccattgagttcagcagggcacgcgcggtaccagcctgtgcccaaccgtctgcgtaaccatcacgcggaccgaaggtcagggtattatctgcatgtttaacttcaacagcatcgttgagagtacgagtcagctcgccgtttttacctttgatcgtaataacctgaccgttgatttttacgtcaacgccggcaggaacaacgaccggtgctttagcaacacgagacattttttcctccgattaggctacgtagcagataatttcgccaccaagaccagcctggcgcgctgcacgatcagtcataacacctttagaggtagaaacaactgcgatacccagacccgccataactttcggcagctcatctttacgtttatagatgcgcagacctgggcggctgacacgctgaatgctttctacaacagctttgccctggaaatacttcagagtaagttccagttcaggcttggtgtcgccttcaactttaaaatcttcaataaaaccttcttccttcagcacgttggcgattgccactttcagcttggaggaaggcatggtgaccgcagctttgttcgcggcctgaccgttacggatacgggtcagcatatccgcgatcggatcttgcatgctcatctgtctttactcccgtgattcaattggtgacaattaccagctagcctttttcagacccgggatttcaccgcgcatagcggcttcacggaccttaatacggctcaacccgaacttccgcaggaaaccatgcggacgacctgtttgacggcagcggttacgctgacgagacgggctggaatcacgcggcagagtctgcagcttgagaacagcgttccaacgatcttcgtcggaagcgttcacatcagagatgatcgctttcagttcagcgcgtttcgcgaagtatttatcagctaaagctacgcgttttacttcgcgtgctttcattgattgcttagccatttagtaaccctaccttacttgcggaacgggaagtcaaaggcagccagcagagcgcggccttcttcgtcagatttcgcagtagtggtaatggtaatatccaaaccacgaacgcggtcgactttatcgtagtcgatttctgggaagatgatctgctcacggacacccatgctgtagttaccacgaccgtcgaaagacttagcggacaggccacggaagtcacggatacgaggtacagcaatagtgatcaggcgctcaaagaactcccacatgcgttcgccacgcagagttactttacagccgatcggatagccctgacggattttgaagcctgcaacagatttgcgtgctttggtgatcagcggtttttgaccggagattgctgccaggtctgctgctgcgttatccagcagttttttgtcagcgatcgcttcaccaacacccatgttcagggtgatcttctcgacccgagggacttgcatgacagaattgtagttaaactcagtcatgagttttttaactacttcgtctttgtagtaatcatgcagtttcgccatcgtactactccaaattacttgatagtttcgctgttagacttgaagaaacggacttttttgccgtcttcgaatctaaagcctacacggtcagccttgccggttgccgcattgaagattgctacgttggaaacctgaatagcggcttctttttcaacgatgccacccggttggttcagggccggaaccggcttctgatgtttcttaaccaggttgataccttcaacaatgaccttgccggaagacaggacattcttaactttaccgcgtttacctttatctttaccggttaacacgataacttcgtcatcacgacggattttcgctgccatgattcgctccttagagtacttctggtgccagagagataattttcatgaacttctcactacgaagctcacgagttaccggcccaaaaatacgcgtaccgataggctgctcgctgttgttgttcagaagaacacaagcattaccatcgaagcgaatgacagaaccgtccgggcgacgaacacccttcttggtgcgcaccactaccgccttcagcacatcaccttttttgaccttaccacgcggaattgcttctttgatggtgatcttgatgatgtcgcctacgcctgcgtagcgacggtgcgagccacccagaaccttgatacacattacgcgacgtgcaccggagttgtcggcgacgttcagcatagtctgttcttggatcattttagtgctccgctaatgtcaactactactgagacccgaaaatcaggtcgttaaaaatccccatatcgagggcgcggcattataacaccgcttcaaggatatgggtagaaaaaataaacggctcatttctgagccgtttattcgtatcgagagagtgtactgtattacagaaccgctttctctacaacgcgaaccagcgtccaggatttagtcttggacagcggacggcattcgcggatttcaaccacgtcaccgataccgcattcgttgttctcgtcatgtacgtgcagtttggtcgtacgcttgatgaatttaccgtagatcgggtgtttcacaaaacgttcgatagcaacaacaatggatttctccattttgtcgctaacaacgcgaccttgcagagtacggattttatcggtcattacgcacccgccttctcgttcagtaaagtcttaacgcgtgcgacatcgcgacgcacttgcttcaacaggtgagactgttgcagctggccacttgcagcctgcatacgcaggttgaactgctcacgcagcaggttcagcagctcggtgttcagctcttcaacgctcttctcacgcagctcttttgctttcattacatcaccgtcttagttacaaaggtggttttaatcggcagtttcgctgctgccagcttgaatgcttcacgggccagctcttccggaacaccgtccatttcatacaggactttacccggctgaatcaaggcaacccaatactccacgttacctttacctttacccatacgcactgccagcggcttttcagtgatcggtttgtccgggaacacacggatccagatcttaccttgacgcttaactgcacgggtcatagcacgacgtgctgcttcgatctgacgggcagtcagacgaccacggccaacagctttcagaccgaagctgccgaagctaacatccgtaccctgcgccagaccgcggttacggcctttgtgcattttacggaattttgtacgctttggttgtaacatcagcgacgctccttatttacggcctttacgctgctgctttttaggctgagcagccggttttccggttgttcaacagcagccataccacccaggatctcgcctttgaagatccacactttaacgccgattacaccgtaagtggtgtgcgcttcagaggtgttgtagtcgatgtcagcacgcagagtgtgcagcggtacgcgaccttcgcggtaccattcggtacgtgcgatttccgcgccgcccagacggccgctaacttcaactttaatacctttagcgcccagacgcattgcgttctgtacagcacgcttcatagcacgacggaacataacgcgacgttccagctgagaagtgatgctgtcagcaaccagttttgcgtccagttcaggcttacgaacttcggcgatgttgatctgtgcaggaacgccagcgatgtccgctacgaccttacgcagtttttctacgtcttcaccttttttaccgataacgatacccgggcgagcagtgtgaatggttacacggatgctcttagccggacgctcgataacgatacgagatacggacgctttagccagttccttagtcaggtactgacgtactttaaaatcgctgtccaggttgtcagcgaattctttggtgttcgcaaaccaggtagagttccatggttttacaatacccaggcgaataccattaggatgtactttctgacccattgctagtctccagagtctcagcgatcggacacaaccacagtgatgtggctggtgcgcttcaggatgcgatctgcacgaccttttgcacgcggcataatgcgcttcatgctcgggccttcgtctacgaaaattttcgtaactttcagatcgtcaatgtcagcgccatcgttgtgttcagcgttagcaatggcagattccagaactttcttgaccagtacagccgctttcttgttggtgtaggtcaaaatatccagagcctgcgacactttcttaccgcgaatcaggtcagcaacaaggcgaaccttctgagcagaagaacgagcatggcgatgtttagcgatagtttccatctcttcctcctaccttatttcttcttcgcttttttatcagcagcgtggccgcgataagtacgagtcggtgcgaattcacccagtttgtgaccgaccatttcgtcggttacaaataccggaacgtgctgacgaccattatggacagcgatggtcaaaccgatcatgttaggaaagatcgttgaacgacgggaccaagtgcgcaggggcttcttgtctccgctttccaccgctttctctaccttcttcagcaagtgcaggtcaataaaaggacctttcttgagagaacgtggcatggcttatcctctaaaattatttgctacggcgacgtacgatgaatttatcagtacgcttgttgctgcgggtcttcttacctttggtctgaacgccccacggagttaccgggtgcttaccaaagttacgaccttcaccaccaccatgtgggtggtctaccgggttcatcgcggtaccgcgaacggtcggacgaacaccacgccagcgtgcagcacctgctttacccagaacgcgcagcatatgctcagcattgccaacttcgcccagagttgcacggcagtctgcttctactttacgcatttcaccagaacgcagacgcagggtgacataagcaccatcacgagcaacgatctgaacgtaagtaccagcggaacgtgccagctgaccgcctttacctggtttcatttctacgttatgaacagtagaaccaaccgggatgttgcgcatcggcagggtgttacctggtttgattgcagcatcaacgccagactgaatctggtcgccagctttcaggcctttaggggccaggatgtaacggcgttcaccgtctttgtacagaaccagcgcgatgttcgcggaacggttcggatcgtactcaagacgttcaacaactgccgggataccgtctttgttgcgtttgaagtcaacaatacggtaagcctgcttgtggccaccaccgatatgacgagtggtgatacggccattgttgttacgaccaccggatttgctgtttttttccagcaacggagcaaaaggtttgcccttgtgcagctcagggttaaccactttaactacgtggcgacgacccggagatgtcggtttacatttaacaactgccattgtattactcctccgacttactcagcgccgccaacgaagtccagattctggccttctttcagggtgacgtaagcttttttccagtcgctacgacgaccgatacgctgtccgtgacgtttaactttccctttaactaccagggtgttaacgacttcgacttcgacttcaaacagtttctgcacagcagctttgatttctgctttggtcgcgtctttagcaactttgagtacgatggtgttggatttttccatcgcagtagacgctttttcagaaacgtgcggtgcacgcagcaccttcagcagacgttcttcacgaatcatgccagcatctcctcaacttgcttaacagcatcagcagtcattacgactttgtcgaaggcgatcaggctaaccgggtcgataccagttgcatcgcgtacgtcaaccttgtgcaggttgcgcgcagccaggaacaggttttcgtccagctcaccggtgatgatcagcacatcttccagagccatgtctttcagtttctgtgccagcagcttagttttcggcgcttctacagagaacttctcgacaacgatcagacgatcctgacgtaccagttcggacaggatgcttttcagcgcgccgcggtacatcttcttgttaactttttgactgtggtcctgcggacgagcagcaaaggtcacgccaccagaacgccagatcgggctcttgatagaaccagaacgcgcacggccggtgcctttctggcgccacggttttttaccggaaccagttacttcagcacgagtcttctgagcacgagtaccctgacgagcaccagctgcataagcaacaacaacctggtgaaccagcgcttcgttgaaatcacgaccgaaggtagtttcggaaacagtcagcgcgctctgcgcgtctttcaatactaattccattgctatctccttacgccttcacagctggtttaacgatcaggtcgctaccggttgcacccgggacagcacctttaaccagcagcaggttgcgctcagcgtcaacgcgtactacgtcaaggctctgaacggttacacgttcgttacccatctgacctgccattttcttgcctttgaacactttgcccggagtctggttctgaccgatagaacccggaacgcggtgagacaaggagttaccgtgagtagcgtcctgggtacggaagttccagcgcttaacggtacctgcgaaacctttacctttagaggtgccagttacgtcaacttttttaacgtcagcaaacagttcaacgctaatgctctgacctacagtgaactcttcgccttcagccaggcggaattcccacagaccacggccagcttctacgccagctttagcgaagtggccagcttcaggcttggtcacacggttagcttttttagcaccggtggtcacctgaatagcacggtagccatcgttagccaggtctttaacctgagtaacgcggtttgcttcaacttcgattacggttactgggatagaaacgccgtcttctgtgaagatacgggtcatacccacttttttaccgactaaaccaatcattgtttcaacctctcaatcgctcaatgacctgattaacccaggctgatctgcacgtctacaccggcagccagatccagacgcatcagagcatcaacggttttctcggttggctcaacgatgtcaaccagacgcaagtgagtacggatttcgtactgatcgccgcgcgtctttgttgacgtgcggggagatcagaacagtgaagcgctctttgcgtgtcggcagcgggatcggaccacggacctgcgcaccagtgcgcttggcagtctcgacgatttccgcggttgcttgatcgatcagacgatgatcaaacgctttcaggcggatacggattctttggttctgcatgagaccagagctccaattattttataaacgaaaatgattactcctcagacccattacgattgatgggagagtgtaaccgttcttacgtagctccccgattgggagcattgttaggtagccaaattcggctaactgaggttcagattgaacctgctgtcaactacgacaagcccgcgcattatacgcaaatctgagcctgacgcaagcatcgggtagaaattaatcgcaacgcgcagattgcgagctgtattccacgaaatttgtaaggttgtgaagatagcgtttttcaccggaaccaggttaacaaatcagcgatttctctgttgctgagcatccggagttattcgatggtgatactccaattacagaggatgttttatggacgctacccttccctttctgattttgtacgcttgtttatctgtcctactttttttatgggatgcaaagcatggcttgttacctgacagatttacctgcccgttactctggtcaggtcttttgttctctcaggtttgtaatcctgactgtttagccgatgcgttatggggggcgattattggttacggcacattcgctgtcatttactgggggtatcgcatactgcgtcataaagaaggattaggctatggtgatgtgaagtttctcgccgcccttggtgcctggcatacctggaccttcttgccacgactggttttccttgctgcctcattcgcttgcggagccgtagttgttggtctgctcatgagaggaaaagagtcattaaaaaacccgctgccgtttgggccatttctggcggctgcgggtttcgttgtaggttgggatagtttgctggcaggccgttaatctttaacttttatttgtgattgcaggtaattttgtaaaccgattttaccgatgagatccagctcagtttcgagccagtcaatatgaccttcttcatcggcaaggatctcgatcatcatatcacggctaacatagtcatgaacgctgtcggcatacgcgatagcctcacggagatccttcgcgccttccagttctaatcgcaggtcggattgcagcatctcctcgacatcttcaccaatccccagtttgcctaaatcctgtaagttggggattccttctaaaaacaaaatacgctcgatatatttatcagcgtgtttcatctcatcgatggattcatggtattcgacgtcattgagacgcatcaggccccagtttttaaacatccgggcatggagaaaatactgattgattgcgacaagctcatttcccaatagtttattgagataatttatgattttaacatcacctttcattttatagtccctccgcttccactattagagcgtagatggggctagcgggatgtcaaaaaataagcgtggtcttcaggcaatctctttaaattctggcatctgcatcaactcgtcctgcatcacttcgcgcgcggcgcgaatgcacttaccgcattgatttcccacaggaataaacttacgcaattgttggaaagattgcggatgaaactgacggactgcctggcgaatttttttgtcacttacaccattacacaaacaaacgtacatgattgctcccgttcaaattctgcgcaaagtgtaaatgagaatggttatgattacaatagcacagttttatttgcgccatagttcagcgagcaaaattacgactaaatatttcgagctcaaattacgggcagcaaaaagggcgccgaagcgcccttttcaattcaaaactaattaacgtgtaattagcccagaactttagcaacaacgcccgcgccaacggtacggccgccttcacggattgcgaaacgcagaccgtcgtccatcgcgatcgggtggatcagggtaacaaccattttgatgttgtcgcccggcattaccatctctacgccttccggcagttcgatggtaccagtcacgtcagtagtacggaagtagaactgcggacggtagcctttgaagaacggagtatgacggccgccttcatctttggacagaatgtacacttcagattcgaacttggtgtgcggcttgatggtgcccggcttagccagtacctgaccacgttcgatttcttcacgtttgataccacgcagcagaacacctacgttctcaccagcacggccttcgtccagcagtttgcggaacatttcaacgccagtacaggtagacttctgagtctctttgataccaacgatttcaacttcttcaccaactttgatgataccgcgttctacacgaccggtaacaacggtaccacgaccggagatggagaatacgtcttcgatcggcagcaggaacggcttgtcaatcgcacgctctggttccggaatataagaatccaggaagccagccagttccaggattttcgcttcccactctgcgtcgccttccagcgctttcagagcagaaccacgaacgatcggagtgtcgtcgcccgggaagtcgtactgagacagaagttcacgaacttccatttcaaccagttccagcagctcttcgtcatcaaccatgtcgcatttgttcaggaacacgatgatgtacggaacgcctacctgacgacccagcaggatgtgctcacgagtctgcggcatcgggccgtcagtcgcagcaactaccaggatcgcgccgtccatctgagcagcaccggtgatcatgtttttaacatagtcggcgtgccccgggcagtctacgtgtgcgtagtgacgggtcggggtgtcatattcaacgtgagaagtgttgatggtgataccacgagctttttcttccggcgcgttatcgatctggtcgaatgcacgagcagcaccgccgtaggttttagccagtacggtggtgattgcagcggtcagagtagttttaccgtggtcaacgtggccgatagtaccaacgttaacgtgcggttttgtacgttcaaatttttctttagacacggctatattccttactatagtgctctccccttcaggagagagcacgggactttggtattaacccttaggcttatttaccacgggcttcaattacggcctgagcaacgttactcggcgcttcatcatacttcaggaattccatagtgtatgatgcacgacctttggtcagagaacgcagctgagttgcgtatccgaacatttcagacagcggtacttcagcgtggatcttaacgccagtaacttcagattcctgacctttgagcataccacgacgacggctcaagtcaccgataacgtcaccggtgttctcttccggagtttctacttcaaccttcatgatcggctcaagcaaaactggtttcgctttcttaaagccttctttaaaggcgatagaagcagccagtttaaacgccagttcagaggagtcaacgtcatggtaagaaccgaagtgcagacgaatacccatgtctactaccgggtagcctgccagcggacctgctttcagctgttcctggatacctttatcaacggccgggatgtattcgccagggattacaccacctttaatgtcgttgatgaactcgtagcctttcgggtttgaacccggctccagcgggtacatgtcgataacaacatgaccatactgaccacgaccaccagactgtttcgcgtgtttaccttcaacatcggtaactttctggcggatagtttcacggtaagcaacctgcggtttacctacgttcgcttcaacgttgaattcacgcttcatacggtcaacgatgatgtcgaggtgcagttcgcccatacccgcgataatggtctggttagattcttcgtcagtccatacacggaaagacgggtcttctttagccagacggcccagagccagacccattttttcctggtcagctttggttttcggttcaactgcgatggagattaccggctcagggaattccatacgttccagaatgatcggcgcatccgggtcacacagggtgtcaccagtggttacgtctttcagaccgatagcagcagcgatgtcgcccgcgcgaacttctttgatctcttcacgtttgttagcgtgcatctgaacgatacgaccgaaacgctcacgtgcagctttcacggagttcagtacggtatcaccagagttaaccacaccggagtaaacacggaagaaggtcaggttaccaacaaacgggtcggtagcgattttgaacgccagtgcagagaacggctcatcatcacttgcgtgacgctcagccggagtgtctttaccgtcgtccaggataccgttgatcgcaggtacgtcaaccggggatggcaggtaatcaattaccgcatccagcatcgcctgaacacctttgttcttgaacgcagaaccacaggttaccaggatgatttcgttgttcagaacgcgctgacgcagagcacctttgatttctgcttcagtcagttcttcaccacccaggtatttttccatcagctcttcagaagcttcagctgcggattcgatcaggttctggtgccattcgttagccagttcaaccatgtctgccgggatatcttcgtattcgaaggttacgccctggtcagcgtcgttccagttgatagctttcattttcaccaggtcaacaacaccggtgaaatgttcttcagcaccaatcgccagctgcagcggaaccgggttcgcgcccagacgggttttgatctggttaacaactttcaggaagttcgcacccatgcggtccattttgttaacgaacgcaatgcgcggaactttatatttgtttgcctgacgccatacggtttcagactgcggctgaacaccaccaactgcgcagtaaaccattaccgcaccatcgagaacacgcatggaacgttctacttcgattgtgaagtcaacgtgccccggggtgtcgatgatgttgatgcgatgcggctcatactgcttagccataccagaccagaatgcagtagtcgcagcggaagtgatggtaataccacgttcctgctcctgctccatccagtccatggttgcagcgccgtcatgaacttcaccgattttatggtttacaccggtgtagaacagaatacgttcggtagtagtggttttaccggcgtcgatgtgcgcactgataccgatattacggtagcgtgcgatgggtgttgtacgagccatttgtttcctcgtttatcttttaggcgttcaatttaagtagcccaaagcgggctgcttactggaagcgcccgcctggtgactaaaactccgaagggattaccaacggtagtgtgcgaacgccttgttggcttcggccatacggtgaacgtcttcacgtttcttaactgcagtacctttgttttctgcagcatcagaaagttcgttcgccaggcgcagagccatggatttatcaccgcgtttacgagcagcttcaacgatccaacgcattgccagagcattacgacgaaccggacggacttcaactggtacctgataagtagaaccaccaacgcggcgagacttaacttctacagtcgggcgcacgttttcgagagctacttcgaatgcttccagttcagatttaccagagcgctgagccagggtctccagcgcgctgtatacgatagattcagcagtagattttttaccatctaccatcaggatatttacaaatttagccagcagttctgatccgaacttcggatccggcagaattttacgctgaccaatgacgcgacgacgtggcatggaaatactccgttgttaattcaggattgtccaaaactctacgagtttagtttgacatttaagttaaaacgtttggccttacttaacggagaaccattaagccttaggacgcttcacgccatacttggaacgagcctgcttacggtctttaacgccggagcagtcaagcgcaccacgtacggtgtggtaacgaacacccgggaggtctttaacacgaccgccacggatcaggatcacggagtgctcctgcaggttgtgaccttcaccaccgatgtaggaagtcacttcgaaaccgttagtcagacgaacacggcatactttacgcagcgcggagttcggttttttaggagtggtagtatatacacgagtacatacgccacgtttttgcgggcatgcttccagcgcaggcacgttgcttttcgcaactttgcgagcacgtggtttgcgtaccagctggttaactgttgccattaaatagctcctggttttagcttttgcttcgtaaacacgtaataaaacgtcctcacacaatatgaggacgccgaattttagggcgatgccgaaaaggtgtcaagaaatatacaacgatcccgccatcaccaggccatctggctggagtgcttaaccgtaagtctgacgaaatcagtatagtcaatgggaataatgtcgttcgaaatttgaccagtcaaaccgcgggcaataaggtcttcgttcagggcatagaccttaatgggggcattacgcagactttcaaggtagcggttaccgtcaactgcggcagttacaccatcttgcaataatagcagttcgtcgccctcactgagcagacgcagcagcgcagcaaaatccgtcagccagggtgaacgatgtaatgtgtgcagcataaacgcctcaaaacctcaaaataacatcgtagttggcgagttcgcggcgtaaggcatctgcttcgagcggcgtggcttcgacaacaaagggtgtctgcggatctaacccgcgttcgcgcagtgaagccgcacaaacccagcactgttcaatgtcgtacagacccaacaatttaaaagtggcaatgtaatcacgcgccagcactgcatcgggcttttgtcctgacagcagctgaaaaacgccatcagcgataaagaagacggccagatcgtcagttaatgcggaagttgccagtaaagcatctaaaccttcccgaccagcagctgtaccatgaggtgcagtagaaaaaacaaacgcaattcgtttcatcagaactgtaccaccctgtcacaggtcagcgaggcttccgccagcgccccaagtccgcttaaggtaaatcctggctgaaggtttgacgaagccagcccagccttcctgcttcagtttcatcgacgataccgcggcgtaacgctgccgctacgcagatattcagcgccacaccatgttgcgcattcaactgttgccagccgcgcacaaggtcaaattcgtcacttgccggtgaggtcaattggttagcgttatagaccccttcccgatagaaaaagacgctgcttaactcatggccttcggctatcagcgcctgcgcaaactgaaaagcactactcgcctgttgcgtaccgtatgctggcccggtcaccacgatggcaaaacgcattacttatcttgccccaggaagtcgccacttttgaactggcgaatatagagataaacagtatgtttggaaatattcagacgatcagcaacctgattaatcgcgtcttttatgtcgaatatccctttctcgtagagattcaatacgatctggcgatttttggcgttattagaaacattgcgatcggcattcacttcttcgatggtgaactccagcgtttgggtaaccagatcttctacagaggaagcaaagttgacatttgagccgacatccggcgtctctggtggcacgaaggtgctcataatctgcgagaaaggaacatcgaggttcatattaatgcacagcaggccaattacacgctgttcgcgattacgaatggcgatggtcagcgacttcattaatacgccgcttttggcgcgagtaaagtagcatttagaaacgctgctatccgctcccgtcatatcgtgaagcatacgtagcgccaggtcggtaattggcgaaccaatcttccggcctgtatgttcaccgttagcaatacgaatggctgaacattttaaatcctgcaaagagtgcaaaacgatttcacagtgggagccaatgagcatcgctaacccgtccaccaccgcttcgtaggatttcagaatatcaaaatcgctctggtcgaaaggacgttgatccagtaaatccaactcactggtttcgttggttaaaagcgacctggacatgaaaaaaaacactccttttcaggagcctgtcgttaacttttcagggcaggctcattaatgatgcgggtaactaaattaatacagcggaggttccgctttccagcactaattatatccggcctgtaataaaaaaaccgccgcctggtcaggcggcggttcttaatgcttattttttagcagaatctgcggctttcgcatcagcttccggctttgcatcagccttcggcgctggtttcacatccagcagctctacgtcaaacaccagggtagaattcggtgggatccccggaacacccgctttgccgtaagccagttctggtggaataaccagtttgatcttaccgcctttcttgatgttcttcagaccttctgtccaacccgggataacaccgtccagacggaaagaaagcggttcaccacgggtgtaagagttgtcgaactctttaccgtcgatcagcgtacctttgtagttcactacaacagtatcgctgtctttcggtgcttcgcctttaccggcttctactacctgataaaccagaccagttgaagaggttttcacacctttctctttggcaaatttctcgcggtactctttaccttttgcttcgttatcagccgcgtctttttccatcttcgcctgagcagaagacttcacgcgagcttcgaatgcttgcagagtctgttcgatctcttggtcggagagtttgctcttatcagcaaatgcatcctgaacaccagcgatcagctgatctttatccagtttgatgcccagtttttcttgttctttaagagagttttccatgtaacgacccagcgaagcacccagtgcataagctgatttctgatcgtcatttttgaacgctgctttgctgtcagcagttgtagcaggttttgcagcttcagcagcaaaagtgattggtgcatgcagggcaacggccattgtggtcgccagcagcgttactttaaacagtgatttcatccatatctccaggatcggggcatctcaccccagggttaactattatcagaagggtactataaagcgttgtcgaacaaatctacatacagacacgccctattatcatctattttcagactctttttgtttaaattagtttcgatgaccgcgaaatgagtgctgtctcgggcagcaaagttaagtagaatccgcggcgaccattcgacaaaagaggtgaatcatgcaggatttatcattggaagcacgcctggcagagctggagagccgactggcttttcaggaaatcaccattgaagaactgaacgtcacggtgaccgctcatgaaatggagatggcgaaactgcgcgatcatctgcgtctgctgaccgagaagttaaaagccagccagccgtcgaacatcgcgtcgcaggctgaagaaacgccaccgccacattattgaggcgtaaaaaaagcggggattccccgcttttttgtcaccttttcggtattagtggcaaccacaaccgccgttgcctttaccgccacagcagccttcgccaccgtgttcatgaccgtgatcgtggccatgaccgccgcagcaaccgtcgtggtcgtgatcgtggtgatgatcgtgcgcgccgtgaacgtggccatgagccagttcttcttcggtcgcttcgcgaatcgccacaacttcaacgttgaatttcaggttctgaccggccagcatgtggttaccatcaaccacgacgtgatcgtcttcaaccgcagtgatttcaaccggtaccggaccctggtcagtttcagccaggaaacgcatacctacctgcagttcatcaacgcccataaatacgtctttaggaacacgttgcaccaggttttcgtcgtactgaccgtaagcgtcgttcgcgccaacagcgacatcaaatttgtcgccaacttcatgaccttccagcgccgtttccaggccagagatcagggaaccgtgaccatgcaggtagtccagcggcgcactcaccggagactcatcaaccaacacaccgtcttctgtacgtacctgataggccaggctgaccaccaggtcttttgctactttcatgatatctcctgagcatgggaagaatagtggcgcagattgtagcggaattctgcagccgtgtactcactagcttaaaaaaactcggcgcatatcgctagtccggatgaaaaatcccgatcacttgctcatctttgcgaacgtgatcgcgggcttctttgtctgcttctcgcatctgatgtccgcacttaacacattcaacaatatcaatattattttcgcgccacatcgccattgaatcctgcgcctgacaggccgggcattttgcgcccgcaataaaacgttttcggattgccatctttaccctctactcaaattcatcccagccgtccagctggcgtcgttcttgttgcatttcacgctggaaaatctcttccagttcgcgtcgggcttccctggcgcgagaaatttgtacggtatcagcatgcatcgggattaactcccgcagcattcgcatatccaggcggcgaaaatgcagttgcgcccgctgtgcctgatgcggatgcatgccaagcgtgaccagcgtcttgcgccccagctctaacgcactggagaatgtttcacgggaaaactgcgtcacccctgcctgtaataactcatgcgcttccacacgtccgcgcgctcgcgcaagaatatgcaaatgcggaaagtgctgctggcatatttccaccagcttcatggtgtcttccggctcgttacaggtaatgacgatagactcagcggcctctgcacccgcagaacgtaaaagatcgacctgcgtggcgtcgccgtaataaactttgtagccatatttacgcatcaggttaacggcgctgatatcccgctccagcacggtaatgcgcattttatttgccatcagcaaacgaccaatcacctgaccaaaacgcccgaagcccacgacaatgacctggggtttatcatcgttgacccacggtttttcgtcttcttcttccggtccgttaaactggcgggatagccatttatccaccagcttcatcagcaacggcgtggtcatcatggaaagcgtcaccgtcaccagcaacagcgccatctggtcaccctggaataaacgttgtgaagaagcggtagaaaagaggacaaaggcaaactcaccgccctgactcaacacgccagcaaactgcatccgctctgagctacgcacgccatacaatcgcgccagcagatacaacacgagaattttcaccgccaccagcacaaccacgcttatcactacccacaacagatgggtataaagcaccccgagattgagcgacatgccgacagagataaagaacaaaccgagcagcaagcctttgaagggatcgatagccgtttccagttcatggcgatattcactttccgccagcagcacgcccgcaataaacgtaccgagcgccatcgacagccccagcgcgtccataaacaatgcggaacccaacaccaacagcagcgtcgcggcggtgaacacttcccgcacgccagaagctgcaataaaacggaataccggacgcagtaaatagcgcccgccaatcagcatgccgacaaacgccagcaccttcatgccgatcttcatccagtcgaaatgttcgtctgccgaacccgccaacaacggcactaacgccagtgccgggatcaccgccagatcctgaaacagcagaaccgaaaacccgagctgcccggattcgctgcgattcatccctttctcacgcatcaattgcaacgccattgcagttgaagacatcgcaaggccaatgccaccgacaaccgccgcctgccaggcgaaatccgtcagcatcaataatcccgccagcaacgccgcgcttaacagcacctgtgccgcgcctacgccaaaaatcgaacgccgcagttgccaaagtttggagggattcaactcaagaccgatgataaacatcaggaataccacgccgagttccgaaaagtggaggatctcatcgacgtcgctaataaaccccagcccccatggaccaattgcaattcctgccagcaaatatcccaacacagcgccaatacccagccgcgatgccagcggcaccgcagccaccgccgcgaagagaaacagcactcctgcgagtaaaaaatcggaaccttccatcagcggcctcctggagacagcggatttgccagccagtcaccgtaggctctggcgtgactcgccagctcctgtgcgctttgccgtctcgcccagtaaataatgatgggacttaaccaatgcatccggcacatgcccgccgccagttcaaagggacgcagaacatcgctcatcgggtagcgattcaatgcgtcataacggtaagcactttccggctcgccggtggtaatcacgctacgccagtactttcccgccagttggtttcctcccggcccgctggcaaaaccacgacttaatacccggtccagccactctttcagtagcgccgggcagctataggtataaagaggatgctgaaagacaatcacctcgtgctcgcgcagtaatgcctgctcacgggggatatcaataaaaaaatcgggatagtgcgcataaaggtcgtgcacggtaacattgctgagctgcgtggccggtttaagcagtacccggtttgccaccgagtcctgagattccggatgggcatacagcagcaaaactttcgctggctgagacatcatccccctcccggtatggtttttgtgtatagtcgctgttttgggctaccattgcgcccggtgcggcagctcgcccatacattacattatcataatgataagttaacatagtctgaacatacggcgccttatgattgttttctcctcgttacaaattcgtcgcggcgtgcgcgtcctgctggataatgccaccgccaccatcaaccccgggcagaaagtcggcctggtgggtaaaaacggctgtggtaaatctaccctgctggcattgctgaaaaatgaaatcagcgccgacggcggcagctacaccttcccgggaagctggcaactggcgtgggtgaatcaggaaacgccagcgttaccgcaagcggcgctggaatatgtcattgacggcgaccgtgaatatcgtcaactggaagcgcagctacacgacgccaacgaacgtaacgacgggcacgccattgcgaccattcatggcaagctggatgctattgacgcatggagtattcgctcccgtgccgccagcctgctgcacggcctcggtttcagcaatgaacaactggagcgcccggtaagtgatttctccggtggctggcgtatgcgtcttaaccttgcccaggcgctgatttgccgttcagacttgctgctgctcgacgaaccgactaaccacctcgatctcgatgccgttatctggctggaaaaatggttgaagagctatcagggcacgctgatcctgatctctcacgaccgcgacttcctcgatccgatcgttgataaaattattcatatcgaacaacaaagcatgttcgagtacaccggcaactacagttcgtttgaagtacagcgcgccacccgtctggcgcagcaacaagcgatgtatgaaagccagcaggaacgcgtagcgcatctgcaaagttatatcgaccgtttccgtgccaaagccaccaaagcgaagcaggcccagagccgcattaagatgctcgagcgtatggagctgattgcccccgcgcacgtcgacaacccgttccgctttagcttccgcgcgccggaaagcctgccaaatccgttactgaagatggaaaaagtcagcgcgggctatggcgatcgcattattctcgactcgattaaactgaacctggtgcccggctcgcgcattggtctgttaggccgcaacggcgcgggtaaatcgacattaatcaaactgttagccggtgaacttgcgccagtcagcggtgaaattggtctggcgaaagggatcaagctcggctacttcgcccagcatcaacttgaatacctgcgcgccgacgaatcacctattcaacatctggcacgtttagcgccgcaggagctggaacaaaaactgcgtgactacctcggcggctttggtttccagggcgataaagtaaccgaagaaacgcgccgcttctcaggtggggaaaaagcccgcctggtgctggcattaattgtctggcagcgtccgaatctgctgctgctcgacgaaccgactaaccaccttgacctcgacatgcgtcaggcactcaccgaagcattaatcgagtttgaaggcgcgctggttgtcgtttcgcacgaccgtcatttgctgcgttccaccactgacgatctctacctggttcacgatcgtaaagtcgaaccgttcgacggcgatctggaagattatcaacagtggttgagcgacgtacaaaagcaggaaaaccagaccgacgaagcgccaaaagagaacgcgaacagcgcccaggcacgtaaagatcagaagcgtcgggaagcggagctgcgtgcgcaaacccagccgctgcgtaaagagattgcccgtctggaaaaagagatggagaagctgaacgcgcaactggcgcaggcggaagagaaactcggcgacagcgaactgtatgaccagagccgtaaagcggagttgaccgcctgcctgcaacagcaagccagcgccaaatccggcctggaagagtgcgaaatggcgtggctggaagcccaggagcagcttgagcagatgctgctggaaggccaaagcaactgatggcgcagataacgacgaccgatgccaatgaatttagcagcagtgctgaattcacccctatgcgcggctttagcaattgtcatctacaaactatgctgccgcgtttgtttcgtcgtcaggtgaaattcaccccgtactggcagcggctggagttgcccgacggcgattttgtcgatctcgcgtggagtgaagaccccgcacaggcgaaacataaaccgcgtttagtggtgtttcacgggctggaaggcagtctcaatagcccttacgcccacggtctggttgaggcggcgcaaaagcgcggctggctgggcgtggtgatgcattttcgcggatgcagcggtgaaccaaaccgtatgcaccgcatttaccattcgggcgaaaccgaagacgccagttggtttttacgctggctgcaacgcgaatttggtcatgcgccaacggctgccgtcggctattcgctcggcggtaatatgctggcctgtttgctggcaaaggaaggcaatgatctcccggttgatgcggcggtgattgtctctgcgccgtttatgctggaagcctgtagctatcatatggaaaagggcttttcccgcgtttatcagcgttacttgctaaacctgttaaaagccaatgccgcacgcaagctggcagcctaccccggaacactgccgattaatctcgcgcagttaaaatcggtacgtcgcatccgtgaatttgacgatctaatcaccgccagaattcacggctacgctgacgctatcgactattatcgtcagtgtagcgccatgccgatgctgaaccggatcgccaaacctacgctgattattcacgccaaagacgatccgtttatggatcatcaggtgatcccgaaaccggaaagtctccccccgcaggttgagtatcaactgactgaacatggcggtcatgttggctttattggcggtacattacttcatccgcaaatgtggctggagtcacgcattcctgactggttaacaacgtatctggaggcgaaatcatgttgattccgtggcaagacctctcccccgaaacgctggaaaatttaattgaaagctttgtgttacgtgaaggcaccgattatggtgaacatgagcgtacacttgaacagaaagtcgccgacgtcaaacgccagctacagtgcggagaagcggtgctggtatggtcggagctgcacgaaacggtcaatattatgccgcgcagtcagtttcgcgaataacctgcaaccgtcggcggacgagataataatgatagctaagtcatggagttactatgtctgccaaacatccggtcattgcggtaacaggatccagcggcgcggggaccaccaccaccagcctcgcgtttcgtaaaatattcgcgcagttaaatctgcatgcagctgaggtggaaggcgacagttttcaccgttacacccgcccggaaatggacatggcgatccgcaaagcgcgcgacgccgggcggcatatcagctacttcggccccgaggctaacgacttcggcctgctggaacaaaccttcattgaatacggtcagagcggcaaagggaaatctcgcaaatatctgcatacctacgacgaagccgtaccgtggaatcaggtaccggggacattcaccccctggcaacctttaccggaacccactgatgtactgttttatgaaggtttacacggcggcgtagtcacgccacagcataacgttgcgcagcatgtggacttactggtcggcgtggtgcctatcgttaaccttgagtggattcaaaaactgatccgcgacaccagcgagcgcgggcactcacgagaagcagtgatggactcggtagtgcgttcaatggaagattatatcaactacatcacaccgcagttttcccgcacccatcttaacttccagcgcgttcccaccgtcgacacttcaaacccgttcgcggcaaaaggtatcccgtcgctcgatgaaagctttgtggtgatccattttcgtaatctggaagggatcgatttcccctggctgctggcgatgttgcaaggctcattcatttcccacatcaatacgttagtggtaccgggcggcaaaatgggtctggcaatggaattaattatgctgccgctggtgcaacgattgatggaaggaaagaaaatcgagtaactctgctattacgccggataaaatactatccggcttcacaacgggatagttaaatcacgcggcaaccacttcatacgagtgagtaatattcaccgctttttccagcatcaacgccactgaacaatatttctcagcagagagatcaaccgcacgcgcaaccgctgcgtctttcaggtcgcgaccggtgacgataaaatgcagattaatgtgcgtaaacaggcgtggtgcctcttcgcggcgttcagaggtcaattttacttcacaatcgaccacatcctgacgccctttttgcaggatagaaaccacatcgatggcactgcaaccccccgccgccatcaacaccatttccatcggacttggtgctttatcgcctgagttgccgtccattaaaatctgatgaccagaggcggattcgcccagaaaagttaacccttcgacccacttcactcgcgcttgcatttttgctactccactgcgtcaattttcctgacagagtacgcgtactaaccaaatcgcgcaacggaaggcgacctgggtcatgctgaagcgagacaccaggagacacaaagcgaaagctatgctaaaacagtcaggatgctacagtaatacattgatgtactgcatgtatgcaaaggacgtcacattaccgtgcagtacagttgatagccccttcccaggtagcgggaagcatatttcggcaatccagagacagcggcgttatctggctctggagaaagcttataacagaggataaccgcgcatggtgcttggcaaaccgcaaacagacccgactctcgaatggttcttgtctcattgccacattcataagtacccatccaagagcacgcttattcaccagggtgaaaaagcggaaacgctgtactacatcgttaaaggctctgtggcagtgctgatcaaagacgaagagggtaaagaaatgatcctctcctatctgaatcagggtgattttattggcgaactgggcctgtttgaagagggccaggaacgtagcgcatgggtacgtgcgaaaaccgcctgtgaagtggctgaaatttcgtacaaaaaatttcgccaattgattcaggtaaacccggacattctgatgcgtctgtctgcacagatggcgcgtcgtctgcaagtcacttcagagaaagtgggcaacctggcgttcctcgacgtgacgggccgcattgcacagactctgctgaatctggcaaaacaaccagacgctatgactcacccggacggtatgcaaatcaaaattacccgtcaggaaattggtcagattgtcggctgttctcgtgaaaccgtgggacgcattctgaagatgcttgaagatcagaacctgatctccgcacacggtaaaaccatcgtcgtttacggcactcgttaatcccgtcggagtggcgcgttacctggtagcgcgccattttgtttcccccgatgtggcgcagactgatttatcaccccgatatcaactatgcacttcgacaaacgctggtgctatgtttgcccgtggccgttgggttaatgcttggcgaattacgattcggtctgctcttctcactcgttcctgcctgttgcaatattgcgggccttgatacgcctcataaacgttttttcaaacgcttaatcattggtgcgtcgctgtttgccacctgtagcttgctgacacagctactactggcaaaagatgttcctctgccctttttgctgaccggattaacgctggtacttggcgtcactgctgagctggggccattgcacgctaaattgcttcccgcatcgctgctcgccgccatttttaccctcagtctggcgggatatatgccggtctgggaaccattgctcatctatgcgttgggcactctctggtacggattgtttaactggttttggttctggatctggcgcgaacaaccgctgcgcgagtcactaagtctgctgtaccgtgaactggcagattattgtgaagccaaatacagcctgcttacccagcacaccgaccctgaaaaagcgctgccgccgctgctggtgcgccagcaaaaagcggtcgatctaattacccagtgctatcagcaaatgcatatgctttccgcgcaaaataatactgactacaagcggatgctgcgtattttccaggaggcgctggatttacaggaacatatttcggtcagtttgcatcagccggaagaggtgcaaaaactggtcgagcgtagccatgcggaagaagttatccgctggaatgcgcaaaccgtcgccgctcgcctgcgcgtgctggctgatgacattctttaccatcgcctgccaacgcgttttacgatggaaaagcaaattggcgcactggaaaaaatcgcccgccagcatccggataatccggttgggcaattctgctattggcacttcagccgcattgcccgcgtgctgcgcacccaaaaaccgctctatgcccgtgacttactggccgataaacagcggcgaatgccgttacttccggcgctgaaaagttatctgtcactaaagtctccggcgctacgcaatgccggacgactcagtgtgatgttaagcgttgccagcctgatgggcaccgcgctgcatctgccgaagtcgtactggatcctgatgacggtattgctggtgacgcaaaatggctatggcgcaacccgtttgaggattgtgaatcgctccgtgggaaccgtggtcgggttaatcattgcgggcgtggcgctgcactttaaaattcccgaggttacaccctgaccttgatgctgattaccaccctcgccagctacctgatattgcgcaaaaactacggctgggcgacggtcggttttaccattaccgcagtgtataccctgcaactgttgtggctgaacggtgagcagtacatccttccacgtcttatcgataccattattggttgtttgattgctttcggtggtaccgtctggctgtggccgcagtggcagagcgggttattgcgtaaaaacgcccatgatgctttagaagcctatcaggaagcgattcgcttgattctgagcgaggacccgcaacctaccccactggcctggcagcgaatgcgggtaaatcaggcgcataacactctgtataactcattgaatcaggcgatgcaggaaccagcgttcaacagccattatctggcagatatgaaactgtgggtaacgcacagccagtttattgttgagcatattaatgccatgaccacgctggcgcgggaacaccgggcattgccacctgaactggcacaagagtatttacagtcttgtgaaatcgccattcagcgttgtcagcagcggctggaatatgacgaaccggggagttctggcgatgccaatatcatggatgcgccggagatgcagccgcacgaaggcgcggcaggtacgctggagcagcatttacagcgggttattggtcatctgaacaccatgcacaccatttcgtcgatggcatggcgtcagcgaccgcatcacgggatttggctgagtcgcaagttgcgggattcgaaggcgtaatgcaggctaaaccatcggataaggcattcacgccgcatccgacatcttttgcctgatgcttcgtatttacgccccaatcaccttagccaccgcgtgggcgaaacgttgcatcccttcatcgatatccgcatcttccaccaccagcgacggtgcaaaacgcatcacatccggtccggcattcagcaccattacgccagcctctgcgcccgcatacaggaaatcacgcgcccgacctttgaactgtggcttaagctccgcgccaatcaacagccccataccgcgaatatcgctaaacacatcgtactgctgatcgatcttctgcaaatggtcaacaaaacgctggcgtttcgcctgaatgccttccagcacttcaggggtattgatgatatcaaacgccgcgcccgctactgcacaggccagaggattaccgccgtaggtggaaccgtgagaaccaggatgaaacgcagaagcaatttccgccgtggtcagcatggcgctaatcgggaagccgccgcctaacgctttcgcagaggtcagaatatccggcgtcacaccgtagtgcatgtaagcaaacaaatcgccagtccgccccatcccgcactgcacttcatcaaacaccaataatgcctgatgttgatcgcacagctcgcgcaagccctgcaaaaactctggcgtcgcagccgtcacaccgccctcgccctggatcggctcaaccaccaccgcacaggtgtgatcatccatcaccgctttcactgcgtggagatcgttaaagggaacgtggatgatgtctgccggttttggcccaaagccgtcggaatattttggctgcccgcccaccgagacggtaaacagcgagcgaccatgaaaagcgttatggaaggcaataattttggttttgaacgggctatgacgcacacaggcataatggcgtgccagtttaaaggcggtttcgttagcttccgtgccggagttcataaacaccacgcgttcggcaaacgtcgcctcaatcagtttgcgcccaagacgcagcgccggttcattggtgaaaacgttactgatatgccacagagtttcgccctgggtttttaacgcattcaccagcgcaggatggcaatggcccaacgccgtaactgcaatgccacccgcgaaatcgacatactccttgccttgctgatcccagattcggctgccctgaccttttaccggaatgaactctgccggagcataaatcggcaggatcacttcatcgaaagtcgcccgtgtaattgctgtttgttcaattgccatctcatgatcaccctgttacgcataaataaatgtgaaattataatcacaaaatatgcataaaaaatcactgaatggcaatcagaaatcagcgatgcagaaaattagccagcagttgatgtccttgttcgctaagaatactttctggatggaattgcacaccttccagatcccactggcgatggcgaatccccataatctcgcgggtttcgctccaggccgtcacgtcaaagcacgctggtaatgagtcaggttccaccaccagcgaatggtagcgtgtcacggtgagtggatttgccagcccccgaaatacgccctcaccgttatgtgtaatcggcgaggttttgccgtgcataacctttgcggcgcgcacaactttaccgccaaatgcctgcgccattgcctgatgaccgaggcagacgccaagaatcggcaagcgcccggcatagtggcgaataacgtcaagggagatcccggcttcatctggcgtacaggggccaggtgagatgacaattttttgtggtttaagggcgtcgatatccgccagcgtcaacgcatcgttgcgcttaaccagcacatccgcccccagttcacaaaagtactggtagaggttccaggtaaaagaatcgtagttatctataagcaggatcatggcggctccggtacgaaagaaccgcgctattttactcagattccccggcttcgcttaccactttgctaaatatcatctgcagcgcggtgagatcccccattgctccactctgatttgcctgattccaggcctctttttcgataccctgccagctcagttgatatccggcatgaatcgccagttgctcgaagaagatccgctgtgccagaccacttcccacccggaagggatgcagcacgttgatttcacaatagtaatgcgccagccgctcgacgaacttcgctttctccaggccaaccagataaccttcttcctccagatcctgcatcagggcattgccctctttttcgatataagcaaagtggcagaacggcgtatcgccctgataaatatcaacttcacgcagttgccctgcccagtcgaaaatatcctggtacagctggcgatggatagtgcgcaaatgcggtaaaccgcgcaccagcggaccaagctcaatggtcgcagcacgcagcgccgtcatttcgtaagcggcctgttccagccgctgctgctggcggatgttcagccggttacgcatgatatcaaggccaggataaagatacggatcgcgcccttcgccgaatttatcgctcatagtgactcctcagctcttcaaggcgcgctaaagcctctgcggcagtaagagtgactaaaggcatctcgacgccttcaagacggcgactggcctgaaaattacgattacgctgaagctcccagagacgggacttttgcttatcggtgagtttcttcacttgatgcctccctgaacgtgtccatttgccacaagtataagcggcaaatccgggttacgccgggagagcaaaagcgcgggcaagattgcccgcgcgagaaaatcattacggcaggactttagcggaaaggataactaccggttttgacggcacattctggtacggaccaacgtcatgagtcggcacctgggaaatcttatcggcaacgtccatgcctttcaccactttaccaaataccgcgtaaccgaaatcacgctgaccatggtcaaggaaggcgttatcggcaacgttgataaagaactggctggtggcgctgtctttgtcggcggtacgcgccatcgcgatggtaccacgcgtgttgcgcaggccattatcggcttcatttttgattggcgggtttggttttttctgctgcatctgctcggtgaaaccgccgccctgaatcataaagccaggaatgacgcggtgaaaggtagtgttgttataaaaaccgctgttcacataatcgacaaagttctgcacagacactggcgctttttgtttatccagctccagttcgatgttaccagctgaggttgtcaacaatacgtgcgggtcccctttcgctgccattgctgcgggagaaagagcagaaagagcgaaaacagcagccatcgccgccagggtcgatttgaacatgagatttccttaacaaacagagcagaaaaaaagcaagtgaagagattctaaatagccttcaagaacaaggccatccctttacctaattttacgtatctgaaatatatgtaacctgacgatcactttttattccgtgatcaaaatcacctcttaaaatgcaatttagcaaccgattgcaataaaacatttaaacagatcacaaaatcacctaaaatcgcccgctcgcggcatatcccgctatgccattttatttttgaacgcaggccaatcatgactaacagcaatcgcatcaagctcacatggattagctttctctcctacgcactgactggtgcgttggttattgtcaccgggatggtgatgggaaatatcgccgattatttcaatctgcctgtttccagtatgagtaacaccttcaccttcctcaacgccggcattttaatctctatcttcctcaacgcctggctgatggaaatcgtcccgttgaaaacgcagttacgttttggctttctcctgatggtgctggcggttgccggtttgatgttcagccacagcctggcgctgttctcggcggcgatgttcattctcggggtggtcagcggcatcaccatgtcgattggtacattcctggtaacacaaatgtatgaagggcgtcagcgcggttcccgcctgttatttaccgactccttcttcagtatggctgggatgattttcccaatgatcgccgcgtttctactggcgcgcagcattgagtggtactgggtttatgcctgcatcgggctggtgtatgtcgctatttttattctgacctcggctgtgagttcccggcgctgggcaaacatgcgccaaaaacggatgctccggtagagaaagaaaagtgggggatcggcgtactgtttctctctgttgcggcgctgtgctacatccttggtcagttaggttttatctcctgggtgcctgagtatgccaaaggcctgggcatgagcctgaacgacgcgggcacgctggtgagtaacttctggatgtcatacatggtcggcatgtgggcgttcagctttattcttcgcttctttgatttgcaacgtattctgaccgtactggctggtctggctgcgattctgatgtacgtctttaacaccggaacaccagcacatatggcgtggtcaattctcgctctgggcttcttctccagcgcgatctataccaccatcatcaccctgggttcacagcagaccaaagtaccgtcgccaaaactggttaactttgtcctgacctgcggaaccatcggtactatgttgacctttgtggttaccggcccgattgttgaacatagcggtccgcaggcggcactgcttacagcaaacggtctgtacgctgtcgtctttgtgatgtgcttcctgttaggtttcgtcagccgtcaccgtcagcataacaccctgacctctcattaattgctaatgccggacggcactatcgtcgtccggccttttcctctcttcccccgctacgtgcatctatttctataaacccgttcattttgtccattttttgcacaaacatgaaatgtcagacaattccgtgacttaagaaaatttatacaaatcagcaatataccccttaaggagtatataaaggtgaatttgatttacatcaataagcggggttgctgaatcgttaaggtaggcggtaatagaaaagaaatcgaggcaaaaatgagcaaagtcagactcgcaattatcggtaacggtatggtcggccatcgctttatcgaagatcttcttgataaatctgatgcggccaactttgatattaccgttttctgtgaagaaccgcgcatcgcttatgaccgcgtacacctctcgtcttacttctctcaccacaccgccgaagagctgtcgctggtgcgcgaaggcttctacgagaaacacggcatcaaagttctggtcggcgaacgtgctatcaccatcaaccgtcaggagaaggtgattcactccagcgccgggcgcaccgttttttatgacaagctgatcatggcgaccggttcctacccgtggatcccgccaatcaaaggttctgatactcaggactgctttgtctatcgcaccattgaagacctcaacgccattgaatcctgtgcccgtcgcagcaaacgcggtgccgttgttggtggcggcctgttaggtctggaagccgctggcgcgctgaaaaacttaggtattgaaacccacgttatcgaatttgcccctatgctgatggcggaacagcttgatcagatgggtggcgagcagctgcgtcgcaaaatcgaaagtatgggcgtgcgcgttcacaccagcaaaaacacccttgagattgtgcaggaaggtgtcgaagcgcgtaaaaccatgcgttttgccgacggcagcgaactggaagtcgactttatcgtcttctctaccggtatccgtccgcgcgataagctggcaacccagtgtggtctggacgtagctccgcgtgggggtattgtcattaatgattcctgccagacttccgatccggatatctacgccatcggtgaatgcgcaagctggaacaaccgtgtatttggtctggtagcaccaggctacaaaatggcgcaggtcgccgttgaccatattctcggtagcgaaaacgcctttgaaggtgctgaccttagcgccaagctgaaactgctgggcgtagacgtaggcggtattggtgatgcgcacggtcgcacgcctggcgcacgtagctacgtttacctcgacgaaagcaaagagatctacaaacgccttattgtcagcgaagacaacaaaaccctgctcggtgcggtactggtgggcgataccagcgactacggcaacctgctgcaactggtgctgaatgctatcgagctgccggaaaacccggattctctgattctgccggcgcactcgggtagcggtaagccgtctatcggtgttgataaactgccggacagcgcgcaaatctgctcctgcttcgacgtcaccaaaggtgatctgattgctgccatcaacaaaggctgccacaccgttgcggcgctgaaagccgaaaccaaagcgggtactggctgcggtggctgtatcccgctggtcactcaggtactgaacgcggaactggcgaaacagggcatcgaagttaacaacaacctgtgcgaacactttgcttattcgcgtcaggaactgttccatttgatccgcgttgaaggcattaaaaccttcgaagaactgctggcgaaacacggcaaaggttacggttgtgaagtttgtaaaccgaccgtcggttcgctgctggcctcctgctggaacgaatacattctgaagccggaacatactccgctgcaggattcaaacgacaacttcctcgctaacatccagaaagacggcacctactcggtgatcccgcgttctccgggcggtgaaatcaccccggaagggctgatggcagtaggtcgtatcgcgcgtgaatttaatctctacaccaaaatcaccggctctcagcgcctggcgatgtttggcgcacagaaagacgatctgccggagatctggcgtcagctgattgaagctggcttcgaaaccggtcatgcctatgcgaaagcactacgtatggcgaaaacctgcgtgggtagcacctggtgccgctacggcgttggcgacagcgtcggcctcggcgtggaactggaaaaccgctacaaaggcatccgtacgccgcacaaaatgaagttcggtgtctccggctgtacccgtgaatgttcagaagctcagggtaaagacgtgggtattatcgccactgaaaaaggctggaacctgtatgtttgcggtaacggcggcatgaaaccgcgtcatgcggatctgctggcggcggatatcgatcgcgaaacgctgatcaaatatctcgaccgcttcatgatgttctacatccgtaccgccgacaaactgacgcgtaccgcaccgtggttagaaaacctcgaaggcggcattgattacctgaaagcggtgatcattgacgacaaactggggctgaacgcacatctggaagaagagatggcgcgcctgcgtgaagcggtagtgtgtgagtggactgaaacggtcaatacgccgtctgcgcagactcgcttcaaacacttcatcaacagcgacaagcgtgacccgaacgtgcagatggtgccagagcgcgaacagcaccgtccggcaacgccgtatgaacgtatcccggtaactctggtggaggacaacgcatgaaccagtggaaagacatctgcaaaatcgatgacatcctgcctgaaaccggcgtctgcgcgctgttaggtgacgagcaggtagcaattttccgcccgtatcacagcgaccaggtgtttgcgatcagcaacattgatccgttcttcgagtccagcgtgctgtcacgcgggctgattgcggaacaccagggcgagctgtgggtcgccagcccgctgaaaaaacagcgttttcgcttaagtgatggcttgtgcatggaagacgaacagttttccgtcaaacattacgaagcacgagtgaaagacggcgtggtgcagctgcgcggttaatgttttaacgggaggcgcaatgcctcccctttttgcatggtcctgtaatgaccttcggtatattgcaggacattttttaaactttttgttttatttttttgtttttattttttaaaggataatcaaatgtttacagacactattaataagtgtgcggctaacgctgcgcgcattgcacgcctgtcggcaaataacccgctcggcttttgggtcagctccgccatggcgggcgcgtatgtgggtcttgggatcatcttgattttcacgctcggtaatttgctcgacccgtccgtacgtccgctggtgatgggcgcgacctttggtatcgccttaacgctggtgattatcgccggttctgaactgttcaccggacacaccatgttcctcacctttggggtaaaagcgggcagcatcagccacgggcaaatgtgggcaatcctgccgcaaacctggctgggtaacctggtcggttccgtcttcgttgccatgctctatagctggggtggcggtagcctgctgccggtagataccagcatcgttcactccgtcgcgctggctaaaaccactgcaccggcaatggtactgttcttcaaaggtgcattgtgtaactggctggtttgtctggcaatctggatggcgctgcgcactgaaggggcggcgaaatttatcgctatctggtggtgtctgctggcatttatcgcgtccggctacgagcactccatcgctaacatgacgctgttcgcgctctcctggttcggcaaccacagcgaagcctacacgctggcgggtattggtcataacctgctgtgggtgacgctgggtaatactttatcaggtgccgtattcatgggattgggttattggtatgctacgccgaaagcgaatcgtccggttgcggacaaatttaatcaaactgaaacggctgccggttaattactaaggggtttttacgtggatcatttgcctatattttgccaattacgcgatcgcgactgtctgattgtcggcggtggtgatgtcgcggaacgcaaagcaaggttgctgttagacgcaggcgctcgcttaacggtgaatgcattagcgtttattccacagttcaccgcatgggcagatgcaggcatgttaaccctcgtcgaagggccatttgatgaaagccttctcgacacctgctggctggcgattgcagcgacggatgatgacgcgcttaaccagcgcgtcagcgaagccgctgaagctcgtcgcatcttctgtaacgtggtcgatgcgccgaaagctgccagcttcattatgccgtcgattattgaccgctcaccgctgatggtggcggtttcctctggcggtacttctccggttctggcgcgcctgttgcgcgaaaaactcgaatcactgctgccgctgcatctgggccaggtagcgaaatacgccgggcagttacgcggtcgggtaaaacaacagttcgccacgatgggtgaacgccgccgcttctgggaaaaactgttcgttaacgaccgtctggcgcagtcgctggcgaacaacgatcagaaagccattactgaaaccaccgaacagttaatcaacgaaccgctcgaccatcgcggtgaagtggtgctggttggtgcaggtccgggcgatgccgggctgctgacactgaaaggtctgcaacaaattcagcaggcagatgtggtggtctacgaccgtctggtttctgacgatattatgaatctggtacgccgcgatgcggatcgtgttttcgtcggcaaacgcgcgggataccactgtgtaccgcaggaagagattaaccagatcctgctgcgggaagcgcaaaaaggcaaacgcgtggtgcggctgaaaggtggcgatccgtttatttttggccgtggtggcgaagagctggaaacactgtgcaacgcgggtattccgttctcggtggttccgggtattaccgcagcttctggttgctctgcctattcgggtattccactcacgcatcgcgattatgcccagagcgtacgcttaattaccggacacttaaaaaccggtggcgagctggactgggaaaacctggcggcagaaaaacagacgctggtgttctatatggggttgaatcaggccgcgactattcagcaaaagctgattgaacacggtatgcctggcgaaatgccggtggcaattgtcgaaaatggaacggcagtcacgcagcgcgtgattgacggtacgctcacgcaactcggtgaacttgctcagcaaatgaacagtccatcgctaattattattggtcgggttgttggcctgcgcgataaactgaactggttctccaaccattaatttaacccgggccagagaattctggccttcttaatgactctttttatatattcagcaaataaaacatagccccttaataaatattatctgctaatgggttatattcaccgttacagcgacttacaaaattaagtcattcgctcactgacgccaattaaatattcctgtatcgttcttaacgagcagtctgcttatattcatataatcaatgaatattaattaatatataatacatagggaatgtaaatgaacaaatttattaaagttgcactggtaggtgcagtactggctacgttaactgcatgtactggtcatattgaaaaccgtgataagaactgctcttacgactacctgctgcacccggcaatttctatttctaaaatcattggcggttgcggtcctactgcacagtaagtctctgacagaaatcggctaacaccggtttaattgcccgacgccctctggattttccgagggcgtatttgtttctatgtccttcttgcccccgcccgtaaaaatattttcactttaaattcaatttgataaatacatccattagccacagcgcgatcctgtgcgaaattttgtgatcttcctccacattacataacatcatatgttgttatattcatcatgcattgtcatgttaccttttaaatgactgcaaactctcccctacaacgtattggacaagaaaaaggtatcgctatgggaagccaggaactccaacgcaagctcggattttgggccgttcttgcaatcgccgtcgggacaaccgtcggctccggtatttttgtatctgtgggtgaagtggcaaaagcagcgggcacgccgtggcttacggtgctcgcgtttgtcattggcgggttaattgtgatcccgcaaatgtgcgtctatgcggaactatccaccgcttatccggaaaatggcgcagattatgtttatctgaaaaatgccggaagccgaccgctggctttcctctccggctgggccagcttctgggccaacgatgcgccgtcattgtcgattatggcgctggcgattgtcagcaatcttggctttttaacgcctatcgatccgttgctcggtaaatttatcgccgccggattaattatcgcctttatgttgctacacctgcgctccgttgaaggcggcgcagcgtttcagacgctaattaccatcgccaaaattatcccgttcactatcgtcattggccttgggatcttctggtttaaagcggagaattttgccgcccctaccaccactgcgattggcgcaacgggcagctttatggcgctgctggcggggatctctgccaccagttggtcgtataccggcatggcctctatctgttatatgaccggcgaaattaaaaaccccggaaaaaccatgccacgagcgctgattggttcctgtctgctggttctggtgctctacaccctgctggcgctggtgatttccggcctgatgcccttcgacaaactcgccaattctgaaacgccgatttccgacgccctgacctggatccccgcactcggcagcaccgctgggatctttgttgccatcacggcgatgatcgtcattcttggttcgctttccagctgcgtgatgtaccagccgcggctggaatacgcgatggcgaaagacaacctgttctttaaatgcttcggccatgtgcatccgaaatacaacacgccggatgtctccatcatcctgcaaggggcgctggggatcttcttcatcttcgtttccgatctcaccagcctgctgggttatttcaccctggtgatgtgtttcaaaaataccctcaccttcggctccatcatctggtgtcgtaaacgcgacgattacaaaccgctgtggcgtactccggctttcgggctgatgaccaccctcgccattgcgtcaagcctcattctggtcgcctcaacctttgtctgggcaccgattcccggccttatctgcgccgtcatcgttattgctactggtctgcctgcttacgccttctgggcgaagcgtagccgccagctcaacgctttgtcgtaatgttatctggagaaaataaaatgttggatattgataaaagcaccgtggactttctggtcaccgaaaatatggttcaggaagtggaaaaagttctcagccatgacgttccgctggtgcacgccatcgtggaagagatggtgaagcgcgacattgatcgtatttatttcgttgcctgcggctcgccactcaacgcggcgcaaacggcgaaacatctggcggatcgcttttccgatcttcaggtctacgccatttccggctgggagttctgcgataacaccccgtatcgcctcgacgatcgttgcgcggtgattggcgtttctgactacggtaaaacggaagaggtaatcaaagcgctggagctgggccgggcctgcggcgcactcactgcggcgttcaccaaacgcgcggacagcccgattacctcggcggcggaatttagcattgattatcaggccgactgtatctgggaaattcacctgctgctctgctacagcgtggtgctggagatgatcacccgcctcgcgccgaacgcggaaatcggcaagatcaaaaacgatctcaagcagttgccgaatgcgctcggtcatctggtacgcacctgggaagaaaaaggccgccagcttggtgaactggccagccagtggccgatgatttataccgttgctgcgggtccgctgcgtccgctgggttacaaagaaggcattgtaacgctgatggaatttacctggacgcacggctgcgtgattgagagcggagagttccgccatggcccgctggagattgtcgaaccgggcgttccgttcctgttcctgctcggcaatgatgaaagtcgccacaccaccgaacgcgccattaactttgttaaacagcgtactgacaacgtgatcgtcatcgattacgccgaaatttcgcaagggctgcacccgtggctggcaccgttcctgatgttcgtgccaatggagtggctctgctactacctgtctatttacaaagatcacaacccggatgaacgccgctattacggtggtctggtggaatattaatccctctcccggcccggcaacgggccgaatttacgcaaggagttacccgatgaaaacaggtatgtttacctgcggccaccagcggctgcctattgaacacgcatttcgtgatgcaagcgagctgggttacgacggcatcgaaatttggggcggtcgcccgcacgcgttcgcgccggacttaaaagcgggcggcatcaaacaaatcaaggcgctggcgcagacgtatcagatgccgattatcggctatacgccagaaaccaacggctatccgtataacatgatgctgggcgatgaacatatgcgtcgcgaaagcctcgacatgatcaagctggcgatggatatggcaaaagagatgaacgcgggttatacgctgatttccgcggcccacgcgggctatctcacgccacctaatgttatctggggacggctggcagagaacctaagcgaactgtgtgagtacgcggaaaacatcggcatggatctaatcctcgaaccgttaacgccgtatgaatcgaacgtcgtgtgtaatgctaatgatgtgcttcatgcgctggcgctggtgccttcgccgcgcctgttcagcatggtcgacatttgcgcgccgtatgtccaggcggaaccggtgatgagttatttcgacaaactgggcgataaattacgtcatctgcatattgtcgacagcgacggggccagcgacacgcattacattcctggagaaggcaaaatgccgctgagggaactgatgcgcgatattatcgaccggggctatgagggttactgtacggtggagctggtgacgatgtatatgaacgagcccagactctatgcccgccaggcgctggaacgctttcgcgcgctgctgccggaggatgagagatgaaaaccctggcgacaatcggcgataactgcgtcgatatctacccgcaactgaataaagcgttttctggcggtaatgcggtcaatgtggcggtgtactgcactcgctacggcatacagccgggatgcattacctgggtgggtgacgatgactacggcacaaagctgaagcaggatctcgcccgcatgggcgtcgatatcagccatgtccatacgaaacacggcgttaccgcacaaactcaggtggaactgcacgacaatgatcgcgtttttggcgactacaccgaaggcgtgatggccgactttgccctgagtgaagaggattacgcctggctggcgcagtatgacattgtgcacgcggcaatctggggacatgcggaagacgcattcccacagctgcacgctgcgggcaaacttaccgctttcgacttctccgacaagtgggacagcccgctctggcagacactggtgccgcatctcgattttgcctttgcctccgcaccgcaagaagacgaaacgctgcgtctgaagatgaaagcgattgttgcccgtggcgcaggaacagtgattatcacgctgggtgaaaacggcagcattgcctgggatggcgcgcagttctggcgtcaggctcctgaaccggtgacggttatcgacaccatgggtgccggagattcgttcattgccggattcctttgcggctggtctgcggggatgacattaccgcaggcgatggcgcagggaacggcgtgcgcggcgaaaaccattcagtaccacggtgcctggtaggtataacgttggcgtgagcatcttcacgccaacgtgctgttacttgccggaaaacgaccctataatccgagtaattcattctttatttcagggtcgattatgtcagctacggaccgctactctcatcaactcctctacgctaccgtccgccagcgactgctggatgatatcgcgcagggggtttaccaggccgggcaacagatccctaccgaaaacgagctttgtacacaatataacgtcagccgcattaccattcgcaaagccatcagcgacttagtggcagacggcgtactgatccgctggcagggaaaaggcacctttgtacaaagccagaaagttgaaaacgccctgcttactgtcagtggttttaccgattttggcgtctcacaaggcaaggcgacgaaagagaaagtgatcgaacaggaacgggtcagcgccgcgccgttttgcgaaaagctgaacatccccggaaacagcgaagtgttccatctctgccgggtgatgtatctcgataaagagccgctgtttattgatagttcatggatcccgctgtcgcgttatcctgactttgatgagatttacgtcgaaggaagctccacctatcagttatttcaggagcgttttgacacgcgagtggtcagcgacaaaaagaccatcgatatctttgccgccacccgcccgcaggcaaaatggctgaaatgcgaactgggcgaaccgttgtttcgcatcagcaaaatcgcctttgatcagaatgacaaaccggtgcacgtctccgaactcttctgccgcgccaatcgcatcaccttaactattgataataaaagacattaaccgtaggccggataagatgcgccagcatcgcatccggcgatgctggcgcgttgaattttacatcccgtacgttcccctcaccctaaccctctccccaaaggggcgaggggaccgttcagtacggaatttagcttgacggtgctatccagcattaaatactggcaatactctcacgcaaaatccgcagcaccgtctcttcaccgctgcgattcgggttaatgcgaatcgcacaatgttctgattgtggattcgcctggcgaaacgttccggaaaggcgataaaagagcggcgggatttcatatttcgactctgcacccaccgggtaaggcaaggcaccgcgcttttgcgcctcttccagcactctggcggcaatcggctgatgaaactcgacaatcaacaccttcgactgcgcattagcaatcaccgcgcttttcacttccggcaccgcaccaccgttaagcaaagccagcaaccgttcagatacccctgcctgcaccgcgtgcatcactggcgcaaacaccagaccacgcaatacttccagcgcctgtgcgccctggatctggctaccgccggagtaaagcgtggcgcgaatacggttgataacatcagcatcgccgaccactgcaccaacaccctctggcccaaatagcttgaagcaggaaaatgtcgagacattcgcgccgcattcacagccgattcgcgccaccttcatcaccgcatagttgtcatcggttaacgctggaacacctgccgcgcgcaacgttgccagcacatctgccagcacgtagctgtcctgcggctgctggcgcgtatgctgcaccagcgccgcatccggttgttgctcgtcgacgacctgcttcagtgccgacaggtcattgaaatcaacagtaataagcgtcagccccatctgctcaataataacccgtgtcgtcgggtaaacaggcgcgtcatgcaccagaagacgctgccccggtttgagcaaagccgccagcccggcgcgaatcgcgccagtccccgcgccctgcaccagcgccgcagcctgtgcgtgaaatgcatcagccagcacctgttccacacgctgggtaacgcgcggttgattcagtcctggcgttaagcctaaatcaccgccagtaagaaactcgctgccggggaaatggcgacaaatgctatccaccagcgcaaactgcttttgctgcgcctcaataatcgtcaggctttgcagaggaaacgtcttcataggtgccttccttaagccggaacgaacaggccaagccagtaaagaacattcagcagaataccggtgatcattactgccacgaccggtgccgccattttctgtaccggacggcccagggattcgttgaggaagtaaatggcaaccgcgatagagaatccggtataacccgccatcttaattgctgcgaaaatcgaaccgaccagcagcgccacttccatcagcatattcatggcgttacggatgttatccgacgcattacgcaccgacgggtagcgtcccagccatttgccgatcgaacgaagcagcaagacttccgccgaaataaccactgcgcctaataccgctgcaaccatcggattcggcgagagatagcccaccgcataaacaaaggtaaagcccgcaactgcatacacacccgttgctaaggcggtggtggcaatcaacggtacaaaacccagcccgcgcataaattctgccagtgccgcctggttgatcagcgtttgcgattgttccggcgttacgcctgcggagtacgctttctccagagtgaagatcgacacttcactgccggcgaaaatcttcatgctggcaacggcggcaatcaatgctcccacgatggcgatatagggtaagtttttgataatccgcgacgtgcgttcttcaaacaccgaaagcccgctggcatcaatatcattttcatcacgatgacgcaggtcgtgagttatcgcgatccccagcagcatcaccatgccaataaagatttcgatggattcagggttaagatgtgggaaatagcgcacgactaccacacgggtcatcagtaccaccacggcggcgatcagactttgcttccagccaaactggtagaaaatcgccaccagcgggaacagtgcaaaagctgaaaccaccggcgagcttaattcccccaggctacctaatacatccaccggcagcgcggtcagcagctggtttactggcaacaggcaagtaaggatcaacacgccccagatagcgccaagaccaaacgccatcaggctgtttatcgccaggacgccgaggatatcggtaggaagaaagagtaaccatgcgttgagcagcccggttttcagggtaaaagagatccccaccgaggccacaaaaccaatgctcagaccaaaagcgatactccccgcctcgcgacggttcatatagccttcaatcagttgcggcaggatcgggcggatgccgtcatgaaaaacagccgccgagcgatgcgccagaagcgatgtcatacccgtcaggcacgccaccacgataatctgaatatacagatccatagtcgtgccttttatttcagatggttaatcaacatcggaatcgcgtgttcgacgtgctcaacggaaaggccaaacgccacttttccttcggcgatcattttggcgatatgctcgtctttcgctttaatgcctggtttggcaatggtgcaacttttgttatagccaatcaccgcgatggcaatcgacaatgccgcgcccgcaccggtattacacgcgccgatgtaataatccagttgcccggatttcactttcattgccgcttccatgtcgttgtgaatgaaaacttcaaaactgccaggagccgtcgcttcaatggtttttttaatctgctcacgctgtaagcctgcaacgccaatctttttcatgagtctgtccttattggaaaaattgagagggagtttcacgtaacatcacatccacatcggcctgactgaatcctgactggcgcaattgcggaataaaggtggtcaataaatagtcatagccataaccaccattggcttttaaatgggagcggcgcgtaatatccatcgacagcatgacgcggttcagcaacccacggtcacgtagcgcatgaagcatcgcaatacgcttttcgtccgggtagtaactgttcttaccaatggtgtcgaactgcacgtacgcgccgagatcgatcatcttcaaaatgttgtcgaggttgtctttcagatcgcagtgaccaacggtgacgcgcgaaagatcaaccccgtgggcttgtagcaacgccagttgctccagccccatcgtgctgaacgacgtatgcgtggagatcgggcgtccggtctggttatgcgccagcgcagcggcaataaataccttctcttccagcggcgtaatctttccttcgctggtgccgatctccgcgatgatcccggctttcagctccgtgccatcgataccctgttcaatttcatcgaccatctcctgcgccagttcctgcacgctgcgggtcgccacatgttccgggaaaaacgcgtcctggtaataaccggtacaggccaccacgttgatccccgtctcgcgcattacatcaagcataaattgcgcattgcgccccatgtaacggttggtcatctcaatcacattacgcacgccccgggtcatcaggtcgttcatctcctggcaaatgaacgcatactgatcaaggcggcagtccacgttgtttttaaagccggagagatcaatatgcagatgctcatgggcgagggtgtaacccgtcggatcaaaactcatagggtgtctcctgcaaaccggagggaggaaagaaaagagcgaccattttgtggcggtggcgcacggaaaaattcacacacggtagcccccacatcagaaagcgtggtgcgaacacctagctgagtagcagccaggccttgctgataaaccagcactggcaccacttcgcgggtatggtggctgtgaccaatggtcggatcgttaccgtgatccgccatgacgatcaggcagtcatctggctgcatcgcctcaacaagccgggcaaggttacggtcaacgacctgcaaacgttcggcataacgtgcgacgtcttctgcatgaccagcgaggtcggtttcctggatattggtgcaaataaacgccgtcggatgcgtgttaaattcgtcgagggtgatatccataatccgctggctatccaccaggttttgccagctcacgccataaggattgctgacgatatctgccaccttacccaccagcacggttggcacgcccgcctcatacagtttttgcggcacctgcactttttcatcaacaccgtagcccatatgcacgacctggaaaccgttgtcataagcgccagaacgcggcgcattaataccaataaagcgcccttctttgctttctgcggcatcgagaatacgctgactgttggttaacaggccgccaaatgtaatgacccgaccgacctgtacctgctcacgcacgatacgaccaattttgattgcgtcgtcaaaagagatcacagagagattggcggtgatgttatagacctggcctaaatccgcctcgagattatcgccaatcgcaaccgcctgattgacccacagaaattgcagatcatcgccacggcgctccacctgccaaccggcggatactaatgcctgctcaacacggtcaatcacatcgcgaaaaggcatccgcagcggcggtaacgggcgcgtgcctaaaatttcctgatgccccataaaggtatcgccaccttcatgttgcagctctgccacgccccaggttgcggagtctgacggctgcatatcgcctggcgcataacccaatgtgttgattagccccagcttctccagcgttggtagctgcaaatgcggcaactggctcaggatgtgaccacaggtattcgccccggcatcctgcgggcgcaccagcgtgacatctttcattgcccctacgccaaagctatcaatcactaacaccacaaatcgcgccattacgcccccagagagtttccaagactgtcataacgaccgacgatttccggttcgccacgatgaataccagacaccagcaccacatcactgcgggtgacaaaaatctgcgtgcgaaaacagagcactactgcactgcttaccggaaactcgcctgccagcggcagggtgtagtcgatactgctgtcatccacagttttgagattggtttcagtaatcttttgattttctggcgtaaacaccagcgcatgttgcgcgtgaccacgacggtagtaaccgccgccgtagcagtagctgtcgccacggaaaaaatgggagatttcacttaaccagagcatcgcgatacgttcaggctgatcgccctgctggtttgccggaatagtgcccgtcagcgcatgaccgggttcggcatgagtcacaccgtattgcgccagcaatggcagcgaagtgcagctggtcgctgaaggcgcgttcagttgctcaatcgcaataccagatttcgccagttgatcccgtgcttgtaccagcgtgtgaagattcggtgtcggcaaaactttcccggcagcctcatcccaaagcaggcaagggaaatgggttagtcccgccaaatgcagccccggcagtttcttaatttcagcaaccacctcgtgcagcgaatgctgtacaaaaccgctctcctgccccggataaagaaaatcatcgtcgctataaactttgagcagcacagactggattcgcccggccttcaccgccgccgcagaaacttcccgcgctttgtcgagagtaaacacggtgatgacgtcggtgccctgttcaacggcgtcagcaacctgatgacaagggatttgtaccagatgcccctgatgcgccaccggcaaaccagcgcggcgcatgactcgcgcctctttgtaatccaccgccacaatgccgctgtagcccaacgccagcagtttttccgccagccatgggttacgaccgaattgtttggtcatcagatacagttcaatgccgtaaagccgcgccgtctcaatcagccgcttaccgttttccagtatctgatccacgtcgatcacccagctgtccggggcgatttttgccctgctgccacaaacttagtgcggcggaaatcagcgccgggttctggcgtttcaatgcttctacaaacatcttgttgcctcgtttctgttccttgaattaaatattcatttttttgaatatttaggttgtgcgacgtggatttgtcaggagcttcaaacctcttcgttagcagccatccataatccataaaggttggccagcaaatagccttcttcacacgggttaacttccagtgcgaattccttcaacaacacctgatgcaattgcacaacggcttgccagtggctggattgcgccagctctgccagcaattcgttatccagcggctctatttcttcaccacggcgactgcgcatcagtgcactcgccatatgtgtcatcgccatcgttccttgctcactgcgcaccggcagatggcactctgtttccagtacgttgacgacctgcatcatgcctttgcagatgtccttatcaataacgcctgcctcgcaaagcaggttgagtctggtttccatatcagatgcctttcgtttaataactcggttcctgttccccactcactacccgttgttgatgggcgagcagggcgtgtttatctacaacggcacgcagcagttgttgcattgggtaatcatcgactcgcgtcaggaccacggcttcggtggcctgtaaaaatcgcggatcgtctgtgagcggcgtcgcctctaatcccagcatggtcagttcgttttccgccaccacgttccagatcaccgcatcgacatcgcctttaacaatgcgttgtaaactctcgtgataagagagatcgactcgttccacatcactaccgccaaaaaaaacatcggtcatgattttctgatccgccgaacggttatccagccccacgcgcttcacgtttgcggactcgcctttacggcaaatcaactggtgctcgccaacgtaggtgtgcggccccaactccagcgcgaggcataaccctttttgcgtgagataactttccgccgccagtcgggaaaccaccgccatgtcatacacgccgttaagtaaacactccacgcgaatatccgcgccgcgcatatgcgcatagtaaaaaggaatgccatcaaactgagctttcagcccgctcgctaaaccttcgtacaagcgggtatagggcaaaggcatcgcacataccacgttgttgatatccacatgactcagcaatgctttgttatccatctcgaccagataactgccattgcgcccacggcgttcaatccgtatcgctccgcttgattccagcgttttcaacgcggcctgcgtcaggccaaccgatgaacggcattcagttgccagctcatctatggttttcaacctattaccgcatttttcacccaacaaataacgggccagcgtcgtgataacgacgccttcttttttgataaacgttcgacgcataatatattttcaataaaatgaatgtttatatcttcattaaaatgaagataagtggcaactgtgagatgtggaaacggcgaggcgcttcacattttttcggattattgcaaatgaggataaaaaaaccgggtttccccggtttcagagtgatgacgaagtgatttattcgacaatgcgagcaaagggtaattcccactggcgcttgcctgctcccctcaccctaaccctctccccaaaggggcgaggggaccgtccgagcgttttgatattacggcttcgccacaaaaccaatcgcttcgtacaccgctttcagcgtacgggaagcgtgtacactggctttttctgcgccgtctttcatcacctgttgcaggaaggcttcatcgttgcggaaacgatgatagcgttcctgcaattcagtcagcataccggaaacggcatcagccacttcacctttcagatgaccatacatcttgccttcgaactgtttttccagttctgggatgctctggcccgttaccgcagaaaggatatccagcaggttggaaacgcccgctttgttctgcacatcgtagcgaactaccggcggctcgtcggagtcagtgaccgcgcgtttgattttcttcactaccgatttcggatcttccagcaggccgataacgttattgcggttatcgtcagacttggacatcttcttggtcggctccagcagcgacattacgcgcgcgccagatttcggaataaacggctccggcaccttaaagatctcgccatacagcgcgttgaaacgctgggcgatatcgcgactcagttccaggtgctgtttctggtcttcacccaccggtaccagattagtttgatacagcaggatgtccgcagccatcagcaccggatagtcaaacagaccagcgttgatgttctcggcataacgcgcagatttatctttaaactgggtcatgcggctcagttcgccgaagtaggtatagcagttcagtgcccagcctaactgcgcatgttctggtacgtgggactgaacaaaaatggtgcttttctcaggatcgataccacaagccagatacaaggccagcgtatccagcgtcgctttacgcagcttctgtgcatcctggcgcacggtgatcgcgtgttggtcaacgatacagtaaatgcaatggtagtcatcctgcatgtttacccactgacgcagcgcacccatgtagttaccaatggtcaattcacctgagggctgtgcgccactaaaaacgatgggcttagtcatttttcgattcctgattttcgctatgcggaagccctaatgcgggcagaaggtcatttatagactgataaattacatcaggctggctgagatcgatagcctcgccgtagttatatccgtaggttaagccaactgatgggcaacctgccgcttttgccgcctgaatatcattgcgtgagtcgccgacaaacagcatctcttgtggggcaattcccatccgctcagccaccagtaacagcgggtccggatgcggtttttgttttgcacatcatcgccgccgataaccacgctaaagtatttggcaatatctaaggcttcgagcagcggcgcgacgaacggcgtcggtttgttggtgaccaggcctagcggcaggcctttagcctgcaacgcgcccaacgtatcggcaacgtgcgggaacaaaaacgtcccctcttcggcaacctcgctatagtagcgatcgaacagtttacgcagaatacgtacctgttcttctgccggaatgtcgtcatcaacgggcggtttacccattgttttacgcagagtcgcacgttcctgacgcgcccaggccaatgcacgctccatcagaacatctgcgccgttaccaatccaggtaataacgcgttcttcacctgcgacgggtaactccaacgcatacagcgccatatctaccgcagcagcaagaccgggagcactgtccaccagcgtaccgtcgagatcaaaagcgacgccgcgaatatcttcaaacttactcatgacttacctttgccagttcactgcgcatttcatcaatgacttttttatagtctggctggtcgaagattgccgaaccggcgacgaacatatccgcgcccgccgcagcgatttcgccaatgttgttcaccttcacgccaccgtccacttccagacgaatgtcaaagccagactcgtcgatacggcgacgtacttcgcgcagtttatccagtgtttgaggaatgaaagactgaccgccgaaaccaggattgacggacatcagcaggatcacatccagcttatccatcacgtaatccagatagctcagaggtgtcgccgggttaaataccagacccgctttacagccattttctttaatcagttgcagcgtgcggtcaacatgctcggaggcttctggatgaaaggtaatgatgctggcaccagcggcagcgaaatcaggcacaatgcgatcgacgggtttcaccatcagatgtacgtcgataggggcggtaatgccatagttacgcaaggatttcagcaccattggcccaatcgtcagattgggaacatagtggttatccatgacgtcaaaatgcacgacatcagcgccagctgccagggcttttgcggtatcttcacccaggcgggcaaaatcagccgacagaattgagggggcaatcaaatactgtttcatccgcttctccttgagaattattttttcgcgggtgaaacgactcctggtttgtacaaagccagcagttcgtccacctttttacgtgtgccgccgttgctgcttatactgcgtcgaactttgacgacatgcaattttgcgcgctgataccactcacgcgttaacatcgtatcgtgattggagatcagcactggaatatggcgctcaaccagaccttcggcgatctccgccagatgcgcttgttgttcaagcgtaaaactgtttgtgtgatacgccgtaaagttggcggtcgcagacagcggtgcataaggcggatcgcaatagacgacggatgcatcatctgcgcgcgccatgctatcggcgtaagactcacaatagaaaaaggcattctgcgctttttcagcgaagtgatacaactctgcttccgggaaatagggttttttgtagcggccaaacggcacattaaactcaccgcgcagattgtaacgacacaggccgttgtaaccgtagcggttcaaatataaaaacagtaccgcccgacggaacggatcctggcttttgttgaactcttcgcggaactgatagtaaacctcggcgcaatttgtttcgggaacaaacagctcgcgtgcggcctgtacgtactcatcagtacgcatcttcacaatgttatagagactgatcaggtcgctattgatatcggcaaggatataacgagaaaagtcggtgttgagaaacaccgacccggcacctacaaaaggctcaaccagacattcgcccttgggcaaatgccgtttaatatcatcaagcaggggatacttgccccctgcccacttcaaaaaagcgcgatttttcttcatgctgactaactaattacaccttctccggctgtggagaaagctccgacagcatccagcgcttcaggcaactcccgcaacgataaaccattgcgggagataaccttgattacttcagatcggcctgtacctgacgcagcggtttcgcccacgggtttttggcctggacatctgctggcaatgtagataccgcttttttcgcctcttctttcgaagcgtacacgccagaaaccaggacataccacggctgaccattacgcgtcgtttcatagacaacgtagtttttcagattctctttcttcgcccaaccgttcaggttgtcgtagttagaggaactgctcagctgcagagtgtaatggctggacggtgccgatttcaacgaaccaacattacctgcggtcttccctccagcggctggtgttgccgtggtttgcgccggggatgccgtctgtactggagccgtagtcgccgtctcttttggtgctggcgtagaagtcgcagccggtgccttcgtgctcgccacaggggcagctggttcagtacgcttcggcgtctgtgctaccggcttcggctccgttttcacggttgcttgcggttttttcggttcaatcactgcctgctggcgagctggacgcgtagtggccggacgttcagcggtttgcgttttcgccgtgtcacgcgatgcattgccattgcgaacaggcgcgacagtcgcgggttcggtcggcaatgtggaattgaccgccacattgttcaactgttgctgattttgtggctgggtcagcgcattgttcaggtcaccctgcacttcaacacgttgttgaccatccgttgccgccggggtttgcccttgagtcggcgtagaagagatcggtggcagagaaacatcctgctgagtattttccgcagacgtggttcccggcgctggctgcacgccattcgcctgatcggtcgcattgcctgcaagatcaatactcttctcgccagacgcggtttgatcgctggaagaggttgagggggcttttagcgcagaaccaataccgatgatcaacagcagtagaaccagaatgccgacacccatcatcatatactgacgagaagcgggtttactggctgcttttttgcgcttacgcggacgacgctctacgcgctcttcatccacggtttcatcttcggattcgtcaatttctgcttcgatttccggttcctcattacgctctttttgcgcacgagtcggacggcgatcgtcagtgtcatcaagttcaatatcatcaaaattgatctgcggttcgccacgttcagtacgctcagaacgttcagaagattgacgagaacgaccagtacgacgatcgctgggatcgggtttcagctcgtcttctggtttgaattcatccatttaacaccccactaaaaggttaatgcttaccacgttgcaattaacctgaagctaatagaccgcttgataagcggcctgacctttcttgttgttacgctgattgacaatcggcaatggcgttaagaacaagctcgtgcgaaacgccgctgcgaacttcactcttaccaattgccaacggaagaattaagcgtatctctcccgcaaggactttcttgtcacgcagcatatgcggtaaatacgcctgcgcggacatttcgcgcggcccattgaccggtaacccagcccgcttgagcagggttataatacgctgcgtttcggcagaactaaactgcccgagacgttccgacgtccgcgccgccatcaccatacccgcagcgaccgcttcaccatgtaaccaattgccataccccatttcagcttcaatggcatgaccaaaggtgtgtcccagattcagtaaagcacgtaacccggtttcgcgctcgtcggcggcgacaacttctgccttcagttcacaacaacggcgaatacagtacgccattgccggaccgtccagacgcaacaacgcatccagattctcttccagccagttaaaaaacgcaccgtcaagaataatgccgtatttgatgacttctgccagccccgacgctaactcacgcgggggaagcgttttcagacagtcgagatccaccaccactgaagcaggctggtagaacgcgccaatcatgtttttaccgaggggatggttgaccgcagttttgccgccaacggaggaatcgacctgcgacagtaacgtcgtcgggacttgaatgaaacgaacaccgcgctgataactcgccgccgcgaagccggtcagatcgcccactacgccgccgccaagcgccaccagcgtagtatcgcgaccatgcggcttttgtaacaacgccgtaaagacggtatcgagtacagccaggcttttatactgctcgccgtcagggaggataacgctatcgacgttaacacccgcctgttcaagtacgccgcggaccttatcgagatacagaggagccagggtttcgttggtgaccaacatgacctgctcgcccgatttcagcggtaagaatgaagctggttcattaaacaaaccagatgcgatggtaattgggtaactacgttccccgagagtaacgacaatcctctccataacgcgacatccaccttaattactgtacccgcagacgagtgtatataaagccagaattagttgctttccagcatgtgaataatctggtttgcaaccactttagcgctttgatcatcagtacgaatggtcacgtcggcaatctcttcatacagcggattgcgttcattggccaacgcttccagaacttcacgcggcggtgtttcaacgtgcagcaacgggcgttttttatcacgctgcgtgcgtgcaagttgcttttcgatggtcgtttcaagataaacgacaacgccacgagcggaaagacggttacgcgtttcacgggatttcacagagccgccgccagtagccagcacaataccctgtttctcggtcaactcattgatgaccttttcttcgcgatcgcggaagccttcttcgccttctaaatcgaaaacccagcccacatcagctccggttcgtttctcaatctcttgatcggaatcgtaaaattccatattgagttgttgagctaactggcgcccaatagtgctttttccggcacccataggcccaaccagaaagatattgcgtttctctgccattttttcggtactactaagactattcgttaatgataaacccgcttcgctcagagagcgccgcaggacatgaactgaaacctcataagatattgcgagagtcagactgaaaattatctcaatactccagcgggtttggcaactgaataaatcacccatccctctgcatatctggtcgctgcaagcgcgctgccttgctaccaccgctctggcgataaatcaccgggtaagattagcgtaaaaaagacagcaaaatgccgcctgaatgataaatcatcatcatggaacgcaggcagcgaagagcaccaactctcaaatcggtactccttgtatgctaaatacctgcgcgcgtcaaatagatgaaacacgttcagcgtaaaaacattaccgcttttacggctgtttactcactggaaaccagtcgtggcgtgataaacaccactaactcgcgtcgttcatcttcttttccgtcatgacgaaataattgcccgaaccagggaatgtcgccaagcaacggcacgctatcctgacccgatttatttttacgggtaaaaatgccgcccagcgccaacgtttctccgcttttgacctcgacctgcgtttcgatctcctgcttatcaatcgccagcacttcgccatcggcctgctgtagcacctgccccggaacgttctggctgatgtgtaatttcagccggatgcgacctttttgtaacaccgtgggcgtgacctccatccccaggacggcctctttaaattccaccgacgtcgcgccactttccccgctggaaacctgatatggaatttcgctcccctgtttaatactggcaggctgaagatgtgaggccagcagacgcggactggcgataatatccagctgctgtttttgttcgagcgcggaaagctcaagatccagcaaacgtccgttgatgcgcccaatgttaaaaccgacatgcgttgtcgccgtcgctacggagaggtcgctaccaagcgtggtgacttgcccaacaccaccagcgtgttgcgcatcggccagcgtccatttcacgcctaactcacgcaaacttttttcattaatggtgacaatatgcgccgacagctcaacctgcccgaccggaagatccatttgcgctacccactgttcaagcgcgcttaacgccgttttgttatctcgtagcaaaaggcgattggtgcgtttatcgacggtcatactccctttggcactcagtagcttctcccccgctttcgccagttctcccgcgtcggcgtattgcagggttatactgcgattttccagcggcagatttgcctgcgcccgcgcctgctccgcctcctggcgggcgatattgtcattctgccaggcaatagaatgcactgagagaatgttgccctcctggcgcgttatcagcccggcgcttttcactacagtttgtagtgcctgcttccagggaacatctgttagatgtaacgacaccgtaccgctgacgtctggcgacacgaccaggttcaacttctcctgttcagccagcgcctgcaacacctgagccaccggaacgtcatccaccatcagcgtcactttttgcggctttgccgcctgtacgccgggtatcagcatcaacagtagtgcggctatccattgcttcatttgtatctccttgccgttgccacaaccattgtggcggttcgcagtttgtcccggtacccagcgttagtacgtctggcgtcagctgtaaaattgtccagccgttttccagcacatcgttttgctgcacccgtcgccatttcttttgcccgtcttttattacaccgatgatgcgctcgcctcgccctaccatcccctgatagcgccactggctaagttcgctaatccggcatagatcttccggcggtttaaaagggtcacgcataccggttaaaaggcacaatgcaatacctgccaacaaccagcgtttaaccctcatgcggcgtctccagttgtagcgtgaacaaaagatcatcaccttccacgcttaacgaaaaacggctcacgctgacgttgcgctctgccagccgtgtaaatgccgacggcactgcttcccacagcgttttcaacgccaactcgcctccctgcgcggatggatgccaggaaaccagttgcgcgccggataactgaaaatccagtggcgaaaagggcagcgttttttcctcgctgaagggagtggtgtctaccaggcgatacagtgcggcccactgctggtgatgacttgcccgtagtcgaattaatgcgtcgcgctcttcatggtgtgtcgatgatagaaaaatgagcgtaactaacatcagcaaccagaatgcccagcaaagctggcggaggcggggtgatgtggcgaaccaccagtcaaagaacatgttcatcgctaaccttccttgttaactgatactcaaattgccagcgtccctgcgcatcctgctgcgtggctcccgctgattgagatgaaaagacgcatcctggcggagtgacgtttctagtgcgtttaacgcggtaatgcttgttgtcagccccttgatctccagcgttccctgctgccagcttatcgttgtcagccaggcgtgctcgggtaaaagcgccgccagtgcttccagcgcagattgccagtcgcgggtaaattgtcgctggcgctgccgttgcgaacgctgttcgcgtaactgctgttgctccagcaaacgtggcttcgttatctgtaagctgcgggcgagttgttgttccgcctgaagcaaaactgcgtctatgcgcgcttcggcgctgcctgtcagacgcagtattagcgttatcccgacggccagcagcagaggcgcaacgaacatcagcaaccagaaacgcagaaaagcggtccggcgttgctgtcgccagggcaaaaaattaattggcgggttcatcagtacgccttcccaagcgccagccccagcgcgatggcaaagtctccacctggcggcggtagcggcggctgacgaacagaaacggcctcccagggatcaaatcccccttcgccacatatcgcgacgctttcgggatcaacggataacgctgccgccagctccttcgcgctagtcatccccaccgccagtttgcgcccccagcgacagcgtgtcgcccacagccactgttcgttatcacgccaggccagacattgctgatgagaaggtaaaaaaggcaggaattgctgtaatgcactggcatccggggtgatcgcgctcacatgaacacgcaacctttctgccagagtaagtagcgttgccagctctttgctttgcgcggcagtcacgttataggcggggctgagtgagtcttcgctgtaatcgaagcgcagggagtccggatccatatccagctcgcgggccatcgtccctgacagccaggccgtttgctcccgctcaccaagggacatcgacgggcgcggaaatgaccgctgtaatgtgcgactggcgggaaacgccaacataatgtgatgacgctgcggcagttcgcgactccacggtaacaacgttttagccagctgctgcgcatcaacaatccgcccatctttgataatgtcgttctccagcggcaaccgccaccagcgttgcaaaaagcattcttttgctccccgcacgatcgcaaccgctaccgcttcttgctgttgtaaatgcaaaccaatttgccagatcttaaatgccattgtgatgatctccttatcacccgtcactctgacgggtatatcaatgcgtctggcttgcctttatactaccgcgcgtttgtttataaactgcccaaatgaaactaaatgggaaatttccagtgaagttcgtaaagtattttttgatccttgcagtctgttgcattctgctgggagcaggctcgatttatggcctataccgctacatcgagccacaactgccggatgtggcgacattaaaagatgttcgcctgcaaattccgatgcagatttacagcgccgatggcgagctgattgctcaatacggtgagaaacgtcgtattccggttacgttggatcaaatcccaccggagatggtgaaagcctttatcgcgacggaagacagccgcttctacgagcatcacggcgttgacccggtggggatcttccgtgcggcaagtgtggcgctgttctccggccacgcgtcacaaggggcgagtaccattacccagcagctggcgagaaatttcttcctcagtccagaacgcacgctgatgcgtaagattaaggaagtcttcctcgcgattcgcattgaacagttgctgacgaaagacgagatcctcgagctttatctgaacaagatttacctcggttaccgcgcctatggtgtcggtgctgcggcacaagtctatttcggtaaaacggtcgaccaactgacgctgaacgaaatggctgtgatcgccgggctgccgaaagcgccttccacctttaatccgctctactcaatggatcgtgccgtcgcgcggcgtaacgtcgtactgtcgcggatgctggatgaagggtatatcacccaacaacagttcgatcagacacgcactgaggcgattaacgctaactatcacgcgccggagattgctttctctgcgccgtacctgagcgaaatggtgcgccaggagatgtataaccgttatggcgaaagtgcctatgaagacggttatcgcatttacaccaccatcacccgcaaagtgcagcaggccgcacagcaggcggtacgtaataacgtgctggactacgacatgcgccacggctatcgcggcccggcaaatgtgctgtggaaagtgggcgagtcggcgtgggataacaacaagattaccgatacgctgaaggcgctgccaacctatggtccgctgctgcctgccgcagtcaccagcgccaatcctcagcaagcgacggcgatgctggcggacgggtcgaccgtcgcattgagtatggaaggcgttcgctgggcgcgtccttaccgttcggatactcagcaaggaccgacgccgcgtaaagtgaccgatgttctgcaaacgggtcagcaaatctgggttcgtcaggttggcgatgcatggtggctggcacaaagtgccggaagtgaactcggcgctggtgtcgatcaatccgcaaaacggtgccgttatggcgctggtcggtggctttgatttcaatcagagcaagtttaaccgcgccacccaggcactgcgtcaggtgggttccaacatcaaaccgttcctctacaccgcggcgatggataaaggtctgacgctggcaagtatgttgaacgatgtgccaatttctcgctgggatgcaggtgccggttctgactggcagccgaagaactcaccaccgcagtatgctggtccaattcgcttacgtcaggggctgggtcagtcgaaaaacgtggtgatggtacgcgcaatgcgggcgatgggcgtcgactacgctgcagaatatctgcaacgcttcggcttcccggcgcaaaacattgtccacaccgaatcgctggcgctgggttcagcgtccttcaccccaatgcaggtggcgcgcggctacgcggtcatggcgaacggtggcttcctggtggacccgtggtttatcagcaaaattgaaaacgatcagggcggcgtgattttcgaagcgaaaccgaaagtagcctgcccggaatgcgatattccagtgatttacggtgatacgcagaaatcgaacgtgctggaaaataacgatgttgaagatgtcgctatctcccgcgagcagcagaatgtttctgtaccaatgccgcagctggagcaggcaaatcaggcgttagtggcgaagactggcgcgcaggagtacgcaccgcacgtcatcaacactccgctggcattcctgattaagagtgctttgaacaccaatatctttggtgagccaggctggcagggtaccggctggcgtgcaggtcgtgatttgcagcgtcgcgatatcggcgggaaaaccggtaccactaacagttcgaaagatgcgtggttctcgggttacggtccgggcgttgtgacctcggtctggattggctttgatgatcaccgtcgtaatctcggtcatacaacggcttccggagcgattaaagatcagatatcaggttacgaaggcggtgccaagagcgcccagcctgcatgggacgcttatatgaaagccgttcttgaaggtgtgccggagcagccgctgacgccgccgccaggtattgtgacggtgaaaatcgatcgcagcaccgggcagttagctaatggtggcaacagccgcgaagagtatttcatcgaaggtacgcagccgacacaacaagcggtgcacgaggtgggtacgaccattatcgataatggcgaagcacaggaattgttctgattaaaaaggcgcttcggcgcctttttcagtttgctgacaaagtgcactttgtttataccggatacggcgtgaacactttacccgtctagcaacatctagaaaaatcaatatattgcagaaacttcgtaagcctgataagcattatgcatcaggcgaactttacgcatttacactcgcccctgccctttcaaccattcacgcacgaggaacagcgcgctgacattacgcgcttcgttgaagtcagggtcttccagcaaatccatcatatgcgccagcggccagcgcacctgtggtagcggctctggctcatcgccttccagcgattccgggtagagatcttgcgctaccacgatattcattttgctggaaaataagacggtgccatgctgagcttcttcaaaaaagtcagatcgttcgcaccaaatccaacctcttcttttagctcgcggttagcggcttcgtagacgctttcacccggatcaattaaacctttcgaaaaacctaattcgtaggattcagttcccactgcgtattcgcggatcaggatcaggtgatcgtccacaatcggcacaatcatcactgcttcccggttggttggacgcattcgttcataaacacgccgcacgccattgctgaactccagatccacgctctcgacggtaaacagtcgggaacgggctacagtttcaacattcagaatggtgggtttttgtaatgatttgctcatcgtgggatctatgctgtgaaatcagcggttattgtgcgatatcggacacgctttcggcaatgtgaattgcatgttatttacatttatgtaacttaataaataatcgtcctcaaatcaaattaaaagtcaataggttgaaataactccaggaatttgctgatattccgccttcagagggtttgctatgatcagcggttactgtgatgtgcttaatgatgctcaagttaaactccacgcttgccgatagccaaccgcagaatcatgtattgtgtctggtgcgactgaccacgcctgacagactaagtaagatggggaaagcatgagcaccattgtgatttttttagctgctttgctggcctgctcactacttgcgggatggctgataaaagtgcgatccagacggcgtcagctgccctggaccaacgccttcgcggatgcgcaaacgcgtaaactcacacctgaagaacgtagcgccgttgaaaattatcttgagagcctgacgcaggtattacaggtgcctggcccaacgggagctagcgcggcaccgatctctctggcgctgaatgccgaaagcaacaacgtcatgatgctgacacacgctatcacgcgttacggcatctctaccgacgatccgaataaatggcgttactacctcgattcggtagaagtccacctgccccctttctgggaacaatacatcaacgatgagaataccgttgaactgatttataccgattcgctgccgctggttatttcactcaacggtcatacgctgcaggagtacatgcaggaaacgcgcggctatgccttgcaacctgttccgtccacgcaggcgttgattcgcggggaagagagtgagcaaatcgagctactcaatattcgcaaagaaacgcatgaagaatatgcgctgagtcgtccgcgcgggctgcgtgaagcgttgctgatcgtcgcctccttcctgatgttctttttctgcctgattaccccggatgtatttgttccgtggctggcaggcggcgcattactgctgctgggcgcaggtctgtgggggctattcgcgcccccggcaaaatcctccctgcgagaaattcattgtctgcgcggtacaccccgtcgttggggattgtttggcgaaaacgatcaggaacagatcaacaatatttcactcggtattatcgacctggtctatcccgcacactggcagccatacattgctcaggatctcggtcaacaaaccgatattgatatctatctcgaccgccacgtagtgcgtcaggggcgatatctttcgctgcatgatgaagtaaaaaactttccgttacagcactggctgcgcagtacgattatcgctgcgggctcgctgctggtgctgtttatgctgttattctggatcccgctggatatgccgctgaaattcactctctcatggatgaaaggcgcgcagaccattgaagccaccagcgtaaaacaactggctgacgctggcgtgcgggtaggcgatacattgcgtattagcggtacgggaatgtgtaatattcgcacttccggaacctggagcgcgaaaaccaattcaccttttttaccgtttgactgctcgcagatcatctggaatgacgcccgctcattaccattaccagaatctgaactggtcaacaaagcgacggcattgactgaagcagttaatcgccagctgcaccctaaaccggaagatgaatctcgcgtcagtgcctcattacgttcagcgattcaaaaatccggcatggtattgcttgatgattttggcgacattgtactgaagacagcggatttatgttctgccaaagatgactgtgtgcgactgaaaaatgcgctggtcaatctcggcaacagtaaagactgggacgcgctggtaaaacgcgccaacgccgggaagctcgatggcgtgaatgtgttattacgcccggtgagtgcagaatcgctggataacctggtggcaacctccgccgcgccgtttatcacgcatgaaacggcgcgagcggcacaatcactaaacagtccggcccccggcggattcctgattgtcagcgacgaaggcagcgattttgttgatcagccctggccttcggcatcactttacgactacccgccgcaagaacagtggaacgctttccagaaactggcacaaatgctgatgcatacgccgtttaacgccgaaggtatcgtcacaaaaatcttcactgacgccaatggtacgcagcatattggccttcatccgatcccggatcgttccggcctgtggcgctatctcagcaccacattgctgctactgacgatgctgggtagcgccatttacaatggcgtacaggcctggcgtcgttaccagcgtcatcgcactcgcatgatggagattcaggcctattatgaaagctgcctgaacccgcaactgatcaccccttcagaaagccttatcgaataacacgtttgcgcggcaggttatgctaccctgtcgcgcaaattgcttcactctggagatttccctcatgcatatcaacattgcctggcaggacgtagataccgttctgctggatatggacggcacgttgctcgacctcgccttcgataactatttctggcaaaagctggtgcctgaaacatggggcgcgaaaaacggggttacgccacaggaagcgatggaatatatgcgccagcaatatcacgacgtacagcatacgctaaactggtactgtcttgattactggagtgagcaactgggtctggatatctgtgcgatgaccaccgagatgggaccgcgtgccgtactgcgtgaagataccattccgtttcttgaggcactgaaagccagcggtaagcagcgaattttgctcaccaatgcgcatccgcacaacctggcggtaaaacttgagcataccggtctggacgcacaccttgatttattactttccacccacacatttggttatccgaaagaggatcagcggttatggcatgcggtggccgaagctacgggtctgaaagctgaaagaacgctgtttattgatgacagcgaagcgattctcgatgctgccgcgcaatttggtattcgttactgcctcggcgtgactaatcctgattccgggattgccgagaaacagtatcaacgccatccgtcactgaatgactaccgccgcctgatcccctcgctaatgtgaaggagacgccatgaaagaaaaacctgctgttgaggttcgactggataaatggctatgggctgcccgtttttataaaacccgcgcgctggcccgtgaaatgattgaaggcggtaaggtgcattacaacgggcagcgcagcaagccgagcaaaatcgtcgagctgaatgccacgctcactctgcgccagggaaatgacgaacgcacggtgattgtaaaggcgattactgaacagcgtcgccccgccagcgaggcagccttgctgtatgaagagactgcggaaagtgtagagaaacgcgaaaaaatggcgctggcacgtaaacttaatgccttaaccatgccgcacccggaccgacgcccggacaaaaaagagcgccgcgacctgttacgatttaaacacggcgacagtgaataactgtcacctgcaagagagatgattatgccgcaacatgaccaattacatcgctatctgtttgaaaactttgccgtgcgcggcgaactggtaaccgtttcggaaaccctgcaacagatccttgagaatcacgattatccgcagcccgttaaaaacgtgctggcagaactgctggttgcgaccagcctgttaaccgctacgctgaagtttgatggtgatatcaccgtacagctgcaaggcgacggtccgatgaatctggcggttattaacggtaacaataaccagcaaatgcgcggtgtggcgcgcgtgcagggcgaaattccagaaaatgccgacctgaaaacgctggtcggcaatggttacgtggtgatcaccattaccccgagcgaaggcgaacgctatcagggcgtggttggtctggaaggtgataccctggcggcctgcctggaagattactttatgcgttctgaacagctgccgacgcgcctgtttattcgcaccggcgacgtagacggcaaaccggctgcaggcggtatgttgttgcaggtaatgcctgcgcaaaatgcccagcaggacgactttgaccacctggcgacgctaaccgaaaccatcaaaaccgaagaactgctgaccttaccggcaaacgaagtgttgtggcgtttgtatcacgaagaagaggtgacggtttacgatccgcaggatgtggagttcaaatgcacctgctcgcgtgaacgttgcgccgacgcgctgaaaacgctgcctgatgaagaagtcgatagcatcctggcggaagatggcgaaattgacatgcattgtgattactgcggtaaccactatctgttcaatgcgatggatattgctgaaatccgcaacaacgcgtctccggcagatccgcaagttcattaatgagtatgtccggcagagagggctctgccggattttacgacgtaatggcctgatgtgctgcgcttaccaggcctatgaaataaatcgcaaattattgttggtcagatacagcgtcgtatccgataaaagcgttgtcacttacttaagtttatttccagcgtttcaccatctaccgtcagatcgcgccacgctttaggcttcgtccccagttttccatccttcgcagctgtgagtaatttttctttcgttatttcgttcggaagtaaactcatatcaagcgcgtcccattcttttctgtctgagtcaaagccatagacaatgactctgtcatcattaaaagcaaacaggatccgctccgcctgaccatcactattcagatcttgctcgaccaggacgcaggcgtctttttcaatacaggtcatcacgttatagcgatcctggattaaggccgaccagaatgtcgcatccggtttaacagaaccaggggcaattaacacattatcggctaatactttttccgatacctgttgctgaagatgttgctctccatctaacgccatcagcagatcccgcgcgcgtttcgggtctttcataaacccggcatcgcttttcagcgactcaagcgcagcacgtccatagcgaccgctctgctcgagcatgtagatagttacctggtctgacgtgtttttgccgctctgataacgcgccatatggctgttcacgctaatgcgcatactgtccagcaccggcgaattaagaagcaccagtatcaccaacaccaataacgaaaccgcaaggttcactttgccctgaagaacaacgggattttgccctttacgccagacgatgctgacaaaataccccagcgaccacaccagtaacaccagcaccgccagcacgccctgcaagcggtcgacagtccagccgtactgagcgacccgcagccataacgcccaggcggcgacgaacacatacagcggagcaaccagcaaagcggttttaatcaggcaacgcaacggccctgtccagggaagtgacgctttttgcggatcgcggacaatagccattaagatcaattgcaaaaaggccagcgttaacagcaacccggcggcggagatgtggcgagaaatcgcgctcaggcccgtaaacggcagagtgatgataaacatcagggttagcaatgatactaacggcagcaaccccgtggcgattaacgtgaacaacttttgaatagagtcgattaaacgtgactgtgttcgcgcgaggatcaccgccagcgcggtaaccagacctaacgtgagataaataaaccagtcggttgcaaaaaagagcgtattgaaaaacgtgatgccaacaagtttaaacaactcactccacagtaaaagcaccagccacgtcaagccattggcgagaaaaatcaccagtaatataagtacgttatgccatactgactggtaaaaatagcgatagcggctactgtcattgcggatgcgaaggctttgttgtatccacggtagcaacaacattgccatcaacagcagatagcagccaaaatcccaaatcgccttttcagctctccaggggttcatgccatcagtttgccacttcaaccagcagctcatccccagcgtggcaataaacaccagcgccagccatccccaaaggcgcttctgtttaaaagagatcacggagaagagtaaaacggatgaaaacgcaacggtcgcaggcacgccataaacaatccaactgtgattttttccggcaagccaggcgatcaacaggtagcaaaccagcccctgaagtaatccggtagcaatcatcccccagcgtgttgccggtgaaagttcaacgttatccatgttggttatccagaatcaaaaggtgggttaattatcgcatccgggcagtagtattttgcttttttcagaaaataatcaaaaaaagttagcgtggtgaatcgatactttaccgattgaatttgcatcaatttcattaaggaatgcgattccactcacaatattcccgccatataaaccaagatttaaccttttgagaacattttccacacctaaaatgctatttctgcgataatagcaaccgtttcgtgacaggaatcacggagttttttgtcaaatatgaatttctccagatacgtaaatctatgagccttgtcgcggttaacacccccaaaaagactttactattcaggcaatacatattggctaaggagcagtgaaatgcgcgttaacaatggtttgaccccgcaagaactcgaggcttatggtatcagtgacgtacatgatatcgtttacaacccaagctacgacctgctgtatcaggaagagctcgatccgagcctgacaggttatgagcgcggggtgttaactaatctgggtgccgttgccgtcgataccgggatcttcaccggtcgttcaccaaaagataagtatatcgtccgtgacgataccactcgcgatactttctggtgggcagacaaaggcaaaggtaaaaacgacaacaaacctctctctccggaaacctggcagcatctgaaaggcctggtgaccaggcagctttccggcaaacgtctgttcgttgtcgacgctttctgtggtgcgaacccggatactcgtctttccgtccgtttcatcaccgaagtggcctggcaggcgcattttgtcaaaaacatgtttattcgcccgagcgatgaagagctggcaggtttcaaaccagactttatcgttatgaacggcgcgaagtgcactaacccgcagtggaaagaacagggtctgaactccgaaaacttcgtggcgtttaacctgaccgagcgcatgcagctgattggcggcacctggtacggcggcgaaatgaagaaagggatgttctcgatgatgaactacctgctgccgctgaaaggtatcgcttctatgcactgctccgccaacgttggtgagaaaggcgatgttgcggtgttcttcggcctttccggcaccggtaaaaccaccctttccaccgacccgaaacgtcgcctgattggtgatgacgagcacggctgggacgatgacggcgtgtttaacttcgaaggcggctgctacgcaaaaactatcaagctgtcgaaagaagcggaacctgaaatctacaacgctatccgtcgcgatgcgctgctggaaaacgtcaccgtgcgtgaagatggcactatcgactttgatgatggttcaaaaaccgagaacacccgcgtttcttatccgatctatcacatcgataacattgttaagccggtttccaaagcgggccacgcgactaaggttatcttcctgactgctgatgctttcggcgtgttgccgccggtttctcgcctgactgccgatcaaacccagtatcacttcctctctggcttcaccgccaaactggccggtactgagcgtggcatcaccgaaccgacgccaaccttctccgcttgcttcggcgcggcgttcctgtcgctgcacccgactcagtacgcagaagtgctggtgaaacgtatgcaggcggcgggcgcgcaggcttatctggttaacactggctggaacggcactggcaaacgtatctcgattaaagatacccgcgccattatcgacgccatcctcaacggttcgctggataacgcagaaactttcactctgccgatgtttaacctggcgatcccaaccgaactgccgggcgtagacacgaagatcctcgatccgcgtaacacctacgcttccccggaacagtggcaggaaaaagccgaaaccctggcgaaactgtttatcgacaacttcgataaatacactgacaccccagcgggtgctgcgctggtagcggcaggtccgaagctgtaatcagctgatatctcattgaccccttatccaaacggataaggggtttttttatatctgattagctatcaatatgtacacggtacacttataataatcaatagaccgcaggatgcattatgttcacctttattgaactacaaggatttagcaaacgccgccagttattgttacctgatgatgagttccgggcttttcaggaactactcattcaagatcccactgccggtgacattatcgcaggcacaggtagttttagaaaaattcgctggaaccgttctggaatggggaaacggggtggcattcggataatttattacaacgtaacacgcaatggccgaatttatctggcgttgatttatcctaaaaatgaacaggatgatttaacagaagaacaaagaaaggcattgaaactattgtcagagaagctgctttaatgttgaagctccacaaattccaccatggtcgaaatgccaacggagacattgaaaacagatgaaagatgaattatttgctgatcttcttgccagcgcagaagaaatggtacgcatcgaaaagggtgaagaaacgcctgaaccagagcacgtccatacttttagcgagatcgatgtaaaagcgatccgtgaagcaacgggtttacgtcagcaagattttgctgtcgccgtaggggtaagttatgacctggtcaaaagctgggaaaccaaacgccgtcagcctaccggagcacctcgaaaattgctcctgcttttgcaagcgaatcctttcattatcaatcaattgaaatcaatataaaacaggaggcaccttcgcctccagtttatttacccttcttttatcgtgccctgcgcccgcgttaccggaacaggcagccaggcacgaatggaaagcccgccccgctcgctggtgccaagctccagcatcccgttatggttatccacgatgcgctgcacaattgccagccctagccccgtgccgctaatggtgcgcgcactgtcgccgcggacaaatggctggaacaggtgcttacgctgttccggtgcaattcccggaccgtcatcttccacctggaaccaggcgcgattcggctccgttccgctgctgactttgatccagccattgccataacgggcggcgttgaccaccatattcgccaccgcgcgtttgatcgacagcgggtgcattttcacttcaatgctgccggggtaaagcgcggtttcaatttcccgctcatagccactttcggcagcaatcacctcaccgagtactgcattaagatccgccatttccatcggcatctcctgcccggtgcgcaggtagtcgataaactgctcaatgatggcgttgcactcttcgatatctttattgatcgattctgccagatagccatcctgctcgctcatcatctcagtcgccaggcgaatacgcgtcagcggcgtgcgcaagtcgtgacttacccccgccatcagcagcgtgcggtcatccgccagttgcttaacaccagccgccatatggttaaaggcacgggtaacggaacgcacctccgaagcgccatactcacgcagcggcggcggaataatccctttaccaacctgcaaggctgcgtgttcgagatcgaccaacggtcggttctggatacgaataaacagccacgccccgcctatcgccaatagcataatcgccagcgtatagcggaacagcggagagaaatcgccctgatgaatttcggtcagcggcacgcgtacccagatattgggcgacagccaggttttcagccagacgacaggcgaacttttgttgacctcaacgcgcacttccgtcgggccgcccagttgctgtgccatctgatggcttaagaattcatagtgttgcgcccaacgcagacctgcctcttcggcagcctcgttggagtagagagagatccccagctcacggtagatctcccgacggaaagcgggaggcacaaccaactgcgtgccgtcctccagttgcagtttgtcggtcatcaacatacgcacttcgtacgcgaggactttattaaactgctggaggctcggcaaaatcgcgaagttcagcaccaccagataagtcgtcaccaggctggcgaacagcaaggtgacgatgagcaataacgtacgggcaaatgaacttcgtggcgagaagcgcaatcgcctcatgctttagagccgtccggtacaaagacgtagcccaggccccaaacggtctgaatgtaacgcggatgcgctggatcttcttctaccatgcggcgcagacgcgaaatctgcacgtcgatggagcgttccattgcggaatattcacgaccacgggcaaggttcatcagcttatcgcgggagagcggctcacgcggatggctgaccagtgccttcagtaccgcaaactcaccgctggtgagcggcatcggctcatcttcgcggaacatttcgcgcgtaccgaggttaagtttgaacttaccgaaagcaattaccgcctcttcctgtgacggtgcgcctggcagttcgttcgcctgacgacgcagcaccgcacgaatacgggccagcagttcacgcgggttaaacggttttggaatgtagtcgtcagcgccaatctccaggcctacgatacggtccacttcttcccctttcgccgtcaccataatgatcggcatcgggttgctctgactacgaagacgtcggcaaatcgacaagccatcttcaccaggtaacattaaatccagtaccataagatggaaagattcacgagtcagcaggcgatccatctgttctgcattagcgacgcttcgaacctggaagccttgttcggtgagataacgttccagcagcgcacgcaggcgcatgtcgtcatcgaccaccagaatcttgtagttctcttgcattgtttgtactcccaaaggttcgcaacaatttgtaagcgtgtattcttaaaaaagctcacgttcgtcaccagctaaatctggtatgaatttcagcctaaattgttacaaagcatattaaacagcagcttaagtatacaatttattcggcgaaacattattgattctgttgatatgatcacgttatacccaatgtgcgcattatcaaacagacaaagggaatcaacgagatgaaaacgcccctggttacccgggaagggtatgaaaaactcaaacaagagcttaattatctctggcgtgaagaacgcccggaggtcacaaaaaaggtgacctgggccgcaagtctgggcgaccgcagcgaaaatgctgactatcagtataataaaaagcgtctgcgtgaaatcgaccgtcgcgtgcgctatctcactaaatgcatggaaaatctcaaaatcgtcgattactcccctcagcaggaaggcaaagtcttttttggcgcgtgggtggagattgaaaacgacgatggcgtgactcaccgtttccgtattgtcggctacgatgaaatttttggccgtaaagattacatctctatcgattccccgatggcccgcgcattgctgaaaaaagaagtcggcgatctggctgtggtgaatactcctgccggggaagcgagctggtatgttaatgctatcgagtacgtgaaaccgtaaggaagagtcttaacctcctgccgatggctggcatttttgccagccagtccgtataactatcccctgatttttgatccgaaaagatgaactcaaaccatgatgaatgattcgttctgccgcattattgcgggtgaaattcaggcgcgcccggaacaggttgacgctgccgttcgcctgcttgacgaagggaataccgtgccgtttatcgcacgttatcgtaaggaaatcaccggcggtctggatgacacgcagctgcgtaatctggaaacgcgtctgagctatctgcgcgagctggaagagagacgtcaggcgatcctcaagtccatttccgagcaaggcaaactcaccgatgatctggcgaaggccatcaacgccaccctaagcaaaaccgaactcgaagacctctacctgccctacaaacctaaacgccgcacccgcgggcaaatcgccattgaagcagggcttgagccgttggctgacctgctgtggagcgatccgtcacacacgccagaagtcgccgctgcacaatatgttgatgccgataaaggcgtggcagataccaaagccgcgctggacggcgcgcgctatatcctgatggaacgttttgccgaagatgccgcgctgctggcgaaagtgcgtaattatctgtggaagaacgcgcatctggtctcaaccgtggtgagcggtaaagaagaggaaggggcaaaattccgcgactatttcgatcatcacgaaccgttgtccacggtgccttctcaccgcgcgctggcgatgttccgtgggcgtaacgaaggcgtactccagctttcgctgaatgccgatccgcagttcgatgagccgcccaaagagagctattgcgagcaaatcatcatggatcaccttggcctgcgcctgaacaatgccccggcggatagctggcgcaaaggcgtagtgagctggacctggcgcatcaaggtgctgatgcatctggaaaccgaactgatgggtaccgtgcgcgaacgcgcggaagatgaagcaatcaacgtctttgcccgtaacctgcacgatctgctgatggcggcccctgccggactgcgtgcaacgatgggcctcgatccgggtctgcgtactggggtaaaagtggcggtggtcgatgccactggcaaactggtagcgaccgataccatttacccgcacaccggacaagccgcaaaagcagcgatgactgttgctgcgctgtgtgaaaagcataacgttgaactggtggcgatcggcaacggtacagcttcccgcgaaaccgaacgtttctatctcgacgtgcagaagcagttcccgaaagtgaccgcacagaaagtgatcgtcagcgaagctggcgcgtcggtttactcggcttccgagctggcagcgcaggagtttccggatctcgacgtttcgctgcgtggcgcggtgtctatcgcccgccgtttgcaggatccgctggcggagctggtgaaaatcgatccgaaatctatcggcgtaggtcagtatcagcatgacgtcagccagacgcaactggcccgcaaactggacgcagtagtagaagactgcgtaaacgccgttggcgtcgatctcaacactgcttctgttccgctgttaacccgcgtggcgggcctgacgcgcatgatggcgcaaaacatcgtggcctggcgcgatgagaacggtcagttccagaaccgtcagcaactgctgaaagtgagccgtctggggccgaaagccttcgagcagtgcgcgggcttcttgcgcattaaccatggtgataacccgctggacgcgtctaccgtccacccggaagcctatccggtggtggaacgcattctggcagcaacacagcaggcactgaaagatctgatgggtaacagcagcgaactgcgtaacctgaaagcgtctgactttactgatgaaaaattcggtgtgccgacagtaactgacatcatcaaagagctggaaaaaccgggtcgcgatccgcgtccggaatttaaaaccgctcagtttgccgatggcgtcgagacaatgaacgacctgcaaccgggtatgatcctcgaaggtgcggtgaccaacgtcaccaactttggcgcgtttgtcgatatcggcgtgcatcaggacggcctggttcacatctcttcattgtcgaacaagtttgtagaagatccgcataccgtggtgaaagcgggcgacattgtgaaggtgaaagtgctggaagtggatcttcagcgtaaacgtatcgccctgaccatgcgtctggacgagcagcctggcgaaaccaacgcccgtcgcggcggcggtaatgaacgcccgcaaaacaaccgcccggcagccaaaccgcgcggacgtgaagcgcagcctgccggtaacagcgcgatgatggacgcgctggcggcagcaatgggcaaaaaacgttaaacgccctgattgacccctaaacctgcgcgataaggtgtccacgccgcatctggcaacgaacgccttgtctgacataaaagtgccggagaatatctccggcatttttattccacagccaaactcacaatatattccggcaacatttatcacttcattaacaactgaaaccttaattaaacattagccagtcctggtaattcgctattcgaattatattttcgctgcgatataaccttgagccacatcaacattgagtcagattattattcaaaccaacattcgcacacattttaagtattgctgatagaaaccattctcattatcattgtgttgttgattatttaatctctcctttgttggcaaatcatctggtctcatgtcgctgtcaaacgccccatgaggtagttatccagttaatgagaaacaagtaggcacctatgcaatacactccagatactgcgtggaaaatcactggcttttcccgtgaaatcagcccggcatatcgccaaaaactgctttctcttggcatgttacctggctcctcttttaatgtggtgcgcgtcgctccactcggcgaccccattcatatcgaaacccgtcgtgtgagcctggtattacgcaaaaaagatctggccttattagaagtggaagcggtttcctgttaatacggtgataacaacaatgaaaaaattaaccataggcttaattggtaatccaaattctggcaagacaaccttatttaaccagctcactggcgcacgtcagcgtgtaggtaactgggctggcgttaccgtcgaacgtaaagaagggcaattctccaccaccgatcatcaggtcacgctggtggacctgcccggcacctattctctgaccaccatctcatcgcagacctcgctcgatgagcaaatcgcctgtcactacattttgagtggcgacgccgacctgctgattaacgtggtggatgcgtctaaccttgagcgtaacctgtacctgacgctacaactgctggaactcggcattccctgcatcgtggcactgaacatgctcgacattgccgagaagcaaaatattcgtattgaaattgatgctctgtcggcgcgtcttggctgcccagtgatcccgctggtttcaacccgtggtcgcggtattgaagcgctcaagctggcgattgatcgctataaagctaacgagaatgtggaactggtgcattacgcacagccgctactcaacgaagcagattcactggcaaaagtgatgccttccgacatcccgctgaaacaacgtcgctggctgggcctgcaaatgctggaaggcgatatctacagccgcgcctacgccggtgaagcgtcgcagcatctggatgccgccctcgcccgtctgcgtaatgagatggacgatccggcgctgcacattgccgatgcgcgttaccagtgcattgctgccatctgtgatgtggtaagcaacaccctgacggcagaacccagccgtttcaccactgcggtagataaaatcgtgctcaaccgtttcctcggtctgccgattttcctctttgtgatgtacctgatgttcctgctggctatcaacatcggcggggcgttacagccgctgtttgacgtcggctccgtggcgctatttgtgcatggtattcaatggattggctacacgctccacttcccggactggctgactatcttcctcgcccagggcctgggtggcggcattaacaccgtgctgccactggtgccgcagattggcatgatgtacctgttcctctccttccttgaggactccgggtatatggcgcgtgcggcgtttgtgatggaccgtctgatgcaggcgctgggcttgccggggaaatcctttgtgccgctgatcgtcggtttcggttgtaacgtaccgtcggtaatgggtgcacgtacgcttgatgcaccgcgtgaacgtctgatgaccatcatgatggcaccgtttatgtcctgcggcgcgcgtctggctatcttcgcagtattcgcggctgccttcttcgggcagaacggtgcgctggcggtcttctcgctgtatatgctgggtattgtgatggcggtgctgactggcctgatgctcaagtacaccatcatgcgcggtgaagcgacgccgtttgtcatggagttgccggtctatcatgtaccacacgttaaaagcctgattatccagacctggcagcgtctgaaaggcttcgttctgcgtgctggtaaagtgatcatcatcgtcagcattttcctgagcgctttcaacagcttctcgctgagcgggaaaatcgtcgataacatcaacgactcggcgctggcgtccgtcagccgggtgatcacccagtcttcaagccaattggcgtgcatgaagataactggcaggcaacggttggcctgtttacaggtgccatggcgaaagaagtggtagtgggtacgctcaacaccctctacaccgcagaaaatattcaggacgaagagttcaatccggcagagtttaacctcggtgaagagctgttcagtgcgatagatgaaacctggcagagcctgaaagacaccttcagccttagcgtactgatgaaccccattgaagccagcaaaggcgacggcgaaatgggtaccggggcgatgggcgtgatggatcagaaattcggtagcgcagcagcagcttacagctacctgattttcgtcctgctgtatgtaccatgtatctcggtgatgggagccatcgcccgtgaatcaagccgtggctggatgggcttctccatcctgtgggggctgaatatcgcttactcgctggcaacattgttctatcaggtcgccagctacagtcagcacccaacttacagcctggtgtgcattctggcggttatcctgtttaacatcgtggttatcggtctgctgcgccgcgcgcgtagccgggtggatatcgaactgctggcaaccgcaagtcggtaagcagttgctgcgcagccagcaccaccggtgattgccattaatggcttcacttattcaggtgcgcgatttgctggcgttacggggccgtatggaagcggcccagataagccagacattgaacactccacagccaatgattaacgccatgctgcaacaactggaaagtatgggcaaagccgtgcggattcaggaagaacctgacggctgcctctctggcagttgtaaaagctgcccggaaggaaaagcctgtctgcgcgagtggtgggcgctgcgttaaccttactccatcgcctgttttggaaagcccggtatgcgtctgcatccgggcttttttgcgtgcggctttccataaaaatgcaactcttgcagcacggcgtaagttcctttgaaagcatctcgcagggatgaaaactcgctaatacacaggtgtggagtggcgcgtagagtcgcggcattcaaacaacaggtgaaggaacgccatgagcaaaaagcagagttccaccccacacgatgcgctgttcaaactctttttacgccaaccggacacggctcgtgattttcttgcgtttcatttaccggcacccattcacgcgctttgtgatatgaaaaccctcaagctggagtcgagcagctttattgatgacgatctgcgtgaaagctattccgatgtgctgtggtcggtgaaaacggaacaaggaccaggatacatctattgtctgattgaacatcaaagcacctcaaacaaactgatcgcatttcgcatgatgcgttacgctattgccgcaatgcaaaatcaccttgatgctggatacaaaacgttgccgatggtggtgctattgttgttttaccacggtattgaaagcccctatccctattcgctgtcttggctggattgtttcgccgatcccaaactggcaaggcagctttatgcctccgcatttccgctgattgatgtcaccgtcatgcctgatgatgaaatcatgcagcaccgacgtatggcgctgctggagttaattcaaaaacatattcgtcaacgcgacctgatggggctggtagagcaaatggcctgcttattaagtagtggatacgctaatgacagacaaatcaaagggctgtttaattacatactgcaaaccggcgacgcggtacgttttaacgattttatcgacggcgttgccgaacgttcaccgaaacacaaggagagtttaatgacaattgcggaaagattgcggcaggagggggaacaatccaaagccctgcatatagccaaaataatgcttgaatccggagtccctcttacagacatcatgcgctttactggggtgtcagaagaagagttggctgcggcgagccagtaaatttctgtctcgccatttcaaaagttgcctacaccctctgcttcaacgccaccagcaggtgacaaaactcgaccggatgcgaaataaacggcgcatgggccgctttggcgaagatatatgattcgctgtgaggccaaagtttatccagcatcggcaccactttgcgcggcaccagaccgtcgagatagccatacaatcgcaaaaacggcatggacacgttttgcagcggctgacggagatcgaccgttttcaggatttccagcccgccattaagcacgtcaacctccggcatcggtaacgccagaacggttttcttcaacgcccgcgcatcctggcgcgccgtttcagtccccatggtttgtaacgccaggaaccgctccactgtacgctgaaaatcatcactgagttgctgctgaaatcccgccagcacgtccggttttatccccggccactcgtcacgagcactaaaacaaggtgacgacgccacggtgaccagcgcctgaacacgctcgggatgggttaaaacaatttggcttgccaccagcccgcccagactccagcctaaccaaatggctttatcaggtgcctgttgcagcacggcttcggccatatcagcaagtgacagcgcaccaaatccccggctacgcccgaagccgggcaggtcaacaaggtgcagcgtaaaatgcgagctaagttcctcgtcaatgcaacgccacacttcggcattcagtccccatccgtgcagcagcacaagatgaacattcccctgacctttggtctgccaccagatgttattcatccgctattgttctcttttgacttacaaggatgaacatatgctaacagtaccgggattatgctggctatgccgaatgccactggcgttaggtcattgggggatttgttcggtctgttcacgcgccacccgcacagataaaacgttatgcccacaatgtggattacccgccacacactcccatcttccctgcggtcgctgcctgcaaaaaccgccgccctggcaaagactggtcacggttgccgactatgcgccgccgttaagtccgcttatccaccagcttaaattttcccggcgcagtgaaatcgccagcgccctgtcacgtctgttactattggaagtcttacacgctcgtcgcaccaccgggttgcaattgccggatcgcatcatcagcgttccgttatggcagcggcgtcactggcgtcggggatttaatcagagcgatttgctgtgtcagccgttatcacgctggttgcactgccaatgggatagcgaagccgtcacacgtacacgggccactgcgacccagcattttctcagtgcccggctgcgcaagcgcaacctgaaaaatgcctttcgtcttgaattgcccgtgcaaggtcgccatatggtgattgtggatgatgtcgttaccaccggaagtaccgtcgcagagattgcgcagttgcttttacgcaatggtgcggcgactgtccaggtctggtgcctttgtcgaaccttgtagagcctcgatgatgggcgtattataaccaactaaaatagtcaactattaggccattactatgatccgtatttccgatgctgcacaagcgcactttgccaaactgctggcaaatcaggaagaagggacacaaatccgcgtatttgtgattaaccctggcacgcctaacgctgaatgtggtgtttcttattgtccgccggatgccgtggaagccaccgacactgccctgaaatttgacctgctgaccgcgtatgttgatgagttaagcgctccttacctggaagatgcagagatcgattttgttaccgaccagttgggttctcagctaacactgaaagcgcctaacgccaaaatgcgtaaagtggcagacgatgcaccactgatggagcgcgtggagtatatgctgcagtcgcagatcaacccacagcttgctggtcacggtggccgcgtttcactgatggaaatcaccgaagacggttacgccattctgcaatttggcggcggctgtaacggttgttccatggtcgatgtgacgctgaaagaagggatcgagaagcagttgctaaacgaattcccggagctgaaaggtgtgcgcgatctcaccgaacaccagcgcggcgaacactcctactactaagttatcccctcttttgtagattgcccgatgcgacgctaaagcgtcatttcgggcctacgttgaacatgtgccagacgttggcacagcattgctttggcaaatccctcccttcgtttccccgcgataatatgaccaacctctcataatttaaatttaccccgctctggtgattctcaaacgccagatgttacccgtatcattcacatgggtaccaaacatactcctgacatctgactacaataattagttttagtggggatcagtcgtggtgccgcaatatctctgttcccgattgggataattagagtttgtcgtcagaaaattgacgttacccataacaaatgaaaggccaggtaaatcatgccattagtcattgttgctatcggtgtaatcttgttgttgctcctgatgatccgcttcaaaatgaacggcttcatcgctctcgtcctcgtggcgcttgctgttggattaatgcaaggaatgccgctggataaagttattggctccatcaaagccggtgtcggcgggacgctcggtagccttgccctgatcatgggttttggcgcaatgctgggcaaaatgctggcagactgcggtggcgcacaacgtatcgccaccacgctgattgccaaatttggtaaaaaacacatccagtgggcggtggtactgaccggttttaccgttggttttgccctgttctatgaagtgggctttgtgctgatgctgccgctggtgtttaccatcgcggcttctgcgaatattccactgttgtatgttggtgtaccaatggcagctgcactgtctgtgacccacggcttcctgccaccgcatccgggtccgactgcgattgccaccattttcaatgccgatatgggtaaaaccctgctgtacggtactattctggcaatcccgaccgtgattctcgccggtccggtttacgctcgcgtgttgaaaggtatcgataagccaattccggaaggtctctacagcgcgaaaaccttcagcgaagaagagatgccgagctttggcgtcagcgtctggacctctctggtgccggtagtactgatggcgatgcgtgcgattgccgaaatgatcctgccgaaaggtcacgctttcctgccggtagcggagttcctcggtgacccggtaatggctacgctgattgccgtgctgattgccatgttcacctttggtctgaaccgtggtcgttcaatggatcagattaacgacacgctggtttcttccatcaaaatcattgcgatgatgctgttgatcatcggtggtggcggtgcgttcaagcaggtgctggtagacagcggcgtggacaaatacattgcttccatgatgcacgaaaccaacatttctccgctgctgatggcctggtcgattgctgccgtactgcgtatcgcgctgggttccgcaaccgttgcggcaatcactgcgggtggtatcgcggcaccgctgattgcaacgacgggtgttagcccggagctgatggttattgcggtgggttccggtagtgtgattttctctcatgtgaacgatccgggcttctggctgttcaaagagtactttaacctgactatcggcgagaccatcaaatcctggtcgatgctggaaaccattatctcggtgtgcggtctggtaggctgtctgctgctgaatatggtgatttgataacactgactgccggatgcatcgcatccggcatcaaccgcactctacttcttcttcgctgcagctctgcgccgtctgtccaaatccttcagcaacttgttcacgccatcatcggcaaacatcgactcaagcgttgcggaaagcttgcgtcgccagtttttatactggtaactggtgccaggaatattcaccggttcggccatatccagccagtcttccggctgtagtcctaacagagcactgttactgtcggcaatgtagcgctgcaaaccacggttcagcgtcggcgtcatcgacatcaacgatgccttatgcccggcacgttttggcagacaaccatatttatgcagtgcatccagcagcccttgcttcgccagttcgcgatcctgatacagaccgcgcagtaccacttcatccggatacagccccagggttttgcccaacgttagatccccgctctcccagtaaccgcgcagcgtaggcaggtcatgtgtcgccgcaaccgccatcgactgctccggatacgctttcggtgcacggaacgtcttctcgtggtcgttttcgaaatagagcactttgtaggagtacacaccgctgctgcgcagcttaccgacaatctctaccggtacggtaccgagatcttcaccaatcaccatacagcgatgacgtttactttcgagtgccagaatcgagagcagatcatccaccggatagtgaacatacgcgccctgatctgccgtctcgccatacggtatccaccacaaacgcagcatcgacatcacatggtcaattcgtaatgcgccgcagttttgcatattggcacgcaacagctcgataaacggttcataggcacgcgcggtgatgatatgcgggtccattggcggtaatccccagttctgccccaacgggccgaggatatccggcggcgcgccaaccgacgctttcaggcaatatagttcacggtcacaccaggtttccgccccaccttccgctacgccaaccgccagatcacgatacaagccaatcggcatttcatagccctggcttatctcccagcaggcggcaaactggctgtaagccagccactgcaaccagagataaaaatcgacgtcattacgatgttcttcgcagaactgacgcacttctggtgaatccacgttctgatacatctctggccatgcaggccagccccagcgcatttcgtcctctttcacttgctgggcatgtagcgcatcaaaggctgcctgccagaacaggctgtcgccctgctctgcaacaaactggcgaaacgcggccatctgctcatcatcacgttgcgcgaaacctttccacgccattcgtaatgctgtcatttttagggcggtaaccgtggagtaatcgacccagtcggcatcgcgcgcctgttgcagcgtctgttgcgtggtcggcaactgccaccaggcctgagcctcttcgctaagatggaaatcttcaacggcgttaacgtcgatataaatcacattcagccaacggcgagaagacgggctgtatgggctggcactctccggatttgccggatagagcgcatgaatcgggttcaggccgatgaacgacccgccacgtattgccacatccaccagcatcgctttgagatcgccaaaatccccaataccccagtttttttccgatcgcagcgtataaagctgaacgcaggcaccccacagcttttgtttattcagcaacgcctgcggttcgtaacagcgtttcggggcgacaatcacccggcaatgcgcgcgctggtcgtcctgggtgagtgtcagcgtgtgataaccttccggcagcttcgtcggtagattgaacgctttgcccccgttacatggcctttgtactgtgttccttcttcggtggtcagcagccagctatattcgccgctgccctccaccaccatcggcatttttttgccgctggtataaaccatgacattcgggactggcgttaccgccactttcgtggcggtacgttgatgcatcgcgtcaagcaaacgccgtttggtttcggcgctaatcgactgcggtttaccgtgggcattgatgtaattggggctaatccccgccgccagcgcggcattatccagacgtttgctttccatcgagcttccttagcgttttgcctgccagatacgagcctgataatcgcgaatagagcgatccgagctaaacataccgcagcgggcggtattgaggatcgccgcgcgagtccaggcctcctggtcgcggtacagcacatccacctgcttttgtgcctcaacataggctgcgaaatccgccatcaccagatacggatcgccgccttgtttgccgatactgtgcagcatctggtcgaaggcatgcttatcgccgtcgctgtatttaccgctttccagctctttcaatactgcgtccagcaccttatctttcttccgccatttcaccgggtcgtagcctttggccagaatagccttcacttgttccacggtatgaccaaaataaagatattttcttcaccgactttctcggcgatttcaacgttcgcaccatccagcgtaccgacagtaagcgcaccattgagcgccagtttcatattgccggtaccggaagcttctttacctgcagtcgaaatttgttcggagatatccgccgccgggatcagtttttccgccgccgaaacgcaataatccggcaggaacaccaccttcaacttatcgccaaccagtggatcgttgttgatcacgtcagccactttgttgatcgcaaagataatattcttcgccaggtagtagcccggtgccgctttcgcgccgaagaggaagacgcgcggtacgcgatcagcctgcgggttttcacgaatttctttgtacaacgccagaatatgcagcagattcaggtgctggcgtttgtactcatgcagacgtttgatctgaatatcgaaaatcgcctgtggattgatctcaataccggtacgaactttcacaaactccgccagacggactttattcgcctgcttgatctcgcgatattgctgacggaatttcgcatcatcagcgaatttttccagattgatcagctgatcgagatcgttagcccactctttttgcagtgatttatccaacagagccgccagtgcagggttgcactgtttgatccagcgacgtggggtaataccgttggtgacgttatggaatttgttcggccatagctggtgatattccgggaacagatctttcaccaccagatccgagtgcagcgccgcaacaccgttcaccgcgaaaccgccaaccacacacaggttcgccatatgcacttgtttatcgtgcaccaccgccagtttggcccacactttttcatcgcccggccaggttttctccaccagcgttttaaagcgagtattaatttcgttaataatctgcatatggcgcggcagtaagcctttcaccagtttcacatcccagcgttccagcgcttctggcatcagggtatggttggtgtaagcgaaagttttgctggtaatggcccaggcgtcatcccagctcatctggtgctcatcgatcagcacgcgcagcagttctggaatcgcgatagttgggtgggtatcgttcagctgaataacttcgtaatccgccagttcgtgcagtttacgccccgccagatgatggcgacgcaaaatatctgctaccgaacaggcacactggaagtactgctgcatcaagcgcagctttttaccggcagtatggttgtcgtttggatagagaactttggtcagtttttccgcattgatgccctgctgttcggcacgcaggaaatcaccgtcgttaaatttagtcagatcaaacggatgcgcgtgcgtcgcctgccacagacgcagcggctgcgccacgccattacgatagccgacaacggggagatcccacgcttgaccggtaatggtaaactccggctcccagcgtccgtctttcgtcactttaccgccaatccctacctgcacatccagtgcttcgttgtggcggaaccacgggtagttactgcgatgccagtcatccggcgcttcaacctgtttgccatcgacaaaagactggcggaacaaaccatattgatagttcagaccgtaacccgtcgcagactgaccgacagttgccattgagtcgaggaagcacgccgccagacgtcccagaccaccgttacccagcgccgggtcgatctcttcttccagcaggtccgtcagattgatgtcataagccttcaacgaatcctgtacatcctgataccagccgagattcaacaggttgttgcccgtcaggcgaccaatcaaaaactccattgagatgtagttaacatgtcgctgattcgccaccggcttggcgaatggctgagcacgcagcatttcggccagtgcttcactcactgctagccaccactggcgaggagtcatttcagccgcagaatttaagccataacgctgccactgacgtgaaagcgcttcctgaaattgcttatcgttaaaaataggttgtgacataggagttccacttttcttagattttcaacacaacgttatcgctagtttgccaggctcgatgttgaccttcctcatcctgcgggggattaggcagggaggagttgcggggatgagcaaggaaatgtgatctcaaccacttaaagctagtgcaaaccacaggattagcagcaaatcaatgcaatacagcgcagaaaatctgtatctaagtgcaaaaaatggccgttgcgtattttcaaaaagcggaaggtaactctataaattaagtaaaggagtgaaacagtttcataagtaaaatatccagtgtgctccatctcattcttaatagatttattaagatcatctttttagatggcactttcatcaggaatgaagaagaaacccttgcttaaatgaatctgatgaacataagggaaaccagtattcacgctggatcagcgtcgttttaggtgagttgttaataaagatttggaattgtgacacagtgcaaattcagacacataaaaaaacgtcatcgcttgcattagaaaggtttctggccgaccttataactattaattacgaagcgcaaaaaaaataatatttcctcattttccacagtgaagtgattaactatgctgattccgtcaaaactaagtcgtccggttcgactcgaccataccgtggttcgtgagcgcctgctggctaaactttccggcgcgaacaacttccggctggcgctgatcacgagtcctgcgggctacggaaagaccaccctcatttcccagtgggcggcaggcaaaaacgatatcggctggtactcgctggatgaaggtgataaccagcaagagcgtttcgccagctatctcattgccgccgtgcagcaggcaaccaacggtcactgtgcgatatgtgagacgatggcgcaaaaacggcaatatgccagcctgacgtcactcttcgcccagcttttcattgagctggcggaatggcatagcccactttatctggtcatcgatgactatcatctgatcactaatccagtgatccacgagtcaatgcgcttctttattcgccatcaaccagaaaatctcaccctggtggtgttgtcacgcaaccttccgcaactgggcattgccaatctgcgtgttcgtgatcaactgctggaaattggcagtcagcaactggcatttacccatcaggaagcgaagcagttttttgattgccgtctgtcatcgccgattgaagctgcagaaagcagtcggatttgcgatgacgtttccggttgggcgacggcactacagctaatcgccctctccgcccggcagaatacccactcagcccataagtcggcacgccgcctggcgggaatcaatgccagccatctttcggattatctggtcgatgaggttttggataacgtcgatctcgcaacgcgccattttctgttgaaaagcgccattttgcgctcaatgaacgatgccctcatcacccgtgtgaccggcgaagaaaacgggcaaatgcgtctcgaagagattgagcgtcaggggctgttttacagcggatggatgataccggcgagtggttctgctatcacccgctgtttggcaacttcctgcgccagcgctgccagtgggaactggcggcggagctgccggaaatccaccgtgccgccgcagaaagctggatggcccagggatttcccagcgaagcgattcatcatgcgctggcggcaggcgatgcgctgatgctgcgcgatattctgcttaatcacgcctggagtttgttcaaccatagcgaactgtcgctgctggaagagtcgcttaaggccctgccgtgggacagtttgctggaaaatccgcagttagtgttattgcaggcgtggctaatgcaaagccaacatcgctatggcgaagttaacaccctgctagcccgtgctgaacatgaaatcaaggacatcagagaaggcaccatgcacgcagaatttaacgctctgcgcgcccaggtggcgattaacgatggtaatccggatgaagcggaacggctggcaaaactggcactggaagagctgccgccgggctggttctatagccgcattgtggcaacctcggtgctgggtgaagtgctgcactgcaaaggcgaattgacccgctcactggcgctaatgcagcaaaccgaacagatggcacgccagcacgacgtctggcactacgccttatggagtttaatccagcaaagtgaaattctgtttgcccaagggttcctgcaaaccgcgtgggaaacacaggaaaaagcgttccagctgatcaacgagcagcatctggaacagctgccgatgcatgagtttctggtgcgcatccgagcacaactgttatgggcctgggcacggctggatgaagccgaagcgtcggcgcgtagcgggattgaagtcttgtcgtcttatcagccacagcaacagcttcagtgcctggcaatgttgattcaatgctcgctggcccgtggtgatttagataacgcccgtagccagctgaaccgtctggaaaacctgctggggaatggcaaatatcacagcgactggatctctaacgccaacaaagtccgggtgatttactggcaaatgaccggcgataaagccgccgctgccaactggttgcgtcatacggctaaaccggagtttgcgaacaaccacttcctgcaaggtcaatggcgcaacattgcccgcgcacaaatcttgctgggcgagtttgaacctgcggaaattgttctcgaagaactcaatgaaaatgcccgcagtctgcggttgatgagcgatctcaaccgtaacctgttgctgcttaatcaactgtactggcaggccggacgtaaaagtgacgcccagcgcgtgttgctggacgcattaaaactggcgaatcgcaccggatttatcagccattttgtcatcgaaggcgaagcgatggcgcaacaactgcgccagctgattcaactcaatacgctgccggaactggaacagcatcgcgcacagcgtattctgcgagaaatcaatcaacatcatcggcataaattcgcccatttcgatgagaatttcgttgaacgtctgctaaatcatccggaagtgccagaactgatccgcaccagcccgttgacccaacgtgaatggcaggtcctggggctgatttactccggttacagcaatgaacaaattgcgggcgaactggaagtggcggcaaccaccatcaagacgcatatccgcaatctgtaccaaaaactcggcgtcgcccaccgtcaggctgccgtgcagcacgcgcagaaactgctgaagatgatgggttatggggtgtgagtttagccggataatgcattggatccggtttacatctttacatcattcaatactcacccgcgttacgccatctgtttctatcaaaccaaaccgcaccggcaagaaacgctccaccaccgcgatattggtcagcagatggcatgaaggatgggcgaccttaaattctcccgcgcccgccagcgccatcggcagtaccagctggtcggcgagatattcccccactgccgccgggcttgccaggtagcgtttcacctctttcactaactgcgcggctaccacctcggcactgacgcgcttttcaccgacgacaaaaaagcgttcggtgatattttcactttcgacttcaagcgagacggtattacccggcccctggtcacgcggcaggttatgaatattctgctcatgcagggaaaaactacccgccagcgtagcgatttcacgctcagcgacatggcgcggcacgccagctaataacacctctccacgcatctgcacaatgttcccgcgctcgccaagttgcaaggtgttaaacgatgccaccggcgagacttccgttgccaccacgccgcctccggcaggataaaaaccgtgacgtaacagcgtggtttgctgatgaattcctattttcgccagcagcggctccagcacccggcggataaaatccgcaggcggggccgacgggttatcggtgcctccgctcacttcaacacgcgaaggtccatcggcaaaccacagcgcgggcagcaccgtttgcagcaccagcgtacagcttccggcactaccgatagcaaagcggtactcgccgccgcgcacggtgccaggccggaagagcagacgctgcgaccccagctccgcgccttccacggttgctccgcaaatttccgtcgccgcctttaccgcggtcagatgctggcgcaacagccccggtttcgcccgcccggcacgaatgctggtgatggtaaatggctggccggttatcatcgacaggctcagcgccgagcgcaggatctgcccgccaccttcgccctgtgcgccatccagcgcaatcatccttttcatcatttatccttttacgcacaccacctgacgcagggtatagataacttccaccagatcgctttgtgccgccatcaccgcatcaatatctttatacgccatcgggatttcgtcgatcacttcggcaactttacggcattccacatgcgcggtggcacgaatttgatcttccacgctgaacagttttttcgctttagttcggctcattacccgcccggcaccgtggctgcacgaacagaacgactcttcatttcccagcccacggacgataaagctttttgctcccatcgaaccgggaataattccatattgaccagcacgcgcagacaccgcgcctttacgcgtcacgtagatctcttcaccaaagtgctgttctttttgcacatagttgtggtgacagttgatctcttccatcgccagcgtttgtggctgtctgaccgttttctgcgtaatgctctgcaatgccgttaccacgttttccatcatcgcatcgcggttaaggctggcaaaaagctgcgcccaggccacggctttcaggtaatcatcaaagtattccgtaccttccataaagtacgccagatcacgcgacggcaacgtctcaagcgtttcctgcatctctttttgtgccagatcgataaagtaagtcccgatggcgttaccaattccgcgtgaaccggagtgcagcataatccacacctggtccgactcatcaaggcagatttcaataaagtggttaccggttcccagcgttcccaggtgtttatagttattggtattcaggaaacggggatatttttgcgttaaccactgataaccggcttcaagctcagcccatttagcatcgacgttaacaggtggattttcccaggcacctttatcacgtttacaacggccagtggtacgcccgtgcggcacggccgtttcaatcgcctgacgcagctctgccaggttttcaggcaggtcttccgccgttaacgcggtacgcagcgcgttcattccacagccaatatccacgcccaccgccgccggaataatcgcccctttggtcgggatcacgctaccaatggtggaacctttacccaggtgtacatcaggcattaccgcaatatgtttgaaaataaacggcatcttcgccgtattaataagttgctgacgcgcatcggcctctaccggcacgcctttggtccacatttttaccggggcattttcagtggtcagtaattcgtaattcattttgtttttctcttttcgttgtttgctgtcctgataattgcaaccgtcgtgccagaaaattaaataagcagcttaattttttaattcattgttttaaaaaagattatatctttacgtccgtaaacggagattttccacaaaaccaattcaccgataatgaaatatcgtcttttataaggatatctaagatgcgtaaaacagtggcttttggctttgtcggtaccgtgctggattatgccggacgcggcagtcagcgctggtcgaaatggcgtccgacgctttgtttatgccagcaagaatcgttagtcatcgatcggctggaattgttgcacgacacccgctcgcgctcgctattcgaaacgcttaaacgcgatatcgccagcgtttcgccagaaacagaagtcgtgggcgttgagattgaactgcataacccgtgggatttcgaagaggtttacgcctgcctgcatgatttcgcccgtggttacgagtttcagccagaaaaagaagactatttaattcacatcaccaccggcacccacgtcgcgcagatttgctggtttctgctggcggaagcgcgttacctgcccgcccggctgatacaatcttcacctccgcgcaaaaaagaacagccgcgcggcgcaggtgaagtgacgattatcgatctcgatttaagccgttataacgccatcgccagccgctttgccgaggaacgccagcaaacgcttgattttcttaagtccggcattgccacgcgtaacccccacttcaaccgcatgattgagcagatcgaaaaagtggcgatcaaatcccgcgcgccgattctgcttaacggtccaaccggcgcgggcaagtcatttctggcgcgacgcatcttcgagttaaaacaggcgcggcatcagtttagcggcgcgtttgtggaagtgaactgcgccaccctgcgcggcgataccgccatgtcgacgctgtttggtcatgtaaaaggcgcgtttaccggggcgcgggaatctcgtgaaggtttattacgcagcgccaacggcggaatgttgtttcttgatgagattggcgaactgggcgcagacgaacaggcaatgctgctaaaagccattgaagagaaaaccttttacccgtttggcagcgatcgccaggtgagcagtgattttcagcttatcgccggaacggtgcgcgatttgcgccagctggttgccgaaggcaaatttcgcgaagatctgtacgcgcggatcaatctctggaccttcaccctgccgggtctacgccagcgccaggaagatattgaaccgaaccttgattatgaagtggagcgccacgccacactcactggcgacagcgtgcgttttaacaccgaagcgcggcgcgcctggttggcttttgcgacctctccccaggcaacatggcgcggtaactttcgcgaactttctgccagcgtcacgcggatggccacctttgccactagcggacgcatcactctggacgtggttgaagatgagataaaccgtctgcgctataactggcaggagagccgcccctccgcgcttacggcgttgctgggcgcagaggcagaaaacatcgacctttttgacaggctgcaactggaacacgtgatagctctctgtcgccaggcaaagtcgctttccgctgccggacgcctgctttttgatgtttcgcgccagggcaaagccagcgtcaatgacgcggatcggctacgcaaatacctggcgcgttttggtctgacgtgggaagccgtgcaggatcagcacagctccagttgaatatgatggtccgtcagcacctgcattacgcttactggcggcggggcgtcggtgtagacggcatctaccatgctgatgctgcccatattgaccatcgcgttacggccaaatttcgagtgatcgacaaccagcataacgtggcgcgagttctcaataatggcgcgcttggtgcgaacttcgtggtaatcgaactccagcagcgagccgtcgctatcgatgccgcttatccccagaatgccgaaatcaaggcggaactgggagataaaatcgagcgtcgcttcgccaatgatcccgccatcgcggctgcgtaattcgccaccggcgagaataatgcggaaatcttcttttaccatcaacgtgttagcaacattgagattgttggtgacaatacgcaaattgctgtgattaagcagcgcgtgcgccaccgcttccggcgtggtgccgatatcgataaacagtgtcgagccgttggggatttgctccgccactttgcgggcaatcctctctttttcttcggtctgggtggctttgcgatcgtgccacggcgtgttaaccgaactggaaggcagcgccgcaccgccatggtgacgcaggatcaggttttgctccgccagctcattgaggtcgcggcgaatagtctgcgggctgacggagaaatgctctaccagctcttcagtactgacataaccctgctgtttaaccagttcgataataccgttgtgacgttgtgtttgtttcatttataaatccctggaattattttcgttttcgcgcattgagcgaatcaacaaaagccatcgctaaacccacggctaacccggcgatgtgtgctccgttcgccatcgacatcccaaacaaatcaaaccatccggcgacaatccagatcagcgcaaagataattaacccacgttgcaggtaaatgccactttgcggatcgcgttcaccacgtagccagacgtagcccatcagcgcatacaccacgccagaaagcccgccaaaccacggcccgctgaatttttgctgcacatagccgcttaacagggcgctaatgagagtaataacaattagcttaccgctaccgaggcgtttttccaccgcaccgccgagataccaccaccagagcaggttaaagaggatatgcatcagcgagaagtgcattaacgcgtgggtgaagtaacgccagaactcaaatttcagtgttggatcgaatggccaggccagccataacatcacttcctgatcgccgagaatttgcatggcgataaacaccaccacgcaggcgatcatcaccacccaggttaccggacctgcgcgttcacgcaaggcggcaaagaaaggataacggcgataatgcaggccactgccggtatggcctgcctgccagctggccgccagataacgcggatctgccgggttttcgagaaaacgcgccagctccgcccgtacgcgctcggcctgggactcatccgccagccagacatcgctttggttatgttgttgaatcgtgaggataacaccctgcgtcgccatgtaatcaacaaacgcctgcgccacgcgggggttagcaaaagaggtaatcatcaacattgttgctgtcgcttattccacacaaaaggggacagtataaagcgttacgcgccgtacgccacctctgcgggaaactgacgttgccaggcttcaaagccgccgtcaatgctatagaccacatcgtagccctgttgcagcagatactgcgccgcgcctttgctgctattgccgtgataacacatcaccatcaccggagtgtcaaagtcgttatcacgcataaacgcgcccagcgtgtcgttggttaaatggaaagcctgcaccgcatgccccatagcgaaactctgtggatcgcgaatatcgaccagcaccgcctctttttcctgcaacttctggtgcgcgtcggcaacgttaatacattcgaactgatccatgcgtctctctttctttacaaacaagtgggcaaatttaccgcacagtttacgtcgaagcggcagataaacgccataatgttatacatatcactctaaaatgttttttcaatgttacctaaagcgcgattctttgctaatatgttcgataacgaacatttatgagctttaacgaaagtgaatgagggcagcatggaaaccaaagatctgattgtgataggtggcggcatcaatggtgctggtatcgcggcagacgccgctggacgcggtttatccgtgctgatgctggaggcgcaggatctcgcttgcgcgacctcttccgccagttcaaaactcattcacggtggcctgcgctaccttgagcactatgaattccgcctggtcagcgaggcgctggctgaacgtgaagtgctgctgaaaatggctccgcatatcgccttcccgatgcgttttcgcctgccacatcgtccgcatctgcgcccggcgtggatgattcggattggtctgtttatgtacgatcatctgggtaaacgcaccagcctgccgggatcaaccggtttgcgttttggcgcaaactcagtgttaaaaccggaaattaagcgcggattcgaatattctgactgttgggtagacgacgcccgtctggtactcgccaacgcccagatggtggtgcgtaaaggcggcgaagtgcttactcggactcgcgccacctctgctcgccgcgaaaacggcctgtggattgtggaagcggaagatatcgataccggcaaaaaatatagctggcaagcgcgcggcctggttaacgccaccggcccgtgggtgaaacagttcttcgacgaggggatgcatctgccttcgccttatggcattcgcctgatcaaaggcagccatattgtggtgccgcgtgtgcatacccagaagcaggcctacattctgcaaaacgaagataaacgtattgtgttcgtgatcccgtggatggacgaattttccatcatcggcaccaccgacgtagagtataaaggcgatccgaaagcggtgaagattgaagagagtgaaatcaactatctgctgaaagtgtataacgcgcactttaaaaaacagcttagccgtgacgatatcgtctggacctactccggtgtgcgtccgctgtgtgatgatgagtccgactcgccgcaggctattacccgtgattacacccttgatatccatgatgaaaacggcaaagcaccgctgctgtcggtattcggcggtaagctgaccacctaccgaaaactggcagaacatgcgctggaaaaactgacgccgtattatcagggtattggcccggcgtggacgaaagagagcgtgctgccgggtggtgccattgaaggcgaccgcgacgattacgcagctcgtctgcgccgtcgctatccattcctgactgaatcgctggcgcgtcattacgcacgcacttacggcagcaacagcgagctgctgctcggcaatgcgggggcgataagcgacctcggggaggatttcggtcatgagttctacgaagcggaactgaaatacctggtggatcacgaatgggtccgccgcaccgacgatgccctttggcgtcgcacaaaacaaggcatgtggctgaatgcggatcaacaatctcgtgtgagtcagtggctggtggaatatacgcagcagaagttgtcgctggcgtcgtaaggatgatgcccggttgaagtgcaaccgggctatttggattccttagactattcattgtaaataattgaataacggcccctgagctaaaatcgccaaacttaagcacgttacccaatcgccccacttcttcctctggtttctattttttctgcaccaatggcaataatatcccaatgcaaaaccaagctgtgcactaatcgggccgacaaaatcagtccaaggctgcggccaaaaaggggaaaaattcaggggaggccagacaaacgtcagaaagaaatttcggatattttccagcaacgctgatttctctggagaaatataaagaatgaaattcgagagaattaaccagaaatagaccggcgaaaagaccagccagcaatgcagtctgtttttaattcaggaggcgttctgcgggagaattgccaaccgatgccagccattacactgaaaaaaagtgcatattcaacaattaactcaagttgtaattcctgaagagaaatacgcacaaccaggagcggaaaggagaatattatttctgccagaaaagttaacgtgaatataagtacggctaagacaataaccgtcggccataccaataatggcacgataacaaaaccgagaattacagggggaatataaagccggaatttaatcatttttattttcctggtgattcggatgatgcgtcatacatcgcgcataaacactcatcaattatccagtcatcttcccagacctgatattctgtcattggttcgggctgttttagcgggttctcaatcgcttgccgcgctctttctttcagtaaaggatgattatttctagcccaggcattgatttgggtggtaatgacgttatcgatatcgtcctggttatctctgatataatcctcacaatatctgttcaataaacaggcaagagaaacggtcgaccaaaagccgggaactgaattaatggcatccagcaatggcgcaagagcgatatcggcacggaaaaacatttccagcatatactgtaattcgacagcttcatcgccggatacccaatcagtcatatactggcaggcaaatcgctgtaaaattgcccgttcatccgcacgccagttttctttgttggcaaggttgatacggcgctgagaaaaaactacgtgaatattgtcaaaatgcccctgtgcaacaaattccagtaaacgcggcagaaaatagcggacctcatcgctattttgcggatcaggccctgggctactattccaggcattgattaaggaatacgggatcgctcgtaacgatgtactccgtaatgccttttgttcctgctgactcaggcaatattcacaacaaaccacaaatttctgcggcacccgataacgacgaaaggtgtgataaatctgctcaattaatgcctgcatggcagggctgggttgcatagttaccccctcgcccgctgatcgcgtgtaaacggttgatagacaaaacgagcattcgccgcgttcaggcgaataagggcgctacgcgaaagggaaaagctggggcgaatgcaactattgcagtctcgacagctttcctctgcgcaattttccactgagtaatgaagcgtgtagaatttcagttcggcctgcttatcgcgaaatccgcgtaaactgttattgttatgaaatttccaggcatcttttaagacctgaaagatatagacatcctcaatccaggagtcacattttttaagcgggcgctttgctattatcacccgctcatccggatttagcatcgccgtaaattgtacggtgacgtcatttgtcgtgttcaggtcacattgaacatctggtacatcactgatataggggtcaaatccaaaatcagcaccacaggcacaaagacggctaatggtggcggtatcgagggaaaatcccggccataccttgctggaggttaagccaatatttaatgtgacattatatcgaagcaatccctcaagaccgtcagcaccgacgaacttttccccttcatccagggcctggttaatgagttgctgaacaatgccttcatcccagtatgccgatttgcagttggcaatcgtaatatccacgcctgtgaagggatcagtaccggcaaggcttgcaaataatgtattaactaattccatttttattatccagctttaaggtagcgtcttatacatcgggacataacctacatcttccaccaaactctgtccctgcggcgttaaaaaccactccaacaatttttgtgtctctgacgtcgtattttcccgcgttaccataaaggcatcgacgatatagggatatttgccgttgcgaatgttttcggcagtcggtgcaataccgttaatcgctagcagttttatatttttatcgtcgttcatttgtgttgcgtaataacggaaggtgtaacctattgcgttgtttgtattacggtattcggcaacgactttaatcattccctccatcatacttgccacttctgtttcctgcggcgagatcatgcggacatttttcatgacctgggattgcatcaccgtctggctaccagagtcttccgggcgttgccaggtctggatctcctgatcgttaccgccaaccgtgcgccagttggtaattgcaccactgaagatgtcacgcacttgttgttcggtcagggaattaaccgggttatctgcattgacgatgaaaacaaacgcttcacgggcaaaaggcgtgtaaatcaaagtgacgcccgattcctccgcgcgttttttctgcccaccggaaggttgagccacaaagataatatcggcattacctttaacaatcttgttatatgcttcgggagtacgagagttcgccagatattcccattcgtgaaaatcttccggcaaaacgcttagtgcataaaaggcagaggcataaatggggtacgccgccgttgcgccatcaagtcgcggccagttttgcgtgaactgaatttgcggtttaccacgcagtggtgtcagttgattattgagtttatcgggtcgccaggcccaggtatcaatattttcacgcacaccgacgccgggattaagctgtttatataaataagcctggtaaccggcgacaaaaccaagcatgagaaggataaacaagagagaattacggcaacgtaacccggacgtgcccgttaaaggatatctggtcggccagccgtaccccagcgaaaaactgatatgcgcgccaacaggtataatgactaaccaccagtactcaccaccgactaatgaggctaacaaaacgcccagccaggggagcataagatcagccaaccaacccgctcccatctggtgaaattgataatctgccagatgcagcgcgattatccagacccccagggttaataatgcgggtactaaaaaaagacattgtcgccagacggctatttctcttttttctggtgcactatcgtccgcccacactcgccccgagaaaaatagcattaatgcgcccagcgccagcataaaaatgttgagcagaaggtaaattgttggcgtgataaagatattacaaacttcaataataccggcaagtccaacacccagcatggcaataaccgccgccaaaaactgcgccagaatggggatgccgaaaaaagtcattaccagcgaggtcaaaatccattttctgttttgcattattctttccattctttctgaatggcgaaattatactccccgagtccccttgccccttctggacacttttccgaaatgatggcgaaaaaaacgggaccctttggccccgttctatttattagtgaaattacaatctcaccggatcaatatgccagatatgatcggcgtactctttgatagtacggtcagaagagaagtagcccatattggcaatgttcagcatcgcttttgcggtccactcttcctgaagctcgtagagttcgtcgactttatcctgacaatcgacatagctgcgataatccgccagaacctgatagtgatcgccgaagttgatcagcgaatcaaccagatcgcgatagcgacccggatcttccggactgaatacaccgctgccgatttgcgtcagcacctgatgcagctcctcatctttctcgtagtattcacgcggtttgtagccctgacgacgcagttcttccacttcttccgcagtgttaccaaagataaagatattgtcagcaccgacatgatccagcatctcgacgttcgcaccgtccagcgtaccgatagtcagcgcgccgttaagcgcaaacttcatgttactggtgccggaagcttccgtccctgccagcgaaatctgttcagacagatctgccgccggaatgatcaactgcgccaggctaacgctgtagttcgggatgaacacgactttcagcttatcgccaatctgcggatcgttgttgatcactttcgctacgtcattgatcaaatgaataatgtgcttcgccatgtaataggccgaagccgccttaccgccaaaaatattcacgcgcggtacccacttcgcatccgggtcggccttgatgcggttatagcgggtaatcacatgcaacacattcatcaattgacgtttgtattcgtgaatacgtttgatttgtacatcgaacaacgcctttggattcaccaccacattcagctgctgggcgatatactctgccagacgctttttgttctccagcttcgcctgatgcacagcgtgattaaccattgggaaatcacagtgttgttgcagctcattaagcaggctaaggtcggtgcgccagttacggcccaggtgttcgtccagcacggctgaaagcgatgggttcgctaccgctagccagcgacgcggcgtcacaccgttggtgacgttggtgaaacgacccgggaagattttcgcaaagtcggcaaacaacgattgcaccatcagattagagtgcagttccgatacaccgttaactttgtggctcacaacaaccgccagccaggccatacgcacgcgacgaccgttggattcatcaatgatcgacgcccgtcccagcagatcggtatcgttcggatactgttcctgcaaggttttcaggaaatagtcgttgatttcaaagatgatctgcaggtgacgcggcagaattttacccagcatatcaaccggccaggtttccagcgcctcgctcatcagcgtgtggttagtgtaggagaagacctgacaacacacctcaaacgcgtcgtcccagctaaattggtgctcatcgatcagcagacgcatcatctcaggaatcgacagtaccggatgggtatcattgagatgaatcgcgattttatccgccaggttatcgtaggttttatgcaactgataatggcggcttaaaatgtcctgaatggtcgaggaaaccaggaagtattcctgacgcaggcgcagctcacgcccggagtaggtggagtcatccggatacagtacgcgagatacgttctcggagtggtttttatcttccactgccgcgaagtagtcaccctggttgaatttaccgaggttaatttcgctactggcttgcgcactccacaaacgcaacgtgttggtcgcgtcggtgtcgtaaccagggattatctgatcgtaagcgactcccagaatctcttcggtttcaatccagcgcgtttttttaccttcctgctgaatgcgaccaccaaaacggactttatagcgcgtgttgtggcgtttgaattcccacgggttaccgtattccagccagtagtctggcgactctttctggctaccgttaacgatgttctgcttgaacataccgtagtcatagcggatgccgtaaccgcgccccggcaaccctaacgtcgccagagaatcaaggaagcaagccgccagacgtcccaggccaccgttaccgaggcctgggtcattttcttcatcaatcagctcttcgagatttaaccccatcgcttccagtgcgccctgtacatcttcgtaaattcctagcgacaacatggcgttggagagcgtacggccaatcaaaaactccatcgacaggtagtaaacctgacgagtttcttgcgacaactgggcacggtttgaacgtaaccagcgctccacgagacgatcgcgcacagcaaataacgttgcgttcagccattcatgtttattggcgacgaccgggtcctttccaatcgtaaacatcagcttgtaagcgatagagtgcttaagagcttctacgctaagcgtgggcgatgaatatgtaaacggagcattcatataggcgtttcctgaaaactatttcaagcgatagtaaagctcacggtacgacttcgccgcgacctgccagctaaaatccattgccatagcctgacgttgcacaaaccgccacagtgaaggacgggaccacagtacaaaagcacgtcgaatagcccgtaacagcgaccaggcattactatcttcaaagacaaacccactggcgacgccatctgcaaggttctcaagagaacagtcagaaaccgtatcagcaagcccaccggtgcgccgcactaacggcagcgtaccgtacttcaatccataaagttgcgttaagccgcacggttcaaaacggctgggcaccagaatgacgtccgcgccgcccataatgcgatgcgaaaatgcttcgtgatagccaatctgaacgcccacctggccggggtattccgctgccgccgcaaggaaaccttcctgcagcaccggatcgcccgcgccgagtagcgccagctgcccgccctgctccagaagacccggtaaggcttccagcaccaggtcgagacctttctggctggtcagacggctcaccactgcaaaaagcggcactttatcgtcaaccttaagccccattgcgatttgtaactggcgcttattttccgctttatcttccaacgtatcgcgggtgtaacgcgaggccaacagtaagtccgtctctggactccagattttctcgtccacgccgttcagtacgccggaaagacgcccttcacggtgacgctgttgcaacagaccttccataccgtaggcaaactgcggttcggtgatctcgcgagcgtaggttggactgaccgccgtaatgtgatcggcatagtacagaccggccttcaggaaagagatttgtccgttgaattccagcccatgaatattaaagaatgaccatggcaattggatgtcattcatatgatgtgcataaaacatgccttgataggccaggttgtgcacagtaaacaccgacttcgccggacgcccgcgcgccgccagatacgcaggcgcaaggcctgcatgccagtcgtgcgcatgcaccacatcaggacgccagaatgggtcaagcccgctggccatttctgccccaacccaccccagcagcgcaaaacgcaatacgttgtcggtataggcaaataagttggtatcgtgatacgggcttcccggacgatcatagagatgcggcgcgtcaatcaggtatatgccaaccccgttgtaatgaccgaacaacagcgtgatatgtccggcgaaggtatcacgacgggatactacctgcgcatcggtaacgccacggcgaatatcgggaaatgcaggcaacagtacgcgagcgtcaacgccgtctgcgatttgtgctgcgggtaatgccccaataacatcagccagaccgccggttttaagcagcgggaacatctctgaacatacatgtaaaacctgcattatcgctcctgtttatgccctaacttccgtagcatttcgcgcgttaccagcacgatgccttcttctgaacgatagaaacgacgtgcatcttcctctgcgttttcaccaatcaccatgccttccggaataacacaagcacgatcgatgacgcagcggcgcagacggcacgagcgacctacccatacttccggtaacaatacggcggaatcaatgttgcagaatgaattcacgcgaacgcgcgagaacagaacggactgcaccaccaccgaaccggagatcacacaaccgccggataccagtgagttaagggtcatcccgtggctaccggagcgatcctgcacgaatttcgctggcggtaatgattcattgtaggtgcgaattggccaattgcgatcgtacatatccagttccggcaccacagaggccagatcgaggttcgctttccagtaagcttccagcgtacccacatcgcgccagtacggctcggcatccgggtcggattgtacgcaagagagcgggaacgggtgcgcataggccagaccggcttcggtgatcttgggaatcaaatctttgccaaagtcgtggctggagttctcatcacgatcgtcttcttccagcagttcatacagatagtcggcgtcaaagacgtagatacccatactcgccagagatttgctcggatcgttcggcattgacggtgggttagcaggtttttcaacgaattcgataattttatcgttctcatcaaccgccataacgccaaatgcggaggcttcttcaatcggtactggcatacaagcaacggtgcaacgtgcgccttttcgacgtgatcgataagcatacgcgagtagtcttgcttgtagatatggtcgcccgccaggatcaccacgtattccgctttataacggcggataatatcgaggttttgggtgaccgcatctgcggtgccgcgataccagttttcccctttcattctctgctgtgctggcagcagatcgacaaactcgttcatttcttcattgaagaatgaccagccgcgctgaatgtgctgcaccagagtgtgggactggtactgggtgatcacgcccatacgacggatcccggagttgatgcagttagacagcgcaaagtcgataatgcggaacttaccgccgaagtgtacggccggttttgctcgcttattggttaaatccttcaggcgggtaccacgtcctcccgccagtatcagggcaacagatttcaatggcagctggcgcgccaacattaagtgatcgttcttctctaaactaaccatgactaactccttttttatcatctctggaacacacacaatccgtgtgcaggtccctgccagacagccgtaatcactgggttatcctctccagcgaatgggggaatggcgtgccactccccagcaggtaaaacaatctctgttacctcaagcgtggcgttaattgcgatcaaaaagcgatccgagagcagaatttgcagctgtttcggcccgttttgccactcatccgtgcttaaaggttgagcatatcgatttagccaacggacattgccgtcgccttcttcccaccagcgattctccaccaaagcgggaatgcgcttgcgcagatggattaacgcggcggtaaatgcggtcaaaccactgcttgcctgcgaccagtccaaccaggttaattggttatcctgacagtaggcattgttattgccatgctggctgtgaccatgttcgtcaccggccagtaacatcggcgtaccctgggagagcaacaacgttgttaacagggcgtgaatgctgtcgcgccgccgttcaaccaggtcaagagaaccgcctaacccttctttaccatgattgttactgtaattgttgttggtcccgtcgcgattttcttctccgtttgcttcattgtgtttatggttgaagcaaacgcagtcgcgaagcgtaaaaccgtcatgcgcggtgacgagattaatcgcggcactcggcagacgaccattacgtttaaaaacatcgctggaggcagcaaaacgcccggcaaacgcccccagaggcaaatcataatgtagccagaaacgacgggcagcatcgcggaaatgatcgttccactcggcaaacagcggcgggaaatttcccacctgataaccaccaggagcgatatcccacggttcagcaattaacttcacctgtgagagcaccgggcagttctggatagcggtaaacaacggcgcatcctgacggaactctggcgtacggcccatgactgccgccagatcaaagcggaaaccatcgacgtggcaggtttctacccaataacgcaggcaggcgctggcataatccaccaccgccggatgactcaaattgagcgtgttgccgcaaccggtccagttgtgataatcgccgtcttctcttatccaataatagctacggttatcgatcccacgcagcgagaataacgggccgtcgaggtccagttccgcactatggttgagcacgatatcaagaatgacttcgatacccgctttatgcagtgctttgattgcatcgcgaaactcatccagcgccgtttctggcgagcaggcatacgccggatgcagcgcaaacatcgccaccgggttgtaaccccagtagttacttagccccatgcgttgcagacgtggttcactggcaaactgcgccactggcagcagttccagcgcggtaatgcccaattgtttcaaatagttgatcatcaccggatgcccgagggctttataagtgccacggatctcgaccgggatctccgggtgcaagtacgttaatcctttgacatgggcttcataaatgatggtgctgccccacggcgtgcgcggcggggcatcatcttcccagtcatagtgatcaaccaccactacgcatttcggcgcaatggcggcgttgtcgcgatagtcaggttcattatgaccggcgtgcagcagcgggttatctttaaactccccctcaatttgccgcgcgcaaggatcaatcaacaacttcgccgggttaaagcgatgcccctcggcgggttgccaggggccatgaacgcgataaccataacgcaaacccgggcgcgcatccggcagataaccgtgccaaatgtcgccactgtgccctggcaagtcatagcgatgttcctggccattggcgtcaaagacacacagttctacccgctcggcatgagcggagaaaagtgtgaagttgacgccctgaccgtcgtaatgcgcgccgaggggagcgggtttgccaatggcgagttgtgtcattctgcctcccgaaccagccagatagtggccagcggtggtagcgtcaggcttagtgaatgctgacgaccgtggctggcaatctcatcgctgtgtaccgtgccgccattgcctgcattactgccgtgatagtgcatggaatcggtattgaggatttcacgccatttgcccggctggtttatgccgaagcgataatcatgacgcggcaccggcgtaaagttactggcaacgatgatttcgttaccctctttatcgcgacgcacaaagatcagcaccgagcgttctttgtcatccaccaccagccattcaaagccgtacgggtcaaaatccagttcatgcattgctttatggtggcggtaggtgaggttcagatcgcgcaccagacgctggacaccgtggtgccagttatcgccgccttccaacagatgccagtcgaggctggcgtcatggttccactcgcggccctgggcaaattcgttacccatgaacagtagtttcttgcccgggaatgcccacatccagccatagtaggcgcgcaggttcgcgaatttctgccatgcgtcgcccggcatgcggtcgagaatcgattttttaccgtggaccacttcatcatgcgacaacggcaggacgaagttttcagtgtagttgtagagaatcccgaaggtcagtttatcgtgatgatactgacgataaaccgggtcgagcttcatgtagtccagggtgtcatgcatccagccgaggttccacttgtaccagaagcccagaccgcccatatcctgcggacgagaaacgccagggaaatcggtagactcctcagccattgtcaccgcaccggaaacctgctcaccaagaatacggttggtattacgcaagaattcaatcgcttcaagattctcgcgcccgccaaattcgttcgggatccactccccctctttacggctgtagtcgcgataaatcattgacgccaccgcatcgacgcgcagcgcatcaataccaaaacgttcaatccagtaaagcgcgttaccgacgaggaagttactgacttcacggcgaccatagttgtagatcagcgtgttccagtcctgatgatagccttcacgcggatcgctgtgttcatacaagttcgtgccatcaaattcggcaagcgcaaagtcatcagtcgggaagtggcctggcacccagtcgagaatcacgttcagaccagctgcgtgtgcggcatcaatgaaataacggaagtcgtcgcgagtaccaaaacggcgggttggtgcatacaggccggttggctgataaccccaactgccatcgaagggatgctcgttaatgggcagtagttcgaggtgggtaaagcccatccatttagcataaggcaccagttgatcggccagctcgcggtagctcaaccagaaattgttgtcggtgtggcgacgccaggaacccaggtgaacttcataaatagagattggcgcatcaaactgattcgcttttttgcgctcttcagtctgtacaaccttttccggcagcccgcaaataagagacgcggtttccgggcgcatttgcgcttcgaaggcataagggtcggacttcagacgcaagttgccattggcatcaatcatctcgtatttatagagctgaccgttatgcgccccagggataaacagttcccagatgccgctctctttacgcaggcgcatcgggtgacggcgaccgtcccagtagttgaattgcccaaccaccgagacccgacgggcgtttggagcccagacagagaaacgcgtacctgtgacgccatccatagtatctgcatgcgcgcctaaggtttcatacgggcgcaggtgagtaccttcagataatagccaagcatccatttcctggattagcggaccaaaacggtaaggatcatcaatcaggttttgctgaccatgccagacaacagccaactgatagcggaaaaaattcttacgtcgcggaatgacaccgctaaagaatccccgtgagtcgagacactccagttttgcgagtttgcgcccggttttcggttcaatcacccacacatcggtagcgtcgggtaaaagggcacggacttccagtcccgcggtggttttatgcattcccagtacggaaaaaggatccgcaaaatggcctgcaattagcgcgttaatcacgtctctatcgatacgatcggacatgcttgtcttcctgttttattgtgtcaccccatccaattggatttttgacttctggttgtgacatttttttgacctgaacggcgcagcactctgtgcatcctctctgcgtcgtcctcacttcaggtaaggctgtgaatactcatgtattcagccacccttaaagaatagccaatgctctatttaactcccggtaaatcatgaaacatctgcgcttactcctgtattacgcactaacaggggcggcatcgcgccccagatttaatgaataaagattacgccagttgacgaagcatccgacgcagcggctccgcggccccccacagcagctggtcgcccactgtaaaggctgacaggaactctggtcccatattcagcttacgcaggcggcctaccggcgtggtcagcgtgccggtaacggcagctggggttagctcacgcatagtgatttcccgatcgttcggaacgactttcgcccacggattgtgcgcagccagcagttcttccacggtcggaatagacacatcttttttcaatttaatagtgaatgcctggctgtggcagcgcaatgcccgacacgcacacataaaccatctaccggaattacggaagatgtgttgaggatcttgttggtttccgcctgccctttccactcttcgcggctctgaccgttatcgagctgtttgtcgatccacggaatcaggctacccgccaacggcacgccaaagttatccaccggcagctcaccgctacgggttaaggttgtgactttgcgttcgatatcgagaatagcagaggacggggtcgcgagttcatctgccacatggccatacagatggcccatctgggttaataactcacgcatatgtcgcgcaccaccgccggaagcggcttggtaggttgcaacggacacccaatcaacaagatcattggcgaataaaccacccaacgacatcaacatcaggcttacggtacagttaccgccaacaaaagtcctgatgccattatttaatccgtcggtaatgacgtcctgattgacggggtcaagaatgatgatggcgtcatctttcatgcgcagagacgatgctgcgtcaatccagtaaccttgccatccgctttcacgaagctttggatagatttcgttggtataatcgccgccctgacaggtcacaatgatatcgagggcctttagcgcctccagatcaaaggcatcctgaagtgtgccagtggttccgccaaaagacggcgcagcctggccaagctgagaagtagaaaagaagacagggcgaatggcgtcgaagtcgcgctcttcaaccatgcgttgcatgagaacggagccgaccataccgcgccagccgataaaaccaacatttttcataagcgtttttttcctgcaaagatgtgtgctgtataaatgtgccggtctcctcttggcacatctttcaccatacaaaaagcagccaaagtcgcaagtgaaattaatcaatgatagcgaagccatcagtaatgcgacttatcctgctttgttagcacgcagaaagtccgcggcaattatcagggaatttgagttatgaatgaaatcatttctgcagcagttttattgatcctgattatggatccgctcggaaacctacctattttcatgtccgtactgaaacatactgaaccgaaaagacggcgggcaatcatggtgcgagagttgcttattgctctcctggtgatgctggtgttcctgtttgcgggtgagaaaattctggcatttcttagcctacgagcagaaaccgtctccatttctggcggcatcattctgtttctgatcgccattaaaatgattttccccagcgcttcaggaaatagcagcgggcttccggcaggtgaagagccatttatcgtgccgttggcaattccgttagtcgccgggccgactattctcgccacgctgatgttgttgtctcatcagtacccgaatcagatggggcatctggtgattgctctgctgctggcctggggcggcacctttgtcatcctgctacagtcttcgctatttttacgtctgctgggcgagaaaggggtgaacgcacttgaacgcctgatgggattgattctggtgatgatggcaacccagatgttcctcgacggcattcgaatgtggatgaaggggtaacgaggagagtttttcgaaaagaacccggtagcgtcacaactaccgggcgaacaaacttaactcaacagctggaacgcaatcatcccaacgatggcaccgacagtgccgaggatggtttccatcatggtccaggttttcagcgtttcggcttcggtcgcgccggtaaatttaccgaacaaccagaaaccggcgtcgttaacgtggctgacaacaatcgaaccaccagcgatacaaatcgacagcgccgccatttgcgcaccggagtagttcagttgttcaataaccggcatcaccagtcctaccgccgttaaacaggctacggtggcagaaccctgaatgatgcgcactgcagcggccagcacgaagcaggtgatggctatcggcaggcccatgccagttaacgcttcgcccagtgccggacctacgccagagtcaaccagcacctgtttgaacacgccacctgcaccaatcaccagcagaatgatccccgccggttgcagcgcgtgaccgcaaatctccatcactttgtcttttggcatgccctgacgcattgccaggccataaatcgctaccagacaagcaaccagaatcgcggtaaacggatgaccaataaactcgaaccattcgtaagcggtagagccttctggcacaaaacgcgcggcaatggttttcagccccaccagcaccagcggcaacaggatcagcgacaggctgaatccgaaagatggcattttgccttcgccgagatgcggttcgctgatgtcgtcaggaatatgcaactccacgtagcggctgatgaaattaccccacagcggcccggcaataatcattcccggaattgccgcacacaggccaatcaggatcatccagccaaaatcggcgttcatctgcgatgccagcagcattggcgctggccctggcaccaggaacgccgccgctgccgccacgcctgcgaataatgggattaccagcttcaccaggttcgtaccggtgtggcgcgccattgagaaagcaacgctaatcagcagaacaatcgccacttcaaagaacagcggtagcgcacagaccagccccgcaaggccgatggcataatgcgcgcggctgtgaccgaaggatttaagcattttgacggcaatctgatcgactgcgccggtttcatgtaagatcttgccaaacatagctcccagggcgacaaccaccgccaggaagccgagggtgcctcccatccctttttccatcgtcgctgcgattttatcgagcggcataccggaaaaaaggccagcccccatggacaccaccatcaaagccaggaaagcgtgcatacgcgccttcatgactaaaaacagcagcagtaaaacagaccctactgctgttaaaacaagcgttaatgtagtcactacttatttgccttttttaataacctcaatggtgcttgccacaacaccttccagcggttgatcgatatccaccaccagtacatcagtttcgtccgcacccggctcctgcagcgtttcaaactgcgtcaccaacatttgggttttaaagaaatggcctttgcgcgctttcaggcggctttcaatcacgtcaaaatcgcctttcaggtagatgaaagagagattcggattaccttcacgcagcaagtcgcgatagtgttttttcaatgcagaacagacgatcagtgacactttattagtgcgctgcatagcaaacgcggcgtcgttcagcgcctgcaaccacggtttgcgatcgtcgtcattcagcggttcgccagacgccattttttcgatattgcgccgtggatggaggaaatcgccatcaagaaacgcggcatgaagttgatgcgccacttcactggcgaccgcagatttgccgctgcccgatacgcccatcaagacgtaaatgtggtgatcatggttagtcgtgctcaaagtggtgcccccacaatacaagaattaaaaatgttacgggtaactgttatcggtaacattgtccagccggacaatatcagaagcaatatccatccgtgccttaagtgtataagtgtgagctacttcaaatttgtaggcttaaatagatccgcccggtgacaaggtgaaacctaaatctaacattttcggtgtcacagattcgccacgaatacgcgccagcaggcgttcagcgccaatactgcccatccgctcacgcggcgtcagcacgctcgctaaccgcggctccatcacctggccaatgtcatgaccgtggaaaccggcaatcgccatatcgtcaggaaccttcaatcccagacgctgacattcaaacgccgcgccgaccgccaggtcatcgttggtacagaacacgccatccagctgcggatattcccgccgcgcctggcgaatcagttcaataccggaagagtaagaagaagattgctcaaccatcacgctatacggcaccagacctgcatccagcatcgcctgttcgtatcccttctgtttgatgatagtacgttcgtcgagacgcgcgccgagataggcaatgtggcaatgcccgcgagcaataatggcggtggtcatctggcgtgccgcttcaaagttatcaaaaccgacggcgatatcgaggcacggcgactggctgtccatgagttccaccaccgggatccccgccacttcaatcatctttaaggtgcgcggcgtgtgggtacgttcggtgaggatcagtccgtcgatattccatgagagcatggattcgagacgttcttgctccatttccggtttataaccgtagtgcgccagcatggtctgataaccgtgcgcgtcggtgacgctttcgattccgcgtaatacttccgcgaaaacctggttggtgagagaaggtaacaggacgccaatcgcccggctggtggcgttagagaggatatcgggcgcacgattgggaatatagcccagttcatcaagagcggcggcaatcttgccgcgtagagcgacggaaacctgctccgggttgcgtaaaaaacggctgaccgtcattttggtcacgcctacacggtcagccacatcctgaagtacgggtcttttctttttcatcgtcctgaaggtacaaaagagatagattctcttagtttaacacggacgcatcagaaccttcccggggaaaacagtgcttgtttacaattattagatatacactaaatcaattgcatcgcattgtgctaacgacgcggcaaaaccccggaagcgtgcatcagcacgcgaccggagcgagcgaggaagcctgcaaaaaggcaggcttcaaagatgccgttgagttttaaaccggcggcagatcgaacagtaacacttcgctgtcgctatccgcatggatggagattgcctgctcatcccagattgccagaccatcgctggtcgaggctttcacgccgttaatggtgacattgcctttcaccacctggatccagacgcggcgttcagcggcaatctgatgcaccgactgctcatctttcagcaacgcccaacgatacagttccatatcctgatgcactttcagcgaaccatctcgcgcatccggcgagagcaccagctgtttgccctgcacggcatcgaagcgacgctgttcataacgcggcgtaatgccattttcttcaggcatgatccagatctgatacagatgcagacgctcggtgctgtttgggttgtactctgagtgacgaatacccgtacccgcactcataatctggaactcacccgccggaacctgctctttattgcccatgctgtcctgatgctcaacagtaccttccagcacgtaggtcaaaatttccatatctttatgcgggtgagtgccgaagccctgccctgcttcaatcacgtcgtcgttaatcacgcgcagcgcggagaagcccataaagttcggatcgtaatagttggcaaaagagaaagtatgccaggagtccagccagccatgatttgcatgaccacgttcatttgctttgcggaagtagatcatttgtattcgccccctgaatgatttcgatgagcttagtgtggacccgatctgcctgggatgatagagggtgaaaattgacccctctgttcaaaaaattgaactattcgaggggccatcaaacttacttagcgagagttactgtggagggagaggcttgctcaaatccgcgttcaaggatttccagattggtaagaacttcagattccttgacgtaatttggcgcaccgtgggtgatggtttgatacaacgcatcataaacgcgcccgtaatcgcccatctccggcttcatctcttctctgaccgtcacgccctcgtcattgacatactccagcacaccgaccgaatcatccgctgcgaatcccggttcgcccggcataatattagccttcaggctggtttcctgctggtcgataccgtatttaataaacgaacctttcttaccgtgaacgataaatttcggataatcgattttcaccagatggctggttttgacgatggctttcaggtcgccataaaacagttgcgcttcaaaggtgtcgtcaggattggctttattacgcaggctgcggatgtcataagcgacgtgatccgggcgaccgaacagagaaataatctggtccatcgtatgcacaccaaggccataaaacgcgccatcctgcggcagcccaggtttggtctctgccaccgggcggtaatagtcaaaatggctttccacttcaacaatctctcccaacttgccactttcaatcgcttttttcgctgtcaggaagcaggagtcaaagcgacgattctgatacggcgtgacggtcagccctttgcttttcgccaacgcaaacagctccttcgcctgggcaagcgtcggggtgaacggtttttcgaccagcacatttttcccggcttccagcgcgcgtttcgcgtactcgaaatggctgtccgcgtgggtgcagacaacaaccagcttaacatcgggatcgtttagtacttcgtcgagatcgctggtgaaatggatatgggaataaatgggagcctgttcttccggcttcgcatggcgacgaaaaatatgcgcgacatgccagctatccttgcggttaagtacatacggcagatggtaacgggtggtgcttttgccgaagccaataaaggcgcagttgatgaccatgatttcgtcctttttaaggtggttatttacaccttagcgcaaagcggacgtggttcctactggagtgcgcataacgaacacaagcactcccgtggataaattgagaacgaaagatcaaaaaaaagccagcacccggctggctaagtaatactggaagcaatgtgagcaatgtcgtgctttcaggttctccgcgagggtcttcctgatcgcgagacaataataatcattctcattcgcacttgtccaacactttttgcaaaaaaatgcatttgactcgcatttgaaagtcaatgatgttgaaagggacatttaccccaaagaggacaaaggaatgagtgagatagtaatacgccacgcagaaacacgggattacgaggccatcaggcagattcacgcccagccggaggtgtattgcaacacactacaggtgcctcatccttccgatcatatgtggcaggagcgactcgccgatcgtcccggcatcaagcaactcgtcgcctgtattgatggagacgtcgtgggccatctcaccattgacgtgcaacagcgcccacgccgcagtcatgttgccgattttggtatctgtgtcgactctcgttggaagaaccgcggcgtcgccagcgccctgatgcgagagatgattgaaatgtgcgacagctggttgcgggtagatcgcattgaactaaccgtgtttgtcgataacgccccggcaattaaggtctataaaaaatacggctttgaaattgaagggactggtaagaagtacgcattgcgtaatggtgaatatgtcgatgcatattatatggcgcgggtgaagtaagatagtgccctttttctgagatggaaaaagggtgtcattcaaaatcgacataccttcctttaaggtatttatttgcccaatacatatattgagatttaactcataattacttcctaaagtgtaatattttattttttaatatatacgcctacaatttcctggagtaaataaataacaattaacaagcataatattgccattgataaaatagcatgccataaaaggacttttcagggatgagtaatattgtttacctgacagtaacgggagaacaacaaggaagcatctccgcaggttgtgggacttctgagtctacaggtaatcgttggcagagcgggcatgaggatgaaatatttacattctcactcttaaataatattaataatacggggcttggttcacagttccatggtataacattttgtaaattaattgataaaagcactccattatttattaattccattaacaataatgaacaattatttatgggatttgacttctatcgaataaatagatttggtagattggaaaagtattattatatacaactaagaggcgcttttttatcggctattcatcaccagatcattgaaaaccaactggatacagaaacaataactattagttatgaatttatcctctgtcaacatcttatcgcaaataccgagttcagctatttggcactccctgaaaattataaccgtttgtttttaccaaattcaaaaaaccaaacaaataatcgtttcaaaacgttaaacagcaaagctattggcaggctacttgctgctggtggcgtatacaatgggaacattgaaggattcagagatactgcggaaaaactgggtggagatgcaataaaaggctatgatcaaatactaaatgaaaaacagcgggcatagcgatagcaacagcatctattcttttaacaaagcgttctaatgttgatacatatacagaaataaatagttacttaggcaaacttagaggtcaacaaaaacttcttgatggtatagacataatagaaataatatacattaagagaccttcaaaagacttagctaacttacgaaaggagtttaataaaactgtaagaaaaaattttcttatcaaacttgcaaaaacctccgaaacatctggaagattcaacgccgaagaccttttaagaatgagaaagggcaatgttcctctaaattataatgttcaccataaactatctctagatgatggtggtactaatgatttcgaaaatttagtattaatcgaaaacgaaccatatcataaagtttttactaacatgcaatcacgaatagctaagggaatattagtaggtgaaagcaaaatcactccctgggccattccatctggctcaatttatcctcccatgaaaaatattatggaccacacaaaatgatgactaaaacccaaataaataaattaataaaaatgatgaataatttagactatccatttgaagcaccgctcaaggaatcatttattgaaagtataatccaaatagaatttaattctaattcaactaattgcctggagaagttatgtaatgaagttagtattctttttaagaatcaacctgattatcttacttttttaagagcaatggatggattcgaagttaatggattacgattatttagcctctcgattccagaaccttcagttaaaaacctttttgccgtaaatgaattttatagaaataatgatgatttcataaaccctgatctacaagaacggttagtgatcggggatgatagcatttcaatatttacttatgacattaaaagtaacttttttgaaattagagataatattggcacagaaaatatattcagttcgtttagtgatttctcttcattcttaaacgaaatcatggacagttgttcataataatcaaaaggaaacaaaaatcattgtaaaccatgccatctttttagagattaccagcagaaaattccttgttcgaaatttagcagtgcaagctatggaaaaacttacaacggaactacactccttaagtgagatggaccgaagacatgtagtctctattttagccgaaatagctaatggctatgatgattttaatgacatgttgatttatttagaattttacccgaatcataagattctgatatcttaaataagaaaatcccgttcgacgttctgaaaaagaaatcataaaatattagcagatacttatttcgtgactatatcttatccgatgaacttttttcaaaaccagcatttaataatatctttgacgaagatgaacgcgtctttgctcaatgtatcacacaggaataataatataacactcaacaataatatttattataattatgattacttatcacgacgcattcgcgaaagcgaaccattaccttgatgatgcagatctcccggtcgtcattactctacatggacgctttagccagggctggtatttctgtttcgaagcacgagaatttctcgaaactggagatgaggccgcgcgcttagctggtaacgcaccttttattattgataaagacagtggtgaaattcattctctgggaacggcaaagccgctggaagaatatctacaggattacgaaataaagaaggctaccttcggcttgccctgacaaaatagccctcttcccacgaagagggccgctaaccttagtaccccgccgttaaatcatccaccgagcgcgggtcggatgcgccgtacaactcaccgtccggcccaaccataatgctttgtgtactgcccatcgcctctttcagcgccactttctgaccttttgcttccagcagcttgagcgtatccgggctaaaccctttttcgacacgcagctcgtccggcaaccactgatggtggaaacgcggcgcattggtcgcttcggcgacgttcatgccataatcgatgctattcaccaccatttgcagcactgtagtgatgatccggctaccgcctgggctaccggtaaccagccaggttttaccgtctttcaccacaatggtcggcgacatcgacgacagcgggcgtttgttcggcccgacggcgttggcatcaccgcccaccagcccgtaaacgttcggtacgcccggtttggcggagaaatcatccatctggttattaagcagaataccgctctcgcccgcgacaatacccgtaccgaaggtggtgttcagcgtataggtcaccgccaccgcgttaccgtctttatccactacagagtaatgggtagtttgattactctcataaggcgcaagcttgccagggcgaatctcactggacggcttcgctttgttgatatcaatttgatcggcaatggatttggcataggctttattggtcagtgcctgccacgggactttgacaaaatccgggtcgccaagatattccgagcggtcggcgtaggcgtatttctccgcttctgccatgatttgcatcacatcggcgctgccaaagccgtatttcttcatatcgaagttttccagaatattgaggatttgtacgatatggatcccgccggaggatggcggtggcatggagtaaacctgatacccgcgataatcgccgcttatcggagtgcgttcgaccgctttataggccgctaaatcttctttagtgatcaagccaccgtttttctgcatctcctgggcgatctgttccgcaatcgtgcctttatagaattcgtccgggccgttttcagcaatcatctccaggctctttgccaggttcgcctgcaccagcgtgtcgccctttttcagcggttcgccctctttccagaagatagctttgctgttttcgtgattcggcaacacttcgctaccgtaggttttgagatcgtctgccaaagcatcgttaacgataaaaccatcgcgtgccagtttgaacgcgggctgcaccactttgttcaacggcatagtgccgtacttatccaacgccagcgagaaaccagcgaccgtacctggtgtgccggaagccagatgcgaagtgagtgattttttgctgtccgggttgccctggtcatcaaggaacatatcgcgggtcgctttagcgggtgccatttcgcggaaatcgatagcggtggtattgccatttttcgagcggatcagcataaaaccaccaccgcccagattccctgcctgcggatgcgttaccgccagcgcgtagcccaccgccacggcggcatcaacggcattcccgccctccttgagaatatccacccccacctgagtggcagtggcgtccacagacgctaccattccctgtttcgcgcgtaccgggtggaagacatcttcctccacaccatacgagacgggcggcgcaggaggcgcggcggcggcgctaaaacaacttcctgagagcagagcagcaatggccacccggcgtaaaaacgtcggttttatcatcgttattctccagagattaaggggcaaccccagctaagcctggtatataactctgaattaatcatcgttttgtcgggaagcgagtaaacttaaaggatatcttcagaggaggatacgcgatgaaacgacttctgattcttacggcactcctgccgtttgtcggctttgcacagcccattaatactctgaacaaccctaaccagccggggtatcagatacccagccagcagcggatgcaaacccagatgcagactcagcaaatccagcaaaaagggatgctgaatcagcaactgaaaacgcaaactcagttgcaacagcagcatttagaaaaccagataaacaataattctcagcgggtgttgcagtcacagccgggggagcgaaatcccgcccggcagcaaatgctgcccaacaccaacggcgggatgttaaacagcaaccgtaatccggatagttcgttgaatcagcagcatatgctgccggagaggagaaacggcgacatgctgaatcagcccagcacgccgcagcctgacattccgttgaaaactattgggccgtaaagttcggaccaatcacgtcaatcgcatcggtacagatgcaatccacgccccagcgcagcaactctgccgcgcgctggggtttattgacggtataaaccagaatccgcagtccggcgtctttcaactgcatcactcgcactttatcgagtaacttatgattgagatgaatagagacgcagcccagccgcgcggtcagttcgcgccagtcgtcgcgccactcatcaagcaataaaccacgcggcagttccggtgccgccagctgtgcagcttctaaagcatcaatctcaaacgatgacagcagcggcggcgtcataccggcccacagttggcgtgccgccagcgccaccattttgcccgttaatggtccagtgccagtggtgggtttgatttcgatattcgccatcatcccgtgttcgcgacagcgttccgccacctgcgaaagcaacggcagcgactcacctttaaacgctttgctgtaccaactgcccgcatccacgcgcagtaaatcctgccagttcagttcacccgcgacgccccagccgttgctggtgcgttcgagattgtcgtcatggagcaggaagatctcgccatctttcgataacttcgcgtcaaattcgatcatcttatgaccgtattttgccccgacgtcgattgccgccagggtgttttccggggccagcttaccgccgccacgatgagcgacgatgcggggataaggccagttactcatactcgttgtcctgtttcaccatcaaaaagatgcagctgattttccgccagatgcagccacagcgtgctgcctgccgtcgggcgctcctgatgcgccagtcgcaccaccagcttctgctcgccccagcgtccgtgcgccaggttatctgcgccgaggatctccagcgtgtccatcaccagcggtacgccgccttctgcctgcgagcttagcgcaatatgttccgggcgaatgccgagagtcattttacgcccggcatactgacggtagccaccgtttagcggcagctcaataccgccgtccagttcgaaatgcgtgccttcgttattcacgcggcctgtcagcaggttcatcgccggactgccgataaaactcgctacaaacaggctggcgggcttttcgtagacttcaactggtgtgccaatctgttcggcaacgccgccgttcatcaccattactcgctgggcgagcgtcatcgcttcaacctgatcgtgagtaacgtagagtgaagtcgttttcaggcgacggtgcagctgttgcagctcaaggcgcatctgcacgcgcagcttggcatcgaggttagagagcggctcatcaaacaggaacaccgccggatcgcgcacaatcgcgcgacccatcgccacacgctgacgctgaccgccggatagctcgcgcgggcggcgcttaagcaggccatccagctccagaatgcgcgccgcttctttaacgcgctcggctatttgctgcttgcccatgccgcgaattttcagcccccacgccatgttttcttcgacgctcatatgcggataaagcgcgtagttctggaacaccatcgcaatcccgcgatctttcggctccatttcggtcacgcgctggtcgttgatccagatatcgccttccgtcacccgctccagcccggcaaccatgcgcagcagcgtcgattttccgcagccagacggcccgaccatcacgataaattcgccatccgccacatcaagggtcagtggtttaatcacctgggttttgccatcccagcttttggttactgcctgtaatttcagtcctgccatcttatttctcactatcgaccaggccgcgcacgaaggcacgctgcatcactaaaacaatcaccaccggagggataagcgttaacaacatcgccgccattaccgagttccattccgtggtgccttcgccagtggcgatcatccctttgatccctgccacggtggtgccgagatcaacgtcggtaataatcaacaacggccacaaatactgattccagccgtagataaaggtgatcacaaacagcgccgccagattagttttggagagcggaaaaacgatgtcgcaaaagaagcgcattggcgatgcgccgtcgatccgcgcggcttccaccagctcatccggcagcgtcataaagaactggcggaacaggaaagtagcggtcgccgaggccatcagcggcagcgttaaaccggcgtagctgtcgagcatctgcaggttggcgatgacttccaccgtcgggaagatacgtacttcaaccggcagcatcagggtgataaaaatcatccagaagaagaggttacgtagcggaaaacgaaaccagacaatggcaaatgccgagagcatcgagacggtaattttgccgagcgtaatgctgaacgccatcacaaagctgttaagcaacatccgccagaacggcgcgctattcgtgcctaccccgttcacccagatgttgtggatgttttccagcagatgtgtgccggggatgagcgtcatcggcgcggcatagacggcctgtttatccagcgtcgccgcgacaaacgccacgtacagcgggaagaggatcaccgcgatcccgaggatcagcatggtatggctgaatatcgtcagccacggacggttctcaatcattggtaacgcaccttgctttcaacatagcggaactgcaccaccgtcagcacgatgacgaggaacatcaacaccaccgactgtgcggcagacgaagccagatccagtccggtaaaaccttcgcggtagatcttataaatcagcgtcgtggtggcctgaaccggcccgccggacgtggcggcgtcgatcaccgggaaggtgtcgaagaaggcatacaccaggttcactaccagcaggaagaaactcaccggggcgataagcggcagcgcaatcttaaagaagcggcgaatcggccctgcaccgtcgatggctgcggcttcgatcaacgaacggggaatggattgcagcgcggcatagaagaacaggaagttgtagctgatttgcttccatactgaggcaaacaccaccagaaacattgcctgaccgctgttttgcgcgtggttccagtcgtagccgaactccgcgagaaaatgggtgatcagcccgcgaccggggttaaacaggaagatccacaatacggcggcaacggcgggagccacggcgtaaggcagcaacattaaggtttgatagaaacggctgccgcgcacgatgtactccaccagcgccgcgaagaacagcgacaccagcaaaccgctgacggtgacaaaggtgctgaattttatcgtcgtccagaaggagtcgagatagtagctgtcatgaaacagcgcgacgaagttatccaggccgacaaactggctggagaaaccaaacggatcgacgctttgtagcgagtaccacaacgcttcgcccgcaggccagataaaaaagataacggtgatgatgagctgcggcgcgaccagcagataaggcagccagcgcgagcggaacaccggacgggatgatgacattacggttaattcctgaactgtgccggatgcgcttcgcttatccggcctacacgcgatgccaggtcagataagcgaaacgcatccgacattacactgattaagacttcgtcgatttctcaaagcggcgcagcaactgatttccacgctcaacggcggtatccagtgcctgctgtggtgtcttcttaccggtccacacgctctccagctcttcatccacaatcacgcggatctgcggcatgttgcccagacgcagccctttggtgaacggcaacggcggcttattcagcatctgacgcgtcgcggtatccgcccctgggtttttctcataaaagccctgctcacgggtcaggtcatacgctgctttggtgattggcagataaccggttttctgatgccactcggcagcgttttctggcttcgcgaggaagtcgaggaacttcgccacgccggtatacgtttctttatttttgccctgcatcacccacaggctggccccgccgataatggcgttttgcggtgcatctttcgcatcggcgtcgtaaggcatcatgcctacgccatagttaaatttggcgtactcacgaatattagcgagagaaccggaagaggcggtggtcatcgcgcaatcaccgttatagaacttctcggtggattcatccttacgaccgacgtagctgaagtcgcccttcttgttcatctcctcgagcatggcgatgtgtttcacctgctccggcttgttgaactccagcaccgcgtccgtgccgtcaaagccgttgtttttgctggcaaacggcagaccgttccaggcgctaaagttttccagttggatccagccctgccagccgctggcgtagccgcacttcataccggaggctttcagtttcgcggcatagtccgccagatcctgccaggttttcggcggttgttccgggtctaatcctgctttcttgaaggcgtctttgttgtaatagagaacgggggtcgagctgttgaatggctgggagagtaagtggcccgttttgctgtcggagtagtaaccggaaaccgtcggcacaaactgcgactcatcgaattgaatccccgcctctttaaacacgtcatataccggtttaatggctttcgatgccatcatggtggcggtgccaacttcataaacctgcaaaatagccggagcgttgccggtacgaaatgcggcaatccccgcgcttaaattctgttcgtagttgcctttataggtcggtacaattttgtaatccggattttcggcgttaaaacgttgggccagagaatccacctctttacccagttccccttccatagaatgccagaacggaatggtcgtcactgcctgtgcattccccattaacgccagtccgagcgccagtgctgaagctgtataatgtaacggtttcatcgtttatctctcttgttgtaccgaatgcgcgaattcacgcgttttatgctcgcggggtaacatgacatgctcgaattacagaaaaataacttttttgttacatttgtaagatagtaaggtgtcagaaagatgacaaggcggtgacggcgtgggtgagggaaaatgggagatggggcacggataagcggaaaatagaaggtctgaatcaaactctacagattactcatcgtttcatgccggatgcggcgtaaacgccttatccggcctacaagatcgtgcaaattcaatatattgcaactcacccagtaggcctgataagcgcagcgcatcaggcaattttacatttgtcacctgtctcaaaggagtcttttgactcctcatcaatcaacgtgttattacccgcctaaatacgcacttctcactgcttcgttcgccagcagcgcgtcgccggtatcggagagcaccacatggccgttttccagcacgtagccgcgatccgccagctttagcgcctggttggcgttctgctcgacgaggaagatagtcatcccctgctcgcgcagctgctcgatggtgtcgaaaatttgctggatgataatcggcgcaagaccgagcgatggctcatcaagtagcagcaaacgcgggttgctcatcagcgcgcgaccaatcgccagcatttgttgctcaccgccggacatggtgcctgcccgctgaacacggcgctcatgcagacgtggaaacagttcatacacccactttatgcgctcctggaactggtcgcgttcggcaaaaaagccgcccatcgccaggttctcttccaccgtcatccgcgagaagacgcgacgcccttccgggacaatcgctaccgcttcgcgcatgattttcgccgtctgccagtcggtaatgtctttatcatcaaacacaattcgcccgctggtggcgcgcgggtcgccgcataatgtgccgagcaaggtggttttccccgcgccattcgcgccaataagggtgacaatttcgccctgattgatatgcaggctcacctcatgcagcgcctggattttgccgtagtgggcgctgactttgtcaaaggacaacatgactttttccatcttatgcctcacctaaataggcacggatcacgtccgggttattacggatctgctccggcgtaccgtttgccagtggcgtcccctgattgaccacataaattcggtctgaaatccccatcaccagcttcatatcgtgttcaatcaacaagatagtggtgttgtgatgattgcgcagttcggcaatcagctcatccagctctttggtttcttttgggttaagacctgccgccggttcgtcgagcattaaaatctccggctgcgtcaccatgcagcgggcaatctccagacggcgttggtcaccataggccaggttactcgcctgacggttggcgtgttccagcaaaccaatgcgctcaagccaggtggcggcgcggtcgagcgcttcgctctgggcgcgacggaaagaaggcgttttcaacaggccagagaacagcccggttttcagttgttgatgctgcgccaccagcaggttttcaatcaccgtcatttcacggaacagacgcacatgctggaaggtacgcaccacgcccatgcgggcaatttgctgccccggtaaaccttccagatgctgatcacgcagtaaaatagtgccgccggtgggtttgtagaatccggtcaggcagttaaaaaccgtggtttttccggcaccgttagggccgattaacgagacgatctcctgcgggtacagttcaagattgacgttgttcaccgccagcaagccgccgaagcgcatcatcagaccgttaacagataataatggctgactcatgcctgctctcctttcgctgcgccgtttttcagcttcagttgcgggcgcgtcatgggcagcaagccctgcggacgccagatcatcatcagcaccatcaaaccaccgagcattaacatgctgtattcgttgaaatcacgcatcaattcgcgcgataccaccagcaaaattgccgccagaatcaccgcaaactgcgatcccataccgccgagcaccactatcgccagtacaaacgccgattcagcaaaggtgaaggattccgggctgacaaagccctggcgcgcagcaaacagcgttccggcaaaaccggcaaacgcggcacttatggtaaaggcagtcagcttgatacgacgcgggcttaagcccagcgaacggcaggcgatctcgtcttcacgcaacgcttcccacgcacgccccagcggcatccgcagcaggcggttaatgacaaacaggcttagcaccaccagcagcaacgccaccaggtagaggaagatgacacgatcggagggatcgtatttcaggccaaagaaattactgaacgtgtcccagccgccttcacgagcggtacggctgaactcgagtccgaagagtgtcggtttcgggatctgactgattccgttcgggccgccggtaatttcggtgttattgagcagcaatatgcgcacaatttcgccgaaaccgagggtaacgatcgccagatagtcgccgcgcaagcgaagcaccgggaagccgagcaggaagccggccgccgctgccattaacccggcaatcggcagacaggtccagaagcccaggccgtaatagtgattgagcagcgcaaaagtgtaagcgccgatggcgtaaaagccgccgtaccccagcaccagcagaccagaaagaccaacaaccacgttcagcccgaggccgaggataatgtagatcatggtcagggtggcgatatccaccgtcccacgcgacaccataaacggccacgccaccgcaagcaccagcagcgccacgaggaatagtttctgcttcaccgtggagccatcaatcgcgggcagaataaacttcggtccggaaacgctttttagccctttctggaaagccggtcgcaaaagctggaagaaaaagaccaccgccgtgccgataaacacccactgccaacggacatccgaagcgctgtcgaccaccagtttggtgccatccagctccagttgcacgcccataaagacgcccgccaggacaaaaaacatcgcggcagagagcagcgccattgcaatatgcatcggtttcatactttctctacctccgggcgacccagaataccggtcggcatcaccagcagcaccagaatcagcagggcaaatgaaaccacatccttatattccgtactcagataggcagaagagagcgcctccgcaatccccaggatcagcccaccaatcatcgcccctggaatgctgccaatcccaccgagcaccgcagcggtaaaggctttcatcccggccataaagccgatgtaggggttaattacgccgtagaactgaccgagcagcacacccgccaccgccgccatcgccgcgccaatcacaaaggtcagcgcaatcacccggtcggtgttaatgccaagcagactcgccattttcagatcttccgcgcaggcacgacaggcgcgccccatacgggaatagcgaatgaaaatcgtcagcgccagcatggcgaggaaggtgacaatccagatcaccgcctgcatggtggtaatagaggcagagaagttttcgctatggcccaccacccactgaccgttaaacaggctgggcagcgccacatcgcgcgaaccttcggtcaggctgacgtagttttgcaggaagatggacataccgattgcggaaataagcgcaatcaggcgcttagaattacgcaccgggcggtaagccacccgttcgatactccagccgtaggcgctggcaatgacgattgcgccgacgaatcccgccgccaccagcagccagccggtatcaatgcccatcatcatcagcgcggcgatgatcataaatgagacgtagctgccaatcatataaacctcgccgtgggcgaagttgatcatgccgataatgccgtaaaccatggtgtagccgatggctatcagcgcgtaggtactgcccagcgtgacgccgttaaacatctgctgcaagaaatacaaaaactgctcagacataaggtaacctttctaaacccgcccgcattttacgggcggtgggatgatcacttggctgccgtggatgaaccgtcggcgtgccactggaagacaccaaaatcaaatcccttaagatcgcctttttcatcccagttcagcggcccaatcacggtgtttgcaccgttagcttttaaatctttcaccagcgccagcggctcatcgctgccagtacgctcaagggcagtcgccagagattgcaccgccgcgtaggtgatccagacataaggcccggacggatctttcttgtctgctttcagcgcatcaacgatgccctggtttgccggatcctggtcatagcgttttggcatagtgaccaacatgccttcggcagcatcaccggcaatattcgacaatgatgcgttacccacaccttccggccccataaactgagttttcaggccaacggaacgggcctggcgcagcatctgccccatttccgggtagtaaccgccgtagtaaacgaagtcgatgttttcttttttcaggcgggcgatcagcgcggagaaatctttctccccggcggtaataccgtcgaagaagacgacgttggcgttagccgctttcagcccgtcctgcaccgaacgcgccagcccttcgccatactgttgtttgtcgtgaatgatggcgatgcgctggggcttcaccgtctcaagaatgtattttgccgccgttggcccctgggaagagtccagcccggcagtacgcataatgtgttgataaccgcgttgggtcagctccgggttggtcgctcccggcgagatcatcagaatacccttcgtcttcgtagatatctgatgcaggttgggtagaagaagaacacagatgaccaataacgtatttaatgccgtcgttaacgattttgttggcgaccgcaacggcttgtttcgggtcgcaggcgtcgtcatattccacgcccaccagcttatcgcctttaattccccctttggcattaatgtctttaatcgcctgacgcgcgccgttaaattccatatcgccccactgggcaatcgggccggacatcgcgccgacaacggcgactttaatatcgtcagccatagcggtgtgtgaaattgccagtgcaatcatccctgcgatgatagttttcgcattccgtttcatagtcaaaaatccccattcgtgatgttgtgttgctttgtttttatgtgttaacaaatcagactgttctttttttatactgcactgtttttgcctgtctgattaagggtttagcgcagtattttgtgataatagtgattaaaatccctatttttcagtcgattaagaacagataatattctgaatttattgatagataaacagaaaaaagtgcctttgtcagcataaaataacggcacaaagggcggaataattcactatcattcaggggattatgctgggtatttttcattctataatgttttaactttgtaattattgctgttaaaaaattaatcacctgccaaaagaaataaaaaagagaaagcctccgattaaattatttcgctacactggttccacttttgtgatttacacgggttacccatgaagctgaccatcattcgattagaaaactttagcgaccaggaccggattgacctgcaaaagatctggccggagtattccccttcctctttacaggttgacgataaccaccgcatctacgccgcgcgttttaacgagcgcctgctagcggccgtgcgggtaaccttaagcggcaccgagggagcactggattccctgcgcgtgcgggaagtcacccgccgtcgcggtgtggggcaatatctgctggaagaggttttgcgtaacaatcctgccgtttcatgctggtggatggcggatgcaggcgtggaagatcgcggtgtgatgacggcgtttatgcaggcgctggggtttacggcgcaacagggcggctgggagaagcgttaatcgtcaagttgatttcaaaagtgatgaccaacgagaaattgcctgatgcgctacgcttatcaggcctacaatgtgtgttgcaatttactgatttctttggatcttgtaggccggataaggcgtttacgccgcatccggcatgaagcaacgtactcgatattagcaatttggcggcaacccaaagttgccgattaatgattacttcgcatcggtcgccgtgccgttggcgtgccagtcaaatacgccgaactcaaagcctttcagatcacctttctcatcccacgtcagcggacccatcacggtatccacggagttcgctttcaggtatttggcgatctcagccggatcgtcagactgattcaggcccgcctgcaaagattgcagcgcggcgtaggtggtccaaacgaatgcgccgcttgggtcctgttttttcgctttgatggcgtcaacaatgggtttgttcgccggaacctgatcgtagttcttcggcttggtcaccagcagcccttccgctgattcgcccgcaatgttagacagcgaaacgttagccacaccttccggccccataaactgagttttcagccctgccgcgcgtgcctgacgcaggatttgccccatttccgggtgataaccgccgtagtaaacgaagtcgatattctcttttttcagacgggccaccagcgttgagaaatctttttccccggcggtgataccatcaaagaacaccacgttagcattgcctttcttcaggccgtcctgcaccgctcgcgccagaccttcgccgtattgctgtttgtcgtgaacgatagcaatacgctgcggtttcactttctcaagaatatatttcgccgccgtcggcccctggtcggagtccaggccggtggtgcgcaggatcagctgatagccacgggcggtcagctccggcgcggttgccgctggggtgatcattaaaatgccttcgtcttcgtagatgtcagacgcaggctgcgttgatgaagaacagaggtgaccaatcacatatttaatgccgtcgttaacgactttgttcgccaccgcaaccgcctgtttcgggtcacaggcatcgtcatattttacgatttgcagtttgttgcctttaatgccgcctttagcgttgatatccgcaaccgcctgctctgcgccggtaaactcctggtcaccgtactgcgcaaccggaccggacattgcgcccacgaccgcgactttaatatcttctgccagagccatattgctgaatgccagcgcgatacatcctgccagtaacgctttaccctttatgttcatcctgagaatccccattcttctggttattacgtgtgttgtggtgttgtgattcagcactttatttcgttttatgcatgactacccgtgctttagcagcatactctgctaaaacataccccatttttatgatattggaatagctattttgacagtttattaacaatctgcgtggggattgacgttttgccggagggggaattgattattgtagaggcccaaaaaacaaaaaccccggactctcatccagggttctctgcttaatagcggaaattacgcttcaatagcggcgcgaagttttttcatcgcgttcttttccagttggcgcacacgttcagcggaaacaccgtaacggtcagccagttcctgcaacgtggacttgttgtcttcgtccagccagcgcgcgcggatgatgtcctggctgcgttcgtccagaccttgcatcgcgtcggtcagacggtttgccgcctgctcttcccagttatcatcttcgatgccgtcggcaaagttagatgatttatcctgcagatagagcaccggtgccatcggctggctgtcggaatcgtcgtcggaagacaggtcaaaggtcatgtcctgtgccgccatacgtgattccatctcacgaacgtctttgctggttacgcccagttcacgggccaccatttcgacttcatcctggttaaaccagcccagacgctgcttagttttacgcaggttgaagaacagtttgcgctgcgctttggtggtcgcaactttgacgatacgccagttacgcagaacgtattcgtggatctctgctttgatccagtgaacggcgaaggagaccaggcgcacacccacttccgggttgaaacggcgcactgctttcatcaggccgatgttaccttcctgaatcaaatccgcctgtggcaggccatagcccgcataattacgagcaatatgaacaacaaaccgcaggtgagacagaatcagcgttttagctgcttccagatcgccatggtaatgcagcttttcagccagcgcccgctcctcgtcagccgacaacatcggccacgcgttagctgcccggatgtaggaatccaggttgccaactggggctaaagctaaactttgcattttgtcagtcattcaaatcctctcaatcgatatcttctggcgcttcagtggtagcaacaactgtgccagagcttaagagcaacgaggttatcattcactgttttatcagaccgtgattttatccacaagttcaatgcaagcttatgaataaattacgcacaaaatgtgacatagagatgaaataccgggaagagacaacgggatctctttccctgctacggaacccattgcagggaaagagtataacacgcttttattattcaggcgtaaagtggcgtaaatgttgtaccgtggcaagccacgctgccacccagccaatcatcgagcataccagcagcaatagcaggcattcatcgaacgataaaccattgatatcaaacttcgttccgaaaacctgtgccacttctgcaaccgccgatgacaaacgcagtaccagaatttctgacaaaattaatgacagcaatgcgccagaaaatcccagcaatgcgcctccgtacaggaacgggcgcaggatgaaaccatccgtcgcaccaatcagtttctgcacgttaatggagtcacggcgagcaaagatgctcagacgcacactgttgccgatgacgaggaacactgctgccaccatcaacacgccgatcatcgcggaaacgcgcccgaccagcccggtcaacgccgccagacgggcaaaccagctgtcatccatccgcacttcgtcaatgccgttaatctgggtgatacgatcacgcagcgtattcagtgattccgtcccctgaaaatcgagtttcgggatcaccaccgccactgccggaagcgggttttcttccagcatatccagcgcaccaccaaaaccagaccagttacggaactcgcccagtgcgtcttcacgagaaagatagttcactttctccacgccctgctcggcctgtagctgtgctaccacgcctgctgcggcgtcatcgtccagcgttttttgcaagtaaacagtgatttgcggtgacggataatattgcgtcgccgcctggttaacgtttttgtacaccatataacagacgctgggcagcgtcagggagatggcgataaccatcaccgttaaaaacgtggcgaacggtttgcttttcagatcctgcaatgcgccgtggaaggcatagcgcacctgttcgttgaaaacgttggttttgcgatttaccggttttggcgaggatttcgcgcgttttggcgcgttacgaccgccgtcgccagagccgccgaccgatttacggaagcgatccagacgcccgccaaactgccgaatatgattgattgcatcgcgcttattcatggcccacgcctccatgcaagtgaccatcgctcagggtgagcatgcgataggaacgccgcgagatcaggttgatgtcgtgcgttgccatcaatacggttaccccaacgcggttaaactcttcaaacagacgtagaatcccttccgacaacgcgtcgtccaggttaccagtcggttcgtccgccagcagtaccgcgggcttgttcaccaccgcgcgggcaatgccaacacgctgttgttcaccgccagaaagctgaatagggaagttcttcgctttgtccagtagcccgactttatccagtgccgccgacacccggcgacgaatatcgtcaccgctggcaccggcgataatcagcgggattgccacgttatcgtagacagtacggtccatcagtagatggtgatcctggaaaatcatgccaatctggcggcgcagaaacggaacttcacggtttttcagacgcgtgatgtcatggccgctaaaccagattttcccggcgctgggccgctcaatcccacagatcagcttcaggagggtacttttccctgcgccggaatgaccggtcagaaacgccatctcacccggctgcatatggaacgtaacgccctgcagcgcctgtctcccaccgagataagccttgctgacatgttcaaagcgaatcattgttaatcctctcgggcaaaaagtgcctctataaagtcgtccgccttaaacggacgcaaatcctcaatacgttcgccgacaccaatgtagcggatagggataccaaactggtcagccaccgagaaaattaccccgcctttcgccgtgccgtccagtttcgttagcgtgatgccggttaagccaacagcttcatggaacagtttggcctggcttaccgcgttctgcccggtgctggcatcgatagtcagcataacttcatgcggcgcttcaacgtcgagtttcttcatcacgcggacgattttcttcaactcttccatcaggtgcgatttgttctgcaggcgtccggcggtatcggcaatcagtacgtcaacattacgcgccttcgcagcctgaatggcgtcgaagataaccgaagcggaatccgcaccagtatgctgggcaatcaccgggatattgttacgctgaccccagacctgaagctgttcaaccgcagctgcacggaaagtatcgcccgccgccagcatcaccgatttaccctgctgctcaaactgacgcgccagcttaccaatcgtcgtggttttacccacaccgttgacgcccaccatcaggatcacgaacggcgttttaccttcaacattcagcggctcatcgactttcgccagaatctcgcccatctcttctttcagcaggccatagagcgcctcggcatcacgaagctgcttgcgggatgcgccttccgtcagattggtgataattttacgtgtggtttccacgcccacatcggcgatcaacagctgttcttccagctcctcaaacagatcatcgtcgatttttttaccgcggaacaggctgataaatccggaaccgagattttctttggtttttaacaggctgcgtttcaggcgcgcgaagaaaccttctttggtcggtttttcctgctcctgagcgatttcttccaccggctgctcttctaccggaggaaccaccatcaccgcctcttctgccgcttcggcagccagcgcctgtgcttccagctcttcgtcggtgatttcttctttagccgcttcttcttccgccgcttcgacaatctctacggtttccgcttcagcctgccactcttctggcgaaacctcttcggcgttgacgtcttccggcaacggcagctcttcacgttcgatagccactggctccgccgtttcttctacgaccggttccggctgtgcaacgacttccgcttcaggctgcgctttttcactttcagcaacctgttcagtgacttccacaacgtcggcagcaaaagtttccgcctcggcttcagtatgcgcctgcggttgctcttcgacggcttgttcagaagccttcgcaggctcttgcgcctgaacgatttcttctacaaccggttgttcattctgaacttctgtctctttttccggggtctgctctttttgaccaaagcccagccaggaaaaaaagccacgttttttttctttcgccatttgcgactacactcctcgctgttgcttcatggcacagcgttaacgctatgtacatagcagctaaaaaatgatgaaatagtctatcacttaacttaattcacatcaccgcctgcaagtatgtgttatctggcggattgagcaatttatcatgaaaaaaccgaatcattccggcagcggccaaatccgcattattggcgggcagtggcgaggccgtaaactcccggttcctgatagcccaggtctgcgccccaccaccgaccgcgtacgcgaaacgttgtttaactggctggctccggtcattgttgacgcccaatgtctggattgcttcgccgggagcggcgcgctggggctggaagcgttatcgcgctacgctgcgggggccacgttgattgagatggatcgcgcagtttctcagcagttaattaagaatctggcgacactaaaagcaggcaatgcacgcgtggtgaacagcaacgcaatgtcattcctggcgcaaaaaggcacaccgcataatatcgtgtttgtcgatccaccgttccgccgtggcttgttagaagagacgataaatttactggaagataacggctggctggctgacgaagccctgatttatgtcgaaagcgaagtcgaaaacggtctgcccactgttccggcaaactggtcattacatcgggaaaaagtggcgggtcaggtggcttatcggctgtatcaacgcgaagcacaaggagaaagtgatgctgattaatattggtcgtttgttaatgctctgcgtttggggatttttaatcctcaatctggtgcatcccttcccgcgcccgctgaatattttcgttaacgtggcgctgatttttaccgtgctgatgcatggtatgcaactggcgctattgaaatccactttaccgaaagatggcccgcagatgaccaccgccgaaaaggtgcggattttccttttcggcgtgtttgaactgctggtctggcagaagaaatttaaagttaaaaaataaccttattgttcgcctacaaagctgacaaagcgcgttcctttatagctcagcgtacctttatcgcccactgtcagggcgtggtactgctgggcgtcgaggcgaaacgtctgctccattcctccgctttgcggtttgaagcttgcctcatagcgcatactggtgcctgccggagtcacttcctgctggcgcgaacggcgatcgttaatcggtttttcccgcttgttgctcaccaccaccagcttttgctggagcggagccatatcattatcagctttttcccgtcgctgttgcataaaacgaaacgatgcggcgacgacaattaagccaatgataacaataaagaaaagaggtggtttgctcatctttatccctcatcggaaaatgcggaaataagcataccctgccagttatggtgttgtcatccgtccaccctcgccactaaactggaagcaagaccgtaggcattccgcttacgaaaaaataacgaattcaaggaactaagatgctttggtcgtttatcgctgtctgtctttccgcatggctatctgtggatgcatcgtatcgtgggccaacctggcaacgctgggtgtttaaaccgttaacccttcttctcctgctgttactggcctggcaagcgccgatgttcgacgccattagctatctggtgctggcagggctgtgcgcctcactgctgggcgatgcgctaaccctgttgccacgtcaacgtctgatgtacgccatcggcgcgtttttcctctcgcacctgctgtacaccatctatttcgccagtcagatgacgctctctttcttctggcctctgccactggtgttgctggttctgggcgcgctgttactggcgattatctggacgcggctggaagagtatcgttggcctatctgcacgtttatcggcatgacgctggtgatggtgtggctggcaggtgaactgtggttcttccgtccgaccgctccggcactctctgcgtttgttggcgcttcattgctgtttatcagtaactttgtctggctgggtagccactatcgccgccgcttccgggcagataacgcgattgctgcggcctgctactttgccggtcatttcctcatcgtccgctcgctgtatctctgataaaacttgactctggagtcgactccagagtgtatccttcggttaatgagaaaaaacttaaccggaggatgccatgtcgactcctgacaatcacggcaagaaagcccctcaatttgctgcgttcaaaccgctaaccacggtacagaacgccaacgactgttgctgcgacggcgcatgttccagctcgccaacgctctctgaaaacgtctccggcacccgctatagctggaaagtcagcggcatggactgcgccgcctgtgcgcgcaaggtagaaaatgccgtgcgccagcttgcaggtgtgaatcaggtgcaggtactgttcgccaccgaaaaactggtggtcgatgccgacaatgacatccgtgcccaggttgaatctgcggtgcaaaaagcgggctattccctgcgcgatgagcaggccgccgacgagccacaagcatcgcgcctgaaagagaatctgccgctgattacgctaatcgtgatgatggcaatcagctggggtctggagcaatttaatcatccgtttgggcaactggcgtttatcgcgaccacgctggttgggctgtacccgattgctcgtcaggcattacggctgatcaaatccggcagctacttcgccattgaaaccttaatgagcgtagccgctattggtgcactgtttattggcgcaacggctgaagctgcgatggtgttgctgctgtttttgattggtgaacgactggaaggctgggccgccagccgcgcgcgtcagggcgttagcgcgttaatggcgctgaaaccagaaaccgccacgcgcctgcgtaacggtgagcgggaagaggtggcgattaacagcctgcggcctggcgatgtgattgaagtcgccgcaggtgggcgtttgcctgccgacggtaaactgctctcaccgtttgccagttttgatgaaagcgccctgaccggagaatccattccggtggagcgcgcgacgggcgataaagttcctgcaggagccaccagcgtagaccgtctggtaacgctggaagtgctgtcagaaccgggtgccagcgccattgaccggattctgaaactgatcgaagaagccgaagagcgccgcgcccccattgagcggtttatcgaccgtttcagccgtatttatacgccagcgattatggccgtcgccctgctggtgacgctggtgccaccgctgctgtttgccgccagctggcaggagtggatttataaagggctgacgctgctgctgattggctgcccgtgtgcgttagttatctccacgcctgcggcgattacctccgggctggcggcggcagcgcgtcgtggggcgttgattaaaggcggagcggcgctggaacagctgggtcgtgttactcaggtggcgtttgataaaaccggtacgctgaccgtcggtaaaccgcgcgttaccgcgattcatccggcaacgggtattagtgaatctgaactgctgacactggcggcggcggtcgagcaaggcgcgacgcatccactggcgcaggccatcgtacgcgaagcacaggttgctgaactcgccattcccaccgccgaatcacagcgggcgctggtcgggtctggcattgaagcgcaggttaacggtgagcgcgtattgatttgcgctgccgggaaacatcccgctgatgcatttgctggtttgattaatgaactggaaagcgccgggcaaacggttgtgctggtagtacgtaatgatgacgtgctgggtatcattgcattgcaggataccctgcgcgccgacgcagcaactgccatcagtgaactgaacgcgctgggggttaaaggagtgatcctcaccggcgataatccacgcgcagcggcggcaattgccggggagctggggctggagtttaaagcgggcctattgccggaagataaagtcaaagcggtgaccaagctgaatcaacatgcgcccctggcgatggtcggtgatggtattaacgacgcgccagcgatgaaagctgccgccattgggattgcaatgggcagtggcacagacgtggcgctggaaaccgccgacgcagcattaacccataaccacctgcgcggcctggtgcaaatgattgaactggcacgcgccactcacgccaatatccgccagaacatcactattgcgctggggctgaaagggatcttcctcgtcaccacgctgctagggatgaccggactatggctggcggtgctggcagataccggtgcgaccgtgctggtaacagcgaatgcgttaagattgttgcgcaggagataaggcaaaccgatcgcaacattgagcgcgatcggtcccctcgctcctctggggagagggttagggtgaggggaaaaggcggcatcgaagccaatctttccccatcaaccgcctttacgaatcaaataacgataaggcagtccatccgtctctttcgcaaccagttcgtgttccataaaggtacaaaacccaggaatatcgcgggtcgtcgccggatcgtcggcgataatcagtaaagtttcgccaggctgcatattgcgcacggttttgcgcaccatcatcaccggttccgggcagcgcaggccaagcgcgtcgagtgtgtggtcagggctggaaaagagatcggtcattttcttctcatcacttaaaaaaacggcgctagtttacgccctgtgagtccgtaagcaaaccaggttaacgattgcgtgaaaattaaccattgcattgtcaacgtaaagcagtatcatgcggcggctcgaaaaaagggtaagcacgttattatgttaagataacagacgtgtcgtacgtattgggttccctcaccccaatggttaatcaaaaaggtacaatatgaacgttttctcgcaaactcaacgctataaggcgttgttctggttatcgttatttcatctgctggtgatcacctccagtaactatctggtccagcttccggtctccatttttggttttcataccacctggggcgcgtttagttttccgtttatctttctcgcgaccgacctgaccgtgcgtatttttggcgcaccgctggcccgacgcattatcttcgcggtaatgatccctgcgttattaatctcctatgtcatctcgtcgctgttctatatgggttcatggcagggattcggcgcactcgcccacttcaacctgtttgtcgcccgtatcgccaccgccagtttcatggcctacgcgctggggcaaatcctcgacgtgcacgtttttaaccgcctgcgtcaaagtcgccgctggtggctggcaccgacagcatccacactgttcggtaacgtcagtgacacgctggcctttttcttcattgccttctggcgtagcccggatgcctttatggctgaacactggatggaaatcgcgctggtcgattactgtttcaaagtgttaatcagtatcgttttcttcctgccaatgtatggcgtattactcaatatgctgttgaaaagactggcagataaatccgaaatcaacgctttgcaggcgagttaaaggttcgttatcagagttgtgataagatggatgaatgagccgttatggccgtttatcgaaaggaagaagtcaatgcgcaatctggttaaatatgtcggaattggcctgctggttatggggcttgcggcctgtgatgataaagacactaacgctacggcgcagggttcggtcgcggaaagtaacgctaccgggaatcccgtcaacctgcttgatggcaagttaagtttctcgctgccagcggatatgaccgaccagagcggtaagctgggaacgcaggccaataacatgcatgtctggtccgacgccaccgggcagaaagcagtcatcgtcatcatgggcgatgatccgaaagaagatctggcggtgctggcgaagcgtctggaagatcagcaacgtagccgcgatccgcagctgcaagtggtaaccaataaagccattgagctgaaaggtcacaaaatgcagcagttagacagtattatctccgcgaaaggccagacggcgtactcttccgttattctgggtaacgtgggtaatcaactgctgaccatgcaaattacgctgcccgctgacgatcagcaaaaagcgcagaccaccgcagaaaacatcattaatacgctggttattcagtaagttttaagatgatgaggcggcctcagggacgtgttccggaggccgttttttaatcgccacgtcagtaataacgcgattgcgaccagtcccgccgccgccagataaatcaccggtacgcccgcccagctcatcaccagcccagccagtggtccagtcacgccaagcgataaatccataaatacggtgtaagttgccagcgccgccccctgattttgctgcggaaccgcttttaccgccactacacccaatgccgggaacaccagcgaaaaccctgcccccgccagtaagacgccgattttcgccatccacggcatagtcgccacgccaaccagtagcaggccgattatctcaacgctaaagcaaatcatcgctacgtttaagccgccgatacggttaatgccgttagggaataacaaacgcgtaccgacaaacgcacagctaaacagcgtcagcgcgaaagccgcaccgtcccaacctttagcgtcataaaacagcgtgataaaggtggcgatgacgccaaatccggcggaagccagtgccagtgccataccgtacagccagacgcgcccaagcaccgcgcgaaacggcagcggtttgcctttactggcttttaccgtcggacgcgggatcgccaacaaaatggccaccagcgccacgcccataatgattaacgctaacgcctgcaagccgccccagtgataaaacacgacgcctaacggcgcacccatcgccatcgccccgtaagtgacaatgccgttccacgaaatcactcgcccgatatgcagcgagccaaccacgccaacgccccacagggtcgatcccgttccggcaaaactttgcccaatcccaaggatcacgcgtcccaggcaaagtaataacaggctgatgacgggcagactggcggttaatcctgccgtcagatatcccagaccgctcaaaaagcagccgcataaaccgaagacgacaatctttttggggcccagcaaatcggcgtaacgtccggcatgaggacggctcagcaaggtggcgaaatattgcaggctgataaccaatcctgcccagaaagcgctaaagcccatcacatcatggacatagcccggtaatacagcgagcggcaacccgatggtgaggtagctggcgaagttaaacatgacaatggagacaatgcgcaaattcaggcgcaatccgtttagcgcgggttcggctacgggttcgggcatgaggatcaccacatttttacaacagtgtttcatttttaccacgtgctgacgtgaaaatcagcagtaagaatcagaatattgctggcgtgactcccgctacacttaatacaaaaagtcacaaggaagccccaatggaaacccctcaacccgataaaacgggcatgcacattctgctcaagctggcctcgctggtagtgatcctcgcgggcattcacgcagcggcagatatcattgtgcagctgttactggcgctgttttttgccatcgtcctcaacccgctcgttacctggtttattcgtcggggagtacaacgccccgttgccattacgattgtagtggtggtgatgctgatcgcactaaccgcgctggtcggcgtactggcggcatcgtttaacgaatttatctctatgctgccgaagtttaataaggagctgacgcgcaaactttttaaattgcaggagatgttgccttttcttaatttgcatatgtcgccggagcgaatgctgcagcggatggactcggaaaaagtggttaccttcaccacagcgctaatgaccgggctttccggggcaatggcgagcgtgcttttgctggtgatgaccgtagtttttatgctgtttgaagtgcgccacgtcccttacaaaatgcgttttgcgctgaataatccacagattcacatcgcgggattacaccgcgcacttaaaggcgtttcgcactatcttgcattgaagacgctactcagtttatggacaggtgtcatcgtctggctggggctggagctgatgggggtacagtttgcgctgatgtgggcagtactggcgtttttgcttaactacgtgcccaatatcggcgcggtaatttccgccgtaccgccaatgattcaggtgctgctgtttaatggtatttacgaatgtattctggtcggcgcattgtttttagttgtccatatggtcatcggcaatattttagagccacggatgatgggccatcgcctggggatgtccaccatggtggtatttctttcattgttaatctggggatggctgctcggcccggtagggatgctactttcggtgccattaaccagcgtgtgtaaaatctggatggaaaccaccaaaggcggtagcaaactggcgattttactggggccaggcagaccgaaaagtcggttaccgggatgaggcgacaagtgatacgatacgcactttcattttccattaaacgttggccctgatatgtatcggatagttctggggaaagtttcgaccttaagcgcagctccactgccaccgggtttacgcgagcaagcaccgcaaggtccacgacgcgaacgctggctggcggggcgtgcattgctttcgcacacgctttccccgctaccggagatcatctatggcgaacaaggcaaacctgcatttgcgccggaaacgccgctatggttcaacttaagccatagcggtgacgatatcgccctgctgttgagtgatgaaggcgaagtcggctgcgatatcgaagtgattcgcccgcgcgccaactggcgctggctggcgaacgccgtattcagcctcggggaacacgctgagatggacgccgtgcatcctgatcagcaactggaaatgttctggcgcatctggacgcgcaaagaagccatcgttaaacagcgtggcggcagcgcctggcaaatcgtcagcgtagacagcacctatcactcctcgctgtcagtcagccattgtcagcttgaaaatttaagcctggcgatctgcacccctactccctttacgctcaccgccgacagtgtgcaatggatcgattcagttaactgatccgcccacccgactgcccatctattgatccagaacaggtaatcagtatgacgaatacttaaaatcgtcatacttatttccgccatctattttaatccattggggttaccatgctctccacactccgccgcactctatttgcgctgctggcttgtgcgtcttttatcgtccatgccgctgcaccagatgaaatcaccaccgcctggccggtgaatgtcgggccactaaacccgcacctttacacgcctaaccagatgttcgcccagagcatggtttatgaaccattggtgaaatatcaggcagacggttcggtgatcccgtggctggcaaaaagctggactcattcagaagatggtaaaacctggaccttcaccctgcgtgatgacgtgaaattctccaacggtgaaccgttcgatgccgaggcggcggcagaaaacttccgcgcagtgctcgataaccgtcaacgtcacgcctggctggagctggcaaaccagattgttgatgttaaagcactcagtaaaacagagctgcaaattaccctgaaaagcgcctactatcctttcctgcaagaactggccctgccccgtcctttccgttttatcgctccctcgcagtttaaaaaccatgaaaccatgaacggaattaaagcgccgattggcaccggaccgtggattttgcaggaatcgaaactgaatcagtacgatgtcttcgtccgtaacgaaaactactggggcgaaaagccagcgattaaaaagatcacctttaacgtcatcccggacccgactacccgcgcggtggcgtttgaaactggcgatatcgacctgctgtacggaaacgaagggttattaccgctcgataccttcgcccgctttagccagaatccggcttaccacacccaactgtcacagccgatcgaaaccgtgatgctggcgctcaataccgccaaagctcccaccaacgagctggcagtacgtgaagctcttaattacgcggtaaacaaaaaatcgctgattgataacgcgttgtatggcacccagcaggtcgccgacaccctgtttgccccttctgtgccctacgctaatctcggcctgaaaccgcgccagtacgatccgcagaaagcgaaagcgttgctggaaaaagccggttggacgctgcctgcgggcaaagacatccgcgagaaaaatggtcagccgctgcgcattgaactgtcgttcatcggcaccgatgcgttaagcaaatcgatggcggaaatcattcaggctgatatgcgccagattggcgcagatgtctcgctgattggcgaagaagagagcagtatctatgctcgtcagcgcgacggtcgttttggcatgattttccaccgcacctggggcgcgccatatgatccacacgccttcctcagttcaatgcgcgtaccgtcacacgctgacttccaggcacagcaaggattagccgacaaaccgctgattgataaagagatcggcgaagtgctggcgacccatgacgaaacgcaacgtcaggcgctgtatcgcgacattctgacccgtctgcatgacgaggcggtttatctgcctatcagttacatctcaatgatggtggtatcaaaaccggagctgggtaacatcccctacgcgccgatcgccaccgaaattccgttcgaacagattaaaccggtgaaaccttaatgttgcgttacgtattacgccgctttctgctgctgatcccgatggtgctcgccgcctcggtgatcatttttctgatgctgcgcctcggtaccggcgacccggcgctcgattatctgcgtttatctaacctgccgccgacgccggagatgctggcctctacccgcaccatgctcgggctggatcagccgctgtacgtccagtacggtacctggttgtggaaggcgctgcatcttgactttggtatctcattcgccagccaacgcccggtactggacgatatgctgaacttcctgcccgccacgctggaacttgcaggtgcggcgctggtattaattctgctcacttccgtaccgctcggtatctgggcggcgcgccatcgcgaccgtctgccggatttcgccgtacgtttcatcgcgtttcttggcgtgtcgatgcctaacttctggctggcgtttttactggtgatggcgttttcggtgtatctgcaatggctacccgcgatgggttacggcggctggcagcacatcattttgcctgcggtttccattgcctttatgtcgctggcgattaacgcgcgtttactgcgcgccagtatgctggacgtcgccggtcagcgtcacgtcacctgggcgcgtctgcgcggcctgaacgacaaacagaccgaacgtcgccacatcctgcgcaatgcctcgctgccgatgatcaccgccgtggggatgcatatcggcgaactgattggcgggacgatgattatcgaaaacatctttgcctggccgggcgtcgggcgctatgcggtgtcggcgatttttaaccgtgactatccggtgatccagtgctttacgctgatgatggtggtggtttttgtggtctgtaatttgattgtcgatttgctcaacgccgcgctggacccgcgcattcgtcgtcatgaaggagcgcacgcgtgaactttttcctctcttcccgctggtcggtacgcctggcgctgatcattatcgccctgctggcgctgattgcgctcaccagccagtggtggctgccgtatgacccccaggcgattgatttgccgtcgcgcctgctttcgccggatgcgcagcactggctgggcaccgatcacttaggtcgcgatattttctcgcggctgatggcggcgacccgcgtgtcgctcggttcggtaatggcctgcctgctgctggtgctgacattagggctggttattggcggcagcgccgggttgattggcgggcgcgttgatcaggccaccatgcgcgtcgccgatatgtttatgaccttcccgacctcgattctgtcgttctttatggttggcgtgctcggcaccgggctgaccaacgtaattatcgccatcgccctgtcgcactgggcgtggtatgcacgcatggtgcgcagcctggtgatttcactacgccaacgcgagtttgtgctggcgtcacggctttccggtgcgggccatgtgcgggtgtttgtcgatcatctggcaggcgcggtgatcccttcgctgctggtgctggcaacgctggatatcggccatatgatgctgcacgtcgcggggatgtctttccttggcctcggtgtgaccgcgccgaccgccgaatggggcgtgatgattaacgacgcgcgccagtatatctggacccagccgctgcaaatgttctggccggggctggcgctgtttatcagcgtgatggcctttaacctggtgggtgacgcactgcgcgatcatctggaccctcatctggtgacggagcacgcacactaatgccgcaacagattgaactacgtaatatcgcgctacaggccgcgcagccgctggtacacggtgtatcgttaaccctgcaacgcgggcgcgtgctggcgttagtcggcggtagcggcagcgggaaatcattaacctgcgccgcgacgctgggcattttgcccgctggcgttcgccagacggcgggggaaattttagccgatggcaaaccggtttcgccttgcgccctgcgcggcatcaaaattgccaccatcatgcagaacccgcgcagcgcctttaatccactgcacaccatgcacacccacgcgcgggaaacctgcctggcgttagggaaacccgccgatgacgctacgcttaccgctgccatagaagcggtggggctggaaaacgccgcgcgcgtgctgaagctgtacccgttcgagatgagcggcggcatgttgcagcgcatgatgattgcgatggcggtgctgtgtgaatcaccgtttatcatcgccgatgaaccgaccaccgacctcgacgtggtagcacaggcgcgcatcctcgatctgctggaaagcattatgcaaaaacaagcgccgggaatgctgctggtgacccatgatatgggcgttgtggcgcgtctggcggatgacgtggcggtgatgtctgacggtaagattgtcgaacagggcgatgtagaaacgctgtttaacgcccccaaacatacagtgacgcgcagcctggtttccgctcatctcgccctctacggtatggagctggcatcatgactttacttaacatctccggcctttcccatcactatgcgcacggtggatttaacggaaaacatcaacatcaggcggtgctgaataacgtttccctgaccctgaaaagcggcgaaaccgtcgccctgctgggacgcagcggctgcgggaaaagtaccctcgcgcggttgctggtgggtttagaatcgcccgcgcaggggaatattagctggcgtggcgaaccgctggcgaaactcaatcgcgcccagcgtaaagcgttccgccgcgatattcagatggtatttcaggactccatcagcgccgtgaatccgcgcaaaaccgtgcgcgagatcctgcgtgaaccgatgcgccacctgctatcactgaaaaaatccgaacaactggcgcgcgccagcgaaatgctgaaggcggtcgatctcgatgacagcgttctcgacaaacgcccaccgcagttaagcggcggccagctccagcgcgtctgcctggctcgcgcgctggcggtcgaaccgaaactactgattctggatgaagccgtttctaaccttgatctcgtgttacaggcgggcgtcattcgcctgctgaaaaagctacaacaacagtttggcaccgcctgcctgttcatcacccacgacttacgcctggtggaacgcttctgtcagcgggtgatggtgatggacaacggacaaatcgtcgaaacccaggtggtgggagataaattaaccttttcctctgacgccggacgtgtgctacaaaacgcggtattacccgcattccccgtgcgccgtcgcaccacagaaaaggtttaacgcaaatgcaacgagtcaccatcacgcttgatgacgatttactggagacgctggacagcctgagccagcgtcgtggttataacaatcgttccgaagctatccgcgatattctgcgtagcgctctggcccaggaggccactcagcagcacggcacgcaaggtttcgcggtgctctcctatgtgtatgaacacgaaaaacgcgacttagccagccgcattgtctccacccagcaccatcaccacgatctctccgtcgccacgctgcatgtgcatatcaatcacgacgactgtctggaaatcgccgtgctgaaaggtgatatgggcgacgtgcagcattttgccgatgacgttatcgcccagcgcggcgtgcggcacgggcatttgcagtgcttgccgaaggaagattgagttatttctgaaacgaggaaagaaaagatattaactgaacttaatttataaaattaagttcagttgcatagatagatcctgtaaaggcagatattctgcgtaatgtacgccgctaaaatttataaatgattcaaacgctcattcagtgtttcaataatataggtattaacagagacttgttgctgcgcagccgcattattaaggcgttcactcagcgattctggatagcgtaacgtaaaggtcttaatcttttctgtacgcgcatacggctcaatacccgcagctttacaatcctcaagatactctcgcagggaaagttccccttctttttgcagcccctgaatgctgtcagagacaaaatcacaataacctgacaagcccaggaatttgccacgaaatgcattcagttctggcacgtaagtgataacagcaggttgcccggcaatctccatagagtttggcgtcttcagtttgatcatggttttacccctatacttagtaaccagtcacgcacgctttctacagcgcctttatcggtatctggcgacggatgaggccgatggaaacacgcaacgctcatatttagtatgaacttacagcgcgaccccctaccttccttaatttctccgcctaacgctttaaccagagattctatatcagtccatttgattccttgaggtaaaggtgatttaaatagctgatccagtgtgtttttttgtttctttcgtaaagcctgtacctgtgtttacatgacattcccttatgacttcactttatgacatcacagtatgaagtcaagtttcccttccttacgccattgtcccaatcgtcttcctgaatcgcagcagcgcgatggtgaaaaacgcgccgccaattgccatcagcgtcaggaactgcggccagacgatttcgaatccggcaccccggtagagaatggcctgcgcgaggctaacaaagtgtgtcgtcggcatggtcagcataatgtcctgcaccatctgcggcatactttcgcgcggcgtggaaccaccggaaagcatttgcagcggcagcagcaccagaatcaccagcagccccagttgcggcattgaacgcgctatcgtccccataaaaatgccgattgacgtggtggcaaacagactgagcgccacgcccagcataaacagcgggatcgagccttcaatcggtacgcccagcacgccttttaccatcagcaccagcgataatcccgataccaccagcaccaccagccccatcgaccagatcttcgccatcatgatctcaaacggcgttatcggcatcaccagtaaatgttccaccgtgccgtgttcacgctcgcggatcagcgccgatccggtcaatacaatcgccagcatggtaatgttgttgatgatcgccatcaccccgccaaaccacgcgggatcaaggttcgggttaaagcgcatccgggtttccagcgataccaacggttcgctgttatcacggtagcgcgcgacaaagctgttcacttcaccgttgataatattctggatatacccattgccggtaaatgcctggctcatgcgcgtggcatcgacgttcacctgaatatctggctggcgtccggcgaggacatcacgctgaaaattaggcggaatatttatcgcgaaggtatagcgtccggcgtccagtccggcatccatctcatcggcggtgatcatctccggtggcaaaaccacgggcgatagaagctgttaacgatccggttcgataactgcgattgatccatatcggcaatggcgatcggcgcgaggttcaacgatcctggcgtaacggtcgctgacgaatacaccgacaccgtaaacgagaagacaatcagcgtcagcatcgctttatcaccgagcagactgcgcaactctttgatacccagattaaaaatattgcgtaaatggcgcatcatccctcctgttttttcagcagcaggatacttaagcccatcaccagcgggatggctatcagcaacgggataaaaagttgccacaaatcagtcagatccagcgctttcgagaacgttccgcgggcgatagtcagaaaatgactggtcgggtaaacctcgccgatccaacgtccaggcccttccagcgaagctaccggatcgatcatcccggaaaactgtgtcgccgggatcaacgtgataatcgccgttccgaaaatggcggcaatctggcttttcataaaggtggagatcagcagccccattccggtggcgatgatgatatacagcagcgccgccagggtgagcgtcaggaaactgcctttatgcggtacgccaaacacaaacaccgacaggccgcagagcaggaaaaagttcagcatccccagcgcgatgtacggcagctgtttgccaagcaaaaattcgctacgggtggtgggggtcacgtaaaggttgataatcgaccctagctctttttcccgcaccacgctaagggcgcttagcattgacgggatcatcatcagcagaagcgggatcaccgccggaacaatcgctggcaggctttttacgtccggattatagcgatagcgcgtctcaatgttcatcagcccgctttggctggcgggtgtcgattgtcgctcgccacatcctgaagccaactctggtgcattgcctgcacgtaaccttttaccgtttcggcacgactgggcatcgctccgtcgatccagacgccgagttccacaggcgtaccacgcgcgatatcgcgcccgaaattgggagggatctcaatcgccaccgtgatatcgcccgcacgcatccgacgatcaagctcgtcataactggtgagcggcggctgttcgataaagtaacgggaaccggagagattgagcgtccacgcctggctactgacggtctggtcgcgatcgagcaccgcaaagcgcaggttttccacatccatactgatgccgtaacccattatcagcatcaggatcaccgttcccatcagcgccagcgtcgaacgtaccggatcgcgtcgcagttccagcgcttcgcggcggctgtagctaaacagacggcgcaggctaaatccctgacgcggcgcgtgggtggtgtcgtgtaccacgggcggcgcttcggcttcgttgctctgccctgccgcttcctgcaaataggcgataaatgcctcttccagactggcggctccgcgtttctcaaccagttcctgcggtgtaccgctggcaagcacttttccggcgtgcatcagtgagatgcggtcgcaacgttccgcttcgttcataaagtgggtggagataaaaatggttactttgtcctggcgcgagagatcgaccatcaactgccagaacatatccctagccaccggatcgacaccagaagtaggctcatcgaggattaacatttccgggcgatgaatcaccgccaccgccagcgaaagccgctggcgaatgccgagcggcaatgactccggcagaacatcttcaacgtcgttgagcttaaaacgctcgctcatttcagccactcgcgcgggaatttccgcttccgggatgtgaaacaaacgggcatgtaactcaaggttttgccgcacggtgagttcgttatagagcgaaaacgcctgcgacatatagcccacccgacggcgggtatcgatatcttttggatcaaccggttgcccaaacagccacgcctcaccttcgctggcgggcagcagtccggtaagcattttcatggtggtggatttaccacagccgttcgaaccaagaaaaccaaaaatctccccgcgtggaatgcggaaattgacgtgatcaacggcaacgaaggaaccaaaacgcatggtcagatcgcgcgcttcgatggcaatctctgcattttcaggttgatacggtgggatcactaccgcctgatgcgcctggcgttgcgcttgcggtaacagatttataaatgcttcttccagcgtagcgctttgcgtttgctgccgtagctcttcggcgctgccagttgccagcacttctccggcattcatcgctaccagccagtcgaagcgttcggcctcttccatataggcggtggcgaccagcacgctcatattgctctgccgctggcgaatactgtcgatcagatcccagaactgggagcgggagagcgggtcaacccccgttgttggctcatcaaggatcaacagttccgggtcgtggattaacgcgcagcacagcccaagtttttgcttcatcccgccggagagtttacctgccggacgatcgcgaaacggtgctaacccggtgctggtcagcaactcattaattcgcacttcccgctccgctttgtcgtgaccgaacaggcgggcgaaaaaatcgacgttttcatacaccgacaaggtgtggtagagatttttgcccagcccctgcggcatccaggcaatgcgcgggcagacgtcgcggcgatgcttcgggtcgcgcatatcgccgcccagcaccatcacattgccctgctcaatgacgcgggcaccggaaatcaacgacaacaagctcgacttcccgacgccgtccgggccaatcagcccgaccatgcaacgggccggaatatcgagtgtgatattgttcagcgcaacggtttttccataatgctggctcacgcccgccagttgcgcgacaggcaggacgggaaccagttccagatgtgtcattgcggcaacctcaccacgaggtcgtcaggccacggaagttcttcattcacccgcacccacgctacgcccggtaaaccggttttgacatattccagatgctgctggagtaattccggtgggatacgcgctttgacgcggaacatcagtttcagccgttcatcgctggtttcgacggtttttggcgtgaactgggcgacgctggcgacaaaactgatggtcgccggaatacgcagatctggcacggcatcgaggatcagccgggcttcaccgcccagtttcagcgtgcccgcttgttcggttggcaggaagaaggtcatatagacgtcgctgagatcgaccatattcagtacccgaccgcctgccgccagcacttcccctggctcagcaacccgatactgtacgcgtccgtcacgcggggctttcagttcgctgtcatcgatatctgcggcaatgcgccgttcagtggcttgtgcggcttcgacgcgggtttgcgcctgaatgatattggtacgggccgcttctatagccgctttagaagccgaaacctgagcttttgccgattccagcgccgctctggcgctctcagcggcggcgcggtcgtcatccagctgttgcgcagaaatagcccctcgttgggccagtgaacgggaacgcgtatgacgttttgctacggagtccagttctgcctggcgttgattaaccagcgactgtgcggcacgagtttcgctttggcgttgctccagcaaagcctgcgcggcggcaacggcgctttgtgcctctttgatttgcgcgatggcttccagtcgctgttcctgcaacacgcgagtatccatcttcgccagcacttcaccttcgcgaacaaactggccttctttcaccagaatggtgtcgatacgcccggcaattttgctggcgatatccacttccgtcgcttcaatgcgaccattgctgacggcaaagccttccggcacacccgccgggcgcaacagccaccacgccacgatagccgccaccgccagtaacccgacaacccaccacgccagatggcgcttactcttatccataatcgacccgccataatccctgtaagcaaacgacgcgtgttacaactgccgccgaacgacgttcagcggattcttccatccgggataagaaggaaacgacaaatacgaccagcgcgcagagcattgagcgccaacggggaaggcttagtgaaaacgggtagtaatgttgtcatcatcagcattcctggccgtaaatgaaacacgcatactcataagtgtgatctataaaactggctgacaaaacggtatccatcctgttggatagcgtttcacgcctgttcagttgcaggaacagagcattcctttttacgttttatcaacagtctcaaccagatagtaacattaatattcatgttgtctatggttcagagctgtaacattgtgcgccttctaatcaaaggcataagtccatttctgttttttcatgctggtaagacttccagggagtggttatctcaggccctgcaccagggttaatttggcaattatgcatgctgaacattcttccagcatgtttactgtcacgggcgttaagacctaaaactgtccccgtttcacctatgcgttctctcccaccatttccgttatgtgcaacaacttgatttatacctaacatttgtgagcatgctaatagtgcttcaagtttaggtctgtaatctgtcgaaacagaaaaataacgattaaaggatcgacaagagatagcccggctagttttaaactttttgccattaattatagcatgatgttttttattgataattgccgctaattcgaccggagcgagagcattggtcatttcatcaatagagactgttatcggtcctataatgtaacgttttcgctgctcatcaaaagttatcccatgatgatttgccattattttgtatttggggtcatagaaacatacaggataatcttttatcccagcgtaggtatcctcatcaagtggtttcatacgcgtgaagttctgcatatagttaccattgcaattcgtttcatgatttccagctaatacatgaacattttcattgatactcattatgcgttttaacaaatcgatgataaattgatcgccacagatattactaaatcgatcgccggtttggtcgccaagaaacgtacatggcgtcacagcgtctttattaataactaaataaggctgaagactttctaaaactatatctcttctgttcagaatactgattattgtattaacattagtgtcaagttgctcattaaagttctcccttagcaatacgttgagaacttcatcttctatattaagcaactggctaaggaaattttctccttcagccatgattctcaaatgtcccgttgcaaaaagcgcgtacaaaactgcaccgactgagccatcggtatcgccaaaataggttggtctggtacttgtgggatcaacaggtgaacaattggagaaataggttctgtcagcgaactggggttttatcattgtctcgaatttaatatcagatacatcgaattgcgatattttccagttccagatgggtttgtacgactcagtaactgcaacatcattagcatcatcatttactgtcatattattaagtaaataaacaatgctgcaccaattaatatcggtatcatcaagagggcaaccgtaatttttactattaattgtcacaataaactgataacagttattcctacgtagaatatgagcgcgcatgcccgatagcatactatatttttctgaatgatccgtttgtatggtaaatgatattttgtcatctcgaatagattgttggaaacgttctatttgccaatcatcaatttttccacaacttcaccgagcattgtcctggcaatacttgatatatcatcacctataccatttgcaatatacccaaacagttctttagtgaagttagtaacatgctcttgaaccatatcatttgttgcgattgtcgttgtactgccgttagtgcctgccacagttccaattttcatcttttacctcatattattcaccgcgaggaatacatagttaacatttaatcttatgacatacacctcatgttcgatggaaaaataattatattttgcacaaatcattcagccttaaagcataatatgaaatttcttatctcatagcagcgaaagtccctaaagattgtagaggcgtcatcagaacatgcctctacaatcgattaagaaaacctatgaaatactggcaggattaaaaagacataccaccgtattcatggagttttaatgagattgaaaacaactaagccctgaggaataaattattttattatttttatcacgtgcttccttcagggaatttagccccataataccattatcaaattgttgattctgatctaccccgggcccatgatgcccatatttttgtctaatgtatttgctggggtcttcacctttgagtgtctccccacatatgaagatacgttcacgtgctggtctgaaatcagtagtgttatcaaaataattagcatatacaggtgtgggtttcaaagtattgcttcggattagatggaatagaggatcatccatgtgttctttatgttttttattaaaaatattggctaattcctcaggatcagtaggatttttcatctgattaaatggaacctgcaaagcaccgagacaataacatttttttcttcatctcttattattccgtgatgactggttaaaacttgcctttctgagtcataattacaaacatcgagcgttttaattaagttatacgtatcaccggcagagagtttataattttctagtcatgcagtatagttaccattaaaattaatttcatgatttccagccagaacgatgacatttttattaatacggctatctttattaccctccatatttcgcatagaatttagcaaagtaaggatatatttatcaccaaaaatagtactaaatctatcgcctgtatgatccccaaggaagatacaaggggttatcgcatcgtcctttaaaaaaacatgttgatgcaactcattcaatatcatgtctctcgtatttaataaattgtagagcaatttattatttttatgtatgtatgcagatgaagccatgttttcgtgttttaataattcacataataaactccaacccttttccctgatgcctatatgccctgaaacgagcaatgcataaagtacagcgcctactcttccatctgtatcgccaaaataagccgtgttggcattttgtgggttaatcacaccacattgtttataaaagtctattttagaaaacacagatttaacatagctatcaaacttatccttaggaaacgtctctttagagacatcccaacgccagtcagctttaaaattaccgctaagaagagtaaagaaattttcaggtatgatagaaagcccattaactttataagttatgtctgatttataaattatgtctgatttatctccggagaaattaataaaataataaccatccttacactcaatcttaactgtaatgggagacgataattttatcacatggttattgtctggtataattgtaaagataaacgtgttagtagtattatcggcgaaactattatattcttgaatatctatagatggctcactattgtaaaaccatattttctccatctgaagactatgttcatttaccctccagtgaccatgttgcaggaaatagatgatattcaggcctaaatcgttatctatttgcgaaaagtcattcagcatattaacttcaactgtgtttgatcgatattttttatcaaccttgccatggtgttgatgactgttaactttatctgaatgcttatcttgatggtttgaagagaagttcttaaatatattgtgaaatactttcataaataacctgtaatatttttacttgttagtaacaaaataaacaatacatgtctgaaagacatatttacgatgatacaaagcaataatacttatatgttcgatgattttaagcaccgagactatccggtcttttactaaataatggaaaacaatccatccctggaagataattgtaaaaaaaaacaacagaataagaattaatcttaggataaatatttatttatcatggccttttaaccggtaaaaatggcactcggcacagtaaaccccgctatagttatgctatgcatttgtctttaatgatatctcgtcgttatattaacaggctgaaattatcattaatgcacatttcattattagcagggatacctgaggagtttaaagtgaacatatatatcgggtggcttttcaaattaatccctttgattatgggattaatttgcatcgcgttaggtggctttgtgctggaaagttcagggcaaagcgagtatttcgtcgcgggtcatgtgctgatttctctggcggccatatgcctggcattattcactaccgcatttattatcatttcgcagctcacgcgcggcgttaatacgttttacaatacattgttccccattattggctatgcggggtcaattatcaccatgatatggggttgggcactgttagcaggcaatgatgtgatggcagacgagtttgtcgccggccatgttattttcggcgttggtatgattgccgcctgtgtatcgacggtggcagcgtcatccggtcactttctgctcattcccaaaatgcagcggggagcaagagcgatggaacgccggtacaggcttattcttcattaatcggtaattgcctcattgccgttcccgttttactcaccctgctcggtttcatttggtctattacgctgttacgtagtgctgacataactccgcattatgtcgcgggtcacgtattgcttgggttaaccgcaatctgtgcctgtctaattggccttgttgccacaattgtccatcaaacacgtaatacgttttcaactaaagaacactggctgtggtgttattgggttatttttctcggctcaatcacggtactgcaggggatatacgtcttagtcagttccgatgcaagcgcccgactggctcccggcattattcttatttgcctcggaatgatctgttacagcatattctcaaaagtctggctactggcactggtatggagacgtacctgttcgttagccaacagaataccgatgattcccgtcttcacctgcctgttttgccttttcctggcatcgtttcttgcggaaatggcgcagaccgacatgggatattttattccttcgcgggttttggtcggtttaggagcggtatgctttacgttgttctcaatcgtttcaatattagaagcaggttctgctaaaaaataattgcaacgtaccggataaaaccagcgttgaccatttgcgtaacgctggtttttcttaggcatcatgaaataacgcagcattaatgcatagtggttaaggataaaaaaacaacaaagttactgtttttttcaacctgttcatattttataaagatctggccactgggtgagttttcaatcacctttccttccaccttatattaagcctggagggtttcagttcacgggctcattagaaaataatcacaagatagccactatcaaaattagctcatttttaatgcggctctaataattttcatctttaggtaacaggtcaggacgacttcgctgcaattgtgtagagacattaaagttgtatcctttaacctgaaaaagactttaaagttgtaaagttttaaaaaaacacatacaaaacatgatgctaagtgtgtatcacacgctgttccaacattatgccttgatgttcttgcaggaactgcaatttacaggaggaaaaaggtgtttttgtagttatctggcgttacgtgacagtgttggtcagatacttccacctcttcagagttaaagtttgatatatgggaaaaaaaacgctcccggacgggagcgtaagccagtgacttcggcgtcaaatgagggtctaacaagtggagctgcgggttaattctgggtgatctgactgcgatgcttatcagcctgctgctggtgaacaacggaagactgaccattattcgccttctcatgtacagctgcggccttctcatgctcgctcatttcagaaaatgactttgctgtttcgttggtagctccgggtttagctttcatcatttttttatgcatttcagccatgtcctggtgggcagcagaattgctgtttgcatcatgtcatgggacattgcggcctgatcgtgactgctcatatccatcattgtcatgctgtctccctgaattgcactttttcagcagatgactgcatctggtgggcaggtgcctgtgcattatttacctggtcatgcatgttcattgtctctgcagccatggcagatgaagcggcagccataatggcaacaaatgatacgagaatctttttcatggttgggtctccggtgtttacatacccaaacaatcaatggcttataacagagaaagcagttgatctcagggcgggttaatcatcactccaggaaccaggtgattgtgttatcacgctgctcctgatttatgaataattataaaaaaccgcctctgtttatcgcgtgactgaatgatgacaattttgtcaccttccaggtttctcctgaacaacgggattaatccattaacaggcgcactttgaacacaatttcacgcccctgctgttctgctgacagctcgccgccgtgagcatgaatgatcgaccttgtaattgataatcccagccccgcgccttccgtgttgtagaaccttgatgagtctgcgcgatagaaccggtcaaacaaacgttccagattagcgggaacctggccggacatcgtattcgtaatcatcacgttcacacagtcactgtcacgctcaaggtgtatcgctgtacaggtgttatcgggagaatacttgattgcattggaaagcaggttactgaaagcacgtcggagcatatcgctgtctccggcaacaacgccctctccttcaaccgtgattgtctttcctgtttcgtctgccaggggctcgaacaactcacgtaattcattcagttcggctgccagatccacatcatgtttatccagccgcagcagaccatgctctgaacgtgccagaaaaagcatgtcactggtcattcgtgacaaccttttcagttcttccaggttagcgaataaaatttcgcggtaatgcgaaacatccctttccttagccagtgcaaactgcgtctgcatcatcagattactgactggtgtgcgcagctcatgcgcgatgtcagacgagaaatctgacagtttccggaatgcccctccaggcgatcaaacatattattgaactcctgcatggtctcagagatttccggcggagccagatcgggatttagacgctgatccaggctgtgtacggtcatggaggaagccagactggtcatttcccgtagcggtttcagaccaatacgtgtggtcagccagcccagaaaaacagaaataaagaccagaccgatattgaaccagaacagccaggtactgagtttgtccataaacagggtgtgatacccagtatccgtggcaaccgtaatgatgacatgtttgcttttaccctgttccggcgtcacggcaacccgccgcgagatactgcggtacacggtgttattttcttccgtctggatcatatagtcgagaatatcacccgacttattaagcaggatcgctggaacaacagaatttttggcatagagttcaacaattttttcattttccatgttttttatagaaatgaataagccattgtgccccaccatcgcatcgtttattttttctgataatgacttaatatccgttttgttcctgaacgtctctgttttaagaaactcttcggtgagctgaagtttacctgtcagaaaatcgcggtcctgattatcgaaatagccattaagggtgctaatcaggataaaacttgataaccaccataccgtaagcatcaccgcagaaaaaatcaggctcaggcgtgtggtcagggaaattttgaacctcactcttctctgatctccaggacatatccggcaccgcgaacggtatggatcagttttggctcaaagtcatcatcaattttacttctcagacgtctcacggcgacatcaatcacattcgtatcactgtcaaaattcatgttccagaccagggacgagataagactcctgggtaacacttctccggtgcgttgcagcagcaactcaagcagaacgtattctttaccggtgagatggatcttcttccccgaacggatcacggtccggcgcaccatatcaacggtcatatcggcgatggtgcagactgttgcggcctgcgagcgtgcccggcgcagtagggttcttacacgtgcaaccagctccgtaaaatcaaagggcttaatcaggtagtcatctgcgccaagctccagtcctttcactttgtcccgcacgttgtcctttgcggttaaaaacaggaccggttcttcgtgcccggactccctcagtgcgctgatgatttgccacccgtcgaggaaaggcagcatcacgtccagtattatcaaatcatactgtcccttcgacgcggccccgagaccatcgcggccattattaaagagatcggcctgatagccttcctcaaccagtccctgctgcaggtaacgacctgttttttgttcgtcttcaacgattaaaatacgctgcatggtcaactcgctgatatgaaagtaaaaatctcacgcatgagctttggctgtcccctagctgacctgagacggagcaagcattccgagccacgctacggcgcccagaatgataatcgcaacaacgaattctgtcaggatgctgtttcgcatcagggcaacgctgcgatcataattcccttccctgaccataacttcaagccggggacccaggtgaaaccggtttgctgcagccagaagaagcatcagaacaaacagagccgtcttggcaagcaatatcctcccccaggaactgttgaataagggagttaagttaccctcagcaatatacagatagttgaccagcgcactcaggatcagggctacaacaatcaccgttcctgccgtggcaaattttgccagggagtcagatatcacaatgacgctctgtgcattatgctcgtttctgcgcatcagcaggatagcaaatgcaaccagagcacctgtccaggcacctgcagcgccgagatgggtcagatcgctcagtaaatggagatagtaatgcagaccgtcatgcataacggcgtgtcctccccaggcaagtgtagccagcgccacgcccccactcatcgtcatcagcaggcaggacaatactctcttattagtgtaaaggaacaaagcaccgagtgtggtaaacagggcacagagcctgacaatccagctaatacccacatcagtttcttctatcaccatctcgataacatggatggataattctctgaggtcagttactccactcatggcattagataccaggagcatattaatgccagtaagaatgatgcctgtaacaacagcaaaagttataaacgacctgaaattagtcaggttataggtttcatgtctgacaccgcttattccatatatctgaaaaaatggcaatccaaatattaccatcaaatccagataaagaagaaaacgaataacaatcataatcaggtcgttcataatattacttcactgtaaaggtgtaattaccggtaatagggtgcgtatctgaagaaaccgcgcgccagtcaacacgataagtgccagcgggtaaaggctctcgcggaataatgaccatcgatttagggtcagcgcctggcgccacttttgccgcgaccggcatcggagaatgtgatgacatgcctttcatacccgtcatcgttaattttgcacctgagaatttcacggtcagattttccgagaaattaagctgaatcttttccggggccgctacggctgaatcagcctgtggcacagagctttttaattccggatgggccatagcagagaaagcaacgcccataacgaggccacctgtaagaatggctttatttaaaatcgacattttatttacctgtttagttgagtgttttatatcagtgcgttaaaaccagattctggctcccgccaggaatactacctgatggtctttctcaccttctcttttcgccatatcggatgttttcccgtaaagttgattccaggaaacgcctatatagggtgcaaactcacggcgtatttcatagcgcagccggagccccagctctgtgtcagtcagtcccctgccgcgaccccgcgattcatcatcctgactgtagaaattcacctcataggatggctggagtatgagccggttagtcagtaaaacgtcgtattctcctcccagacgaagggctgcttttccgccattactgacaaaacccgtaatttcagactcaaaattatagagtgccagcccctgaaaaccgacagcagcccaggtccgggcagaagcaggtctgaaatcctgcctgacacccgcaaccaaatcccaccatgggccaaccgcatgtccccagagtaactgcgcttcagccgcctccgtttccccattgcttcgttcaccttcactctttagccaaatccgatctgtgtcgcctccaatccagctgttaacactccagctgaaattgttggtgttatccgaccgttgccattccagttgatccagcagaaccagataattaatcgcactgtcgtgaatcgcatgcccctgtaaattgccgaatgcagccttccggtcggcatcggtaacaggcggaattggcgttctgctctcagttacaatgggctccattgacgtcatctcagtgaaattctcatctgctggcatctgcatggcagacatgtcgtgcccggcgtggggatctgcagagacggagcccgccgcaatagaaagctgtgaggtaaacaaaccggcgaccagaacaggtatggccttcaaatttctcttcattcgcatcattcctccacccggacttcacgaaacattcccatttccatgtgatagagcaaatggcagtgatacgcccagcggccaagcgcatctgctgtcactctgtaactgcgttttgtaccagggggaacatctattgtgtgtttacgaaccatgaaattaccgttttcatcttccagatcgctccacataccatgcaggtgaatggggtgagtcatcatggtatcgttgatcagcgtgatcctgagccgctcaccgtatttcagcagcaccggtgcggcatctgaaaacttgattccgttaaatgaccaggcaaacttttccatgtggccggttaaatgcagttctatggtacggccaggttcacgtccgtcaggatcctcaaagcggcttttcaaatccgcgtacgtgagaacctttcttccgttatttcgaagaccaatacccggatcatttaatttcggagagacgctcatcgcctgcatatcaaccagtgggttatccgtttctgacgcaggatgactttgcatacccggcattccggccatccgggaatgatccataccggccatgctgctgtgatccatgggcgcggaggatgtcccgctatccggaaggtcagcaccgtccatagacatcatctctccgctgttatccatgcctcccatctggctgtggtccattcctgccatatcatgtcccattccccccatacccatatcttccatggtcaacagaggacggggatcgagggggggaacggcagcacttaacccctctctcgtggccagtgtccctcgagcgtaaccggtcctgtccatggattgtgcgaagatggtataggcctcaccctgaggctccacaatgacatcataggtttcggcaacggcaatcctgaattcgtcaacggtaaccgggtttacatactggccatctgcagccacgaccgtcattttcagcccggggatacggatatcgaaataggtcattgccgagccgttgataaaccgtaagcgtatcttttcaccgggacggaacagtccggtccagtttttcagcggggcctgcccgttcatgagataggtgtaggtgtagccactgacatccgcgaggtcagtcggattcattttcatttcagcccacattttccgatcggcaatggtggctgacagccccctggtattcacgtcgcggaaaaaagagccaacggttggtttattgaaattgtagtaatccgactgtttttttaattttttcagcaggctgtgaggattttcatcggtccagtcagacaacatgaccacatgctcacgatcgtaagtaaacggttctggctccccggcatcgatgataatggcaccgtataccccctcctgttcctgcagaccggaatggctgtggtaccagtaagtcccgttctgcttaaccttaaaggtgtaaacgtaggtatcatcaggctctatgcccataaaactcagccccggaacaccatccatattggccggaagaataatgccgtgccagtgaatggacgtctgttcattaagacggtttttgaccttcagggtaatggtgtcaccttctttccagcgaagaacgggccccggcaggcctccattgattgttttggcctgacgctcactgcccgtgatattgacggccgtttcaccaatggtcaggtcaaactgagtaccctgcagggatgcggcaactggcagkctcagactggaacgcgcattgaaactccatacgccaagacttccggctacgccagagagggttaaccccttcaggaaagttcgtcgagacgttttcaacagcatgcgcattcccttatttaaagtatggttactgacagaattcgagaaccgatttaaattaaattactggttcatccacttacaatgaaatgaatctagcacaccttaagaaacaaattcattacaatcgtgtaatgtacatagctgtattacatttacgtcatcttccccacaggttgattatttttatatatgatcataaggacatcttttatgtacctcagaaggtaattacacatgaatatattaatcacgaccactgcgtttacagctttattttgtggggcagcttttgctcagtccagtgatattgcccatgaagcacatcgatttgttaataatgcctcagccgtcagtcatgtgaattcctcgacgcatgaaaacttaccggacagggttaataaaaacaacacgccctcattctctgaaatgaatgaacatgaaagggccattgttgctcattcatttatgaacaacagcgcgtcctatgcgcatcagaaaatgattgaggaacataaaaaatgctgtccggcagtgatgcaaattcaaagacctcgtcttcttcttttaacgaactgaatgccggagaaaaagccgctctcgtgcatgagcaggtcaataatgccggtgcggaagcacatcagacgcaggcaagaaagcttcgcgggctgtattcgaccaggtaactgcaggcgggttagtgcttagcgtcaggtgcgcagcagggctttactgacgggttacgtagcaggacatgagccccatattgctctgccgtaacctgtttcagtcccgttaatcatcaccgtcgggctggtcatacagttcccagagcttcaggagcaaacgggaaacaagatatgttacaaaaatgacgaccatcaacggtgctcccgattaactgacagatgacacgcctcctgaaaacccctagcatacgccgcagtgttcatgctaacggcgaattccagtaaatgtattctaccgatgtcgtaaaagaaaatgcctacctttcagccacccgctcggggctggaatcgaacgagatcgctactcttcagcgctccttgccttcccggtttaatctgcggcatttgaaaaaaaatgaatcattaaaactcgtactgcaaaagaaagcgggaaaatcacgtgtcgtggcctataaatttacgtccggttcatttaattacacggcgtatcgtatatcagataaaaagttctataacctttccgatacttccgggaaaggcagtctcgattatccgttaccggccacagcaagactcagttcgcctttcaatcctgcaagacttaacccggtatcgggaaaagtgagtccccataatggcattgattattccatgcccatgaacacgaaaatagtcagcgtcatcgacggaaaaatcacccgggccgaatacaacagtaccatgggatattttgttgaagtaacgggaaaagccggtgttaaaactcgctatctccacctcaataaaatactcgttactaaaggggccagggttacacggggaggtgctattgcgttatccggtaacagcggacgttcatccggtcctcatctgcattacgagctggtcatcaataacaaccctgttaactctctggcgttccgggcagcggcacccgctgataacaaactcgaacagcatgcctttgcgcatgccagagactacgaacgatacctggactgataacgggaccgcgacgcggccccgtctgccggattaattttttttatcgttttcacttccgtgatgttgatgatctccatgccctccgtggccgtggaaaagatgcattagcgggcagaccagcaataacagatatggccagtaacctgccacatgtgaccagtgttcgcgcaggagggcaaatgccgcgatcgcggcgacagcaataagcgcataggtggtacttttcatactggactccttctgttcgtaactgacccttcactcagtgttatttcccgagcctgacacttttcagacgcaacgcattcacaatgacgctgacggaggaaagagccatggccgccgccgcaataactggcgacagcagtattccatacacaggataaagcagacctgcagccacaggcacgccaagtgcgttgtagataaatgcaaaaaacagattctgacggatatttttcatggtgatctctgacagatgacgggccctgttcagtatcatcaagtcgcctttgagaagggtgactccggcactttcaattgccacatctgtacccgttcccatggctatacccacgtcagccgctgccagcgccggggcatcattcacaccgtctccggccatcgcaaccacatggccagactctttcagtcgggttatcactgcttttttgccatccggcagaattccggcttcaacctcatctattcccagtttccgtgcgactgcttcagcagtaagctggttatccccggtgagcataacgatgcggatccccgcctgacgcaaagctttaagcgcatccggcgtggttgttttcacgggatccgagatagctatcaggcctgcaaggtccccgtctgtggccacatagataacggtagcgccttccatccgcaacgtatccgcaacggccttttgattatcaataactatactgttttcctgcatagccagttcattaccaataacaacccgttgaccttcgacatcgcctgagacacctttacccgacggtgcatcgaaatgagtgactgcgggtattgcgatccccttttcctgtgctgctttaactactgccatacccagcggatgctgcgagcctttttccactgcggctgttacacgcaaaagagatgtttccccacccggattgagactgataatccctgtcaccgtaggcgaaccttccgtgagcgtgcctgttttgtcgacaaccagcgtgtccactttttcaagacgctcaagggcttcggcattcctgattaacaccccggcctgggctcctttgcccacccccaccattatcgacatcggcgtggccagccccagcgcgcagggacaggcaataatcaggaccgacacagccgcaatgagaccgtgcgccatcctgggctcgggcccccagacagaccagatcacgaaagcaacaaccgcgataagtatcaccagaggaacaaaccagcctgaaacgctgtcagccattctctggatgggggcacgcgaacgctgtgcatcagcgaccatctgaacaattcgtgagagcattgtttcatcaccgactttctctgcacggatgatgagactccctgtctgattaatggtccccccgatgacagggtcaccctccgttttggtaaccggcatagattccccggtcaccatcgattcatcaacggttgttttgccttcgatcacgataccgtcgaccggaatactctctccaggtctgatgcggagcttatcgccaggcaggacatcttccgcattaatatccgtttcatgaccgtcatgatccagccgtctggcggttttgggggcaaggttcagaagcgcagtaatggcgcctgaggtttgttcccgtgcccgcagctcaagaacctgtcccagcagaacaagcaccgtaataactgctgcggcttcaaaataaacggccaccaggccatccatgtttctgaacgatgcaggaaaccaggaggggaagacggttgcaatgacgctgtaaacccaggctacgccggtccccattgcaacaagggtaaacatattcagggagcggttacgtaacgacattccggcccgggcgaagaatggccagccacaccacaacacgacaggggaggccagaagcagctgcagccatgtgttgtactgtggcggtactgtattcctcaactcgggaaacagatgagatcccatttcgagtaccagaaccggaaacgccagcaacaaccccagccagaagcgtcttgtcatgtcgtgaagttcatcactcggccccgtggatgccgtagctacgagcggctccagtgccattccacagacaggacagcttccgggaccactgcggcgtatctccgggtgcatcggacatgtccacacaccttcagaattctctttttccgcctggtggtgaggctgttttatctgatcagggctgacttcgtgatgatcgtggtgatggtgatgggaatgttcactggcatcttcggtaagataacgatcgggatgggctttaaatttactctcacagctggcggagcagaaataaagttgatggtcctggtatcgaatgctgctgtgcgccctgtcgggcaggatggccatcccgcacacgggatctctcaccttatgcaatacgtggccctcgtccggggataatgtctgctcagaagcagtctggttgttgtgttgcactgcattgtcatttttcacagtaactctccttatgcataccgaagcatcttctgtcttcagggtatgtcatggatgcgattaccacgaatatcgccggcacaggagtgcctgctaccggcgtcccgttatcagccgttccgctgactattcgattcgctggaagacttttttacttccatccggtgagaatgcgataacatcgtaagcctcttttcgggctcccatctccattccaggacttcctgctggcataccgggggtggcgagaccgtatatacctgaaccagactgcattgccttatgtatcgttgtcgcaggcacatggccttcaatgatcaaattaccggcaaccgcggtatgacaacttcgcagtcctgcaggaatagcatgcttttctttcagggctgacagcgcctgatcattcatgacgtgagttcgtacttcaaacccgtctttttccatcgccttgccccacagggaacaacagccacagttttcagatttgtacatatcaatcactttttcactcgccatcgcgggcagtgaaaggccgagagccagcgccatcagaaccacttttttcatactcacctctgtatattatcgatttaaaccctgacgtcagggtgaatcagtaaagaaggacacccacagggggtgccctttcaggttcaggacacgctttttttatgtctgcgcagccagattaatttgtaggcggcaggaataatgaacagggacagcagcggagccgtgatcatcccaccaatcatgggtgccgcgatacggctcatgacttctgaacctgcaccggttccccagagtattggcagcagacccgcaatgatcaccgccacggtcatggctttcggccggacacgcagtacggcaccatgatagagggcttcatcaaggccttccggtgtgaacgtctctttacgggacaattccgggtgcgcttcaatggcatgacgcagatacatcagcatgaccacgccaaactctgctgccaccccggccagagcgataaaccccgttccggttgcgacagacatatggaagccctgccagtacaggaaccatatcccgccaaccagggcgaacggcaggctcatcaggatcagcagggcttcatcaacccggcggaatgccagatacaacaggatgaagatgatcatcaccgtcatcggcaccatcagcttcagtttcttgttggcatgctcaagcagttcaaactgtccggagaatgacacgctggtacccggtctcagtttcactttctgactgatcgccgttttaatgtcattaaccaccgacaccatatccctgccgcgcgcgtcaatgtaaatccagctggctggacgggcattttccgttttcagcatagtcggcccggaaacgaccttaatatccgcaacatcgcccagcgtgatctgctgcttcatcggggtcaggatcggcatctgtttcagggcctgcgggctgttccggtaatcctgcggatagcggatattaatcgggtaccgggccacgccttcaaccgtttcccctaccgtcgcgccgccgatggctgatgagatgaacagctgcacatcgcccaccgtcattccgtagcgggaggctttttcccggttgatatccacatcaatgtagcgcccgccttccagtcgctctgcgagagcagacactacgccgggtacggttttggcgaccgcttcgatactctgcgccgttgcatcgatatcggacagaaccgttccggacaccttgatacctatcgggcttttgatcccggttgagagcatatcaatacggttacggattggcggcacccagaggtttgccagccccggtaaacggacggtcctgtcgagttcttcaataatcttgtcaatcgtcatgcctggacgccactgatcctcaggtttgagctggatcgtggtttcaaccatttcgagcggtgcggaatccgtggcggtctctgctttaccggtcttgccaaatacagaggccacttcaggaacgcttttgattaacttgtccgtcgtctgcaggagcgctgcagcttcagccggagagacacccggcagggtcgacggcatatacaacaggtcgccctcgttaatcttcggcagaaactcaccgcccacctggctcagcggccagataacggtgaaaatggacaaggccgcaaccagcagggttgtttttggccagtggagaacccgcaacagcaatggatgatacgctttgatcagtacccggttcagggggttactggtctctgcaggaattttcccccggatccagaatcccatcagaatcggaatgacgatgatggccagcgcggccgcgcccgccatggagtacgttttcgtgaatgccagcgggccaaacagacgtccttcctgaccttccagggtaaagataggaataaaggacagggtgatgatcagcaggctgataaacagtgcgggtcccacttcaacggaggcatcggtaatcaccttccagcgggtggcgttgtcaatctgctcacccggatgctgatgatccactcctcaagccgcttatgcgcattctcaatcatcacaatggcggcatccaccatcgcaccgacggcaatcgctatccctcccagcgacatgatattggcgttcagtccctggaagtgcatgacgataaaggcgatacacagaccaagcggcagagagataatcgccaccagggcagaacgtacgtgccacaggaacagggcacagacgatggccaccacgataaactcttccagaagtttggaactgaggttatcaatcgcccggtcgatgagctggctgcgatcgtaggtggtcacgatttcaacgccttccggcaggctggccttcagcgtctcaagtttatccctcactgccgtgataacgtcgcgtgcatttttacccgaccgcaggatcaccacgccgccagcgacttcgccctggccgttcagctcggcaataccacgccgcatttcaggcccggtctgcacgcgggcaacatcccgcagataaaccggcacgccgttctcgcctgttttcaggacgatgttattaaaatcatcaatgctctgaagataaccgctggcacggaccatatactcagcttcggccatttcaacggatgagccaccggcctcctggttagacgattcaagggcctgtttcacttcgggcaggctgataccatactgagacaattttaccggattgacctgaatctggtactgtttcaccacgccgccaaccgaagcgacctcagccacgttcgggatggttttcagctcaaatttcaggaaccagtcctgcagagaacgcagttctgaaaggtcgtgttttccgctgcgatcgacaagggcatattcaaatatccagcccacccccgtggcgtccggaccgatttcagaactcacaccggcgggcagttttccctgtacctggttcaggtactccagcacgcgggaacgggcccagtacagatcggtgccgtcttcaaaatgacatacacatacgaatcaccgaactgtgaaaaaccacgcacggtttttgcgccaggcacggacagcatggtggtggtaagtggataggtgacctggttttctacaatctgcggggcctggccgggatagctggttttgataatgacctgcacatctgacaggtcaggcaaggcatcgacaggcgtgttaataatcgtccatgtgccccagatgctgagaaacagggcccccatcatgaccaggaaacggttggcgacagagcgccggataatccattcaatcatcgtcgtctcctcagtgccctgaatgcatatttacaggctggtcagacattgctggcatactgctttctgttttttcagggtggcgcatacgttccagtgcgcccgtaatattggcttcagagtcaatgaggaacaggccactgaccaccacggtatcgccttcattcaggccggagccgatgccggactgttgctgtgactcatgcagaacgtggatctgtttcggcacaaacttgccttcatcatcaacagtaatcacgcgctgttctttgccggtatcgataacggcctggcttggtatcagcagcatctcctggcttctggtattcagtttcagataggcattcatgcccggcttgagaaactcatccttattagaaacctggagacggacctgaagcgtacgggttgtctgatccacgctgggaagaatattccatttttcgacatggaatgttttatccggataagccggtaccgaaatttcaaactgcgacgtatctttcagcagataggcgatagattctggcactgcagcgctgatccagaccgggtccattccctgaatctgagccaccaccttatctttcgaaatattcatgccggtgcgcaggtcaaatgcagtaatgacaccatcaataggtgctttaatggtaaaacgggtctgaatgctccgggtagaacgcagtctctgaatatcctcttccggcatacctgccaggcgaagccgttccagaacgcctttaatttgcgtggaagtaccaccggtgctggataacagaaggaattcactctgtgcttccacccagtccggaatggtaatatcgataagtggcgtccccttcttcacatgatcgccaatcgtcatggggtagactttttcgacaaacccgtcagaacgcgcctgcacaataacaaactgatactcgttatagctgacattagccgggattgtctgagaataattcagcattcctcgcgtgactttttgcgtttttaatcccagattctgaacctgggttggtcgatacggatcccgccactgcttttatcgccactgtcatcagcatattttggcaccaggtccatatccataaagggcgattttccgggtttatcaaatttggtatccggtttcattgggtcataccagaaaagcacctttcgttccggtgccttttgttctgttttttctgtcttttgtgctgagtttacatactgccaggcagtaaccgatatcagccccctgctatgaggctgctgataattattgcagcatattttatctttaaagaagccatacaattttccgctaaaaaatcaaaacacctggcatatgcgcctgacggttaactcacacatatacctatgtgaatgtacaggcgcacaggatgtaatcgctccggacagccaatcaggactgcgtcacgttaatgcttttgagtaaggagatattaccctgctgaataaacgagaaatcgacatggttgcctgttttcagggcattaatagcatcgtctgcattaacaaaagtaaagcgcatggtcattgcaggccagcccaccgctggaattgcttcatgcgaaatggtgattttcttagtattcatatcaatgtctttaacgacaccggtgcccttgataacttgctgtaccgaagcatcactggcagtattcatatcgccatgctgatgtgtttcagcatgaagaccggcagaaaacatgacagagaaggcaccaaataaaacggctttaagtgaattacgcattttaatttcctgattaattaaataaatttactctacccaaccgccacccagcgcggtaaacagattaatttcgttaacctgccgggaataggtaagatcgagaatggtttgctgggtagcgaagagggaacgttctgcatccagcacttcgatgtaactgacagcaccacttgcatacaatcctctggcacgctggagagttatctgaagtgaatcaagataacgctgctgtgactcaagttgctggctaaggctgtcgcgcagcgcaagcgtgtcggaaacatccttaaaggctgactgaattttttgttcgtaattaaccaccgactgttgctggcgaatttcagccagcttcagattggctttattcctgccagcattaaatataggaatttcaattttagggataaaattccacattccacttcctgacgtaaacaggctggacagctccgtactgcttgcggaaagaccactggtcagggtaattgaggggaaaaaggccgctcgcgctgcgccaatattggcatcagccgctttcagctgatattccgcttccataatatccggtcgctgcagcaaaatttgtgaagacagatttggtggcaattttactggggctatctccccgcctttcatccctttttctgacggaagtgcgcggtacgttcccagcaccagttgcagggcattgtttgcctgagccagatcgccttctcgtttggctatttcggcgcgggtactttcgatttgtcctcgcgcctgttcaagtgccagaacgttcgtactcccggtcacgagctgctgctcaacgaaagcataggactgttgataatttttcagcgtttcccgcgcaatacgaagttgttcgtacgccagttgctggctgaaatagctttgtgaaacgttggataccagcaggatgtgtacggcccgacgggcttcttcgctggcaaagtagttctggcgatcagcatcactcatgttcttaagtttgccgaaaaaatcgagctcatagctgagctccagtctcgcgtcgtactcctgtgtggtcggcttgtcacctttcagaccaccgctgtatgttatcccggatgaggcattcagctggggataacgatctgcatccgtgacgttgaactgggctcgggcctcttcaaccttcagggcagccattctcaaatcacggttattagtcagagcttcaccgatcaaccgggtaacctggggatcgacaaaaaagttacgccagcccgtatcctgatagccatttaccgctggcgtcaggctgttatgggacagtgaaaactgctggggtaccggtgctgcgggccgctgatattcaggcgcaagcgacacgcagcctgccaggatgaatatcgtgctaatgctgagtaattttaatttgaacataacgcttctcgtccaggcagacctggtaaatggttcaaatgaagtccagagtattgataggggtactttacctaacgctctctgtttgccgggtgacaggataatgacaatgttgtcatttttgctgtaatccgttgataacgatcgtgggcgcaatagaatgacattagcagccagccggggagcaagatgaaaatattgatcgtcgaagacgaaattaaaacaggtgaatatctcagcaaagggcttacagaggcagggttcgtagtggatcacgctgataatggtcttaccggatatcatctcgccatgacagccgagtatgatttagtcattctggatatcatgctacctgatgtgaacggctgggatatcatccgcatgctgcgcactgccggaaagggtatgccggtcttactgctgacagccctcggcacgatcgaacatagggtcaaaggactggaactgggtgcggacgattatctggttaaaccctttgcgtttgccgaactgctcgcccgggtgagaacccttctgaggcggggaaacacgatgatcacggaaagccagtttaaggtggctgacctctcgattgatctcgtatccagaaaagtcagtcgcgccggaaaccgcattgtgctcaccagtaaagagttcagcctgctggaattcttcattcgccatcagggagaggttcttccccgctccctgattgcctctcaggtctgggacatgaattttgacagcgacactaatgcgatcgatgtcgcagtaaagcgactccgcgctaaaatagacaacgattacgagacaaagctgatccagacagtccggggcgtgggctacatgctggaggtcccggatgcatagcaaaccttccagacgccctttctcactcgctctgcggctgaccttttttatcagcctgtccacgatactggcttttatcgcattcacctggtttatgctgcattctgttgaaaatcattttgccgagcaggatgtcagcgatcttcaacaaatcagcaccacactgaaccgtatactgcagtccccggtggatccggatgataaaaaaataagcaaaataaaggaatcaattgccagctaccgcaacgttgcccttttgctcctcaatcccaggggggaagtgctctttagctcagctcagggggcggcactacgcccggcagtgaattcagcagattttagcgagcacagccgcgcacgggatgtctttctctggacggtggaggatcctgcgggaccgatggataccgggtccgaaatgaagatggaaacatacaggattatcgcctcctctggtcaggcgatatttcagggcaaacagcagaactatgtcatgctgactggcctatccattaatttccatctccattacctcgatgcgctgaaaaagaacctgattgcgattgccgtcgtgataagcctgttgattgttctgatcattcgaatcgctgtccgtcaggggcacctgccccttcgtaatgtcagcaatgccattaaaaacatcacctccgagaatcttgatgcgcgactggaaccgacacgcgttcccattgagctggagcaactggttatctcgttcaatcatatgattggaaagattgaggatgtctttacccgccaggccaatttctctgccgatatcgcgcatgagatcagaacgcccatcaccaatctggtgacgcagactgaaatcgcactgagtcaggatcgaacacagagggaacttgaggatgtcctctattccagtcttgaagagtataaccggatgaccaaaatggtcagcgatatgctgttcctggcacaggcagataataatcagctgatacctgacagggtcatgtttgacctcagagcggaagtcatgaaagtcttcgagtttttcgaagcctgggccgaagaacgcaatatcacgctcaaatttaacgggatgccctgcctggttgagggagatccacaaatgttcagaagggcgatcaataatctgttatccaatgccctgcgttataccccggagggacaggcaatcaccgtctcaataagagagcaggagagcttttttgaccttgtgattgaaaatccggggaaaccaatccctgaagagcatttatcaaggttgtttgaccgtttttatcgggtggatccgtccagacaacgaaaaggagaaggcagcggcatcggccttgcgattgtgaagtcaatcgtggaagcacatcacggaagagtgcaggtggaatcggacgtacactcaacgcgttttatcttatccgtgcccagactggagaaaatgattccggacacccagtgctgggaataaagatttaaatgacaaagatgtcattagcctgtcatgcagcaaacagaagccattcgatataattagtgcaacttatcaggaaggctggattgctttatcaatatccggcgtcagtggacgccaggaaatgaatatccagtcccctcccggagaaataaacacttccgaacctgtttcagttatggaactgaaaacaccggttgtactcccccggacatcactaattaagaaatggagagttatcatgaaaaatatcgtattagcatccttgctgggctttggcttaatttcttcggcctgggccactgaaaccgtgaatatccatgagcgggtcaacaatgcacaggcacctgctcaccagatgcagtctgctgcggctcctgtcgggatccaggggactgcacctcgtatggccggtatggaccagcatgaacaggccattattgctcatgaaaccatgacgaacgggtcggcggatgcgcaccagaaaatggtggaaagtcatcagaggatgatgggaagtcagaccgtttcccctaccgggccgtcgaagtcattagcggcaatgaatgagcatgaaagagctgcagttgcccatgaatttatgaataacggtcagtctggcccacatcaggccatggccgaagcgcatcgtcgcatgctcagtgcaggctgacggcgagggaagtatctgtgctgtccttatttccttgatagatttttccgtaaccggatatatggcaacatctttgccccctacagggggcatttttatcagattctgctacagttaacgggcatcaacgctaaaaggatattttttatgaaagccagaaacactttatttgcagtattaatgttatccctgccagcgatttcagcagaacattcagaaatgaaaatgactgatatgtctacctcggcttcgtcacaggaatatatggctggcatgaaagacatgcatgacaaaatgatggctgccgtaaatgagtccgatcccgacaaggcttttgcgaaaggcatggtagcgcaccatgaaggggcaatagcaatggctgagaccgagctcaaatacggaaaagatccgaaaatgagaaagctcgcgcaggacatcattaaagctcaaaaaggtgaaattgagcagatgaataaatggcttgatagtcaaaagtaaacattgtagaaatgtcacgacaagcgtgattttacatcgttcctgggcgcgggagtcggttaatctttatataattcaaacccgattaatttcgggtttttactactctgtactccggtcctttgttgaggaccggaatatatgcacctgagatgcttatttaatacattatctcgtcatggatacaatgtcgctcaggatctcaaccagctcgcttctctcctgcgttccgtcatgataggttgatcttgagatgattctttctgatgtcatctgaggccagaatttatctagtacattatcgggtttcattcccacagcccggccgattatttttttagcgtcacaggtgtccgtaaacgtgacggctacaccagtaatttcctcgataagatccgggcacagatagttttctatctcacgtttgcgcgtagcgaaaaataccttaccggcctcctctacttcttttttacgcttctggatggacagaacctgtgcagggtctcccccaatatcggagtccagaaatacgcaccagggaagccccagatctttggccagattcaatgtaacccagtgtttgacgctaccacaccctcctatgaggactggcactattttcacgtcctccagagaggctggcagcgcacctgactgttttaatgaactggccgcatgcctcaggaaagtaacatccgactttccctctaccagaacaatcccctgcgccctttccataccggtctctggcagcacccccaggctttcagtggcttccttcagcactgcgtcatccggcatttttactacgggttcacccgcctcatttcgggtaacataacgtacgccttcgacagggattaatccggccagcgccgggacatgggtggtgacgataatctgacggtgcggctggcctgccagtgccagtaacgctttcatcagcatcatctgatagttcggatgctgtgacgtttcaggctcctctatggcataaatcacatttctgggcgtccccgcgacattcttttcagcctcagcccgaaaaaattcaacaggataagcctccttatcccgctgccgcgcttattgatggggatgccattttccccgtccagggtgaaattgaaggtccacttgggtttctccttaaatcgtggagtcagttcactggcgagttcgggggccatttcacgtaatttatccagcgttctctgtgcgacatccaggacgctgtcctgaatctcattttccagcgctgtaattttgtcctgcagcgcagcctgagcgtcttttacggcctgctgtaaggggtttttagcttcggaatccccgtcgctgctttccctgtcggctttgaaaatcgcatacgtgggcagcaaatcgaggatcttaccccataatgattttgtgtcggttccgaactctttatcgacatccagcataatttccgaacaggtatagggggctgcggcttccctgatggcctgacgccataacgatgcagtgcgtttatccgccacatttttttcaacttcttttcccaccgccttgagctcagaaattttcatgcccagtaaatttctcaggggctcctcatccgggtggatgcagcggatgcaggtctgctccggttttcctgaggtcgttgctttaaacgttttgacgatttcaaaattgccgtcctcattcagcagatgttctgaggcgagcgtggtctgcaccctgtcgtcgatcatgataaaatcgggcaggtcatcaaattcacaggctatttcaaaacggccgtccccttctcttaggctgaaacagttcatgtcattcttgtcagccttcattccttctgtttcaaaaaaaatagccagcgcttccagaagcgttgatttcccaaagtcattacgaccgacaatacccgtcatgctttcatcaataatgatttcagtagagtttctgtagcctctgaagtttttcagttttaattttctgagccgcatatgaagtcctgtgtgtaagaaagcgttttgctgcaacctgaatacaaaatatattttcaaatgcctgccaacaagcagggataaccgttattcagaatatcttaacgacatttcgggattatgatctggtcgcgctttcagaactttactgcccctcaaaacaccggaaactaacttgtggttggttacatggcaaagttaaaactccagaatcacgggtaatgatttcaatgcttattatattttttggaattgactcatgagctttataatttaaatgataataataaccattcttttatgcgtaatatttgctactgacactgatgaatttaaaagaagatagattttcatttacggattatttcctaaattcatcgataatgtgatcgacataaaattttcactgaagaatgaagagataatttaaggccgagcgaaatagctcaaaatggtgtatttaacataacagaagaaatgaaaggctctatcgcaacctgatacttcaggccgctaaggggttaatcttgttgaagaaaaattagaccgggaagcgccaggcgtcaccatttctcccgcctggctggaagtgaagaataattgtgcatagctccgtattcgggctttgcatctgacaatggttccctggatgaaagtacgatctccactccaaggacgctgaacaccctaaacaaacgctcaaaacccgcacttgcagggttggcctctagtcgggcataagtttgctgtgttatacccaaacgttcagaaacatctttttgcgtcagtccattggctttgcgaaagccgattaaaacaggacgtaactgattcaaagtcttcaaagcgtattgagtgttcataagtgaccttccgtatcgacgagttaacaagcataacgcagggatttacagcatataggctgtaatgctcattaacagactgtaggctgtaatacgaatcctgccaagatgcggcatctttcaaatacaaggccgtattgggtaagcagtacaccgttatatagcaccccttgcccctttgctggagagggacccacgtgatcgcaggtcttttagacgttgttgctaaccggcatcatacacaggtggtaacccccagggaaactctatgagtgataatttattcctgccccagtcaaaatataaaaccttatctaactagctttcttagtattttataaatgaagtgaaattagcgaagaagttttacattgtaaagtgagcaaaaatatttaccattcaactggcaaaatttacaatctgcagcccttagcctgagaaaatgcacattaacagaataatcatcaagtccgatagaggcataacttacgtcctcaaaaatatcagaaataaatgagttgaaattacaaaaattaacttcacttaacatcttgaacaccgcagaaatatatctatcatgcattatcttgacttcgataaccttagataaacttgaatgcgacttacatttgaagagatcaaagagaaagtaaatcagcatatttttattgtccgaaatccattttaaaattttattacgtgcacatggtaatatatacactggatttttgaaagggtttgaaacgtcaaccacaagggaacaataaccatgaggatttattccacttataattaagtcactaagtcctttcactgcattcaaatagttatcaaaacaaacctcatataaactggtactatgaactgcacatttagattcaaacaaccatctatgacgcagataaccaatgcctttagagtgtatatcttcaacaatacatttgtgacagtaacgaatgtttgagatgtttaccaatggatatgaattagttatgtgaaaatttttccgacaggcatcttcaacagcgttaaaatacccgtaaacaccagaagataacgacactatattggaagttagtatataaccatttctagtggcaagaatgtcatatatatcctgcaagctatgcaatttgtacatatcaatcagttcgaaacgaggaaaggcatcgtaccttagtgcgccatgctttgatattatgttcctgcaattggataagttatacattatctgtgaacgcagaagaaaactgtgccacaattcattttcgtaaaccatataactccctcttatttaattagttccatttttctgagaagtatcattgtcattggtagtttatctctgtatttcaaaagccagccatgccctcccagtaaagcatctagacttgtaagtgacatcgagtactgcccctgagataaaacatcatttattaatgatgatgagataatatctctctcgctccagtctactcttttatttttatagcatcgtattgttttaggaagacaggaattaagccagtcacattcatgtttatttagccaatagaaacttgcataacaactttctttgactaactttcgtgttatagaaacggattgattatgtataaatcttaatattttctgcttatgacgccgtcttaaagaatcttttttacattttttacgccatgagcataaaccgtaacaagatgaaattacagaggatacagctccttccgataatgagtttttctcagctatggatgctagactaaacccccttacagccatagacttgataagcaattcagtgaatatattaatttttgtgtttcgcttaaacgccctcaggtattttttataaataagtgttttaatgtaacatctgctgcgactaaattccttcccaaggttgctaacactagtattattttcaactatatgaaaactgtatttcttatgacttttaaagatttctttctttttattagtacgacttcctgcatacgttggccagcaagtatttaacaaacaataacaaagcaaaagatgctttgtgggatgctgacaacatttgtctttgagtataggctcccagggtgatgctgccaacttactgatttagtgtatgatggtgttttgaggtgctccagtggcttctgtttctatcagctgtccctcctgttcagctactgacggggtggtgcgtaacggcaaaagcaccgccggacatcagcgctatctctgctctcactgccgtaaaacatggcaactgcagttcacttacaccgcttctcaacccggtacgcaccagaaaatcattgatatggccatgaatggcgttggatgccgggctactgcccgcattatgggcgttggcctcaacacgattttacgtcacttaaaaactcaggccgcagtcggtaacctcgcgcatacagccgggcagtgacgtcatcgtctgcgcggaaatggacgaacagtggggatacgtcggggctaaatcgcgccagcgctggctgttttacgcgtatgacaggctccggaagacggttgttgcgcacgtattcggtgaacgcacgatggcgacgctggggcgtcttatgagcctgctgtcacyctttgacgtggtgatatggatgacggatggctggccgctgtatgaatcccgcctgaagggaaagctgcacgtaatcagcaagcgatatacgcagcgaattgagcggcataacctgaatctgaggcagcacctggcacgactgggacggaagtcgctgtcgttctcaaaatcggtggagctgcatgacaaagtcatcgggcattatctgaacataaaacactatcaataagttggagtcattaccggctcccagtaatgataatcagttagggatgttggtataagtcccgatgaacctccccaaataactggcacttagcataaacatgtgcgtagaatacatttttctttaaatttccatccaatgataataaattcaactttttaagtacatccatgtaattggggtgtgtaatatcttttcttctgattatatttagggactcataacaaaacttagcaaaatcgaagtctatctcattgctaagttgttctgtatacgaaacaggaggcatcagtccaatacgtatgtgcggtgaagaagggacatggatgctttcaagcgctaccggatgccgatggcaggttgtaaccccatgaagctgatgcgccagatgccaataagtaacaccataatgaaaagtatcttcacgagcgcaaaccgggcaaaacttcaatagtgtgcgctgccctagtgaaaaattactaaggcggcacaatcgattaagcctggcaggggtcgtgttgaaatccataatttcattacgactgattggtagtgcccaggcaaaaagagggagtaaagtctgttcatgccagagctgatctgcactttcggatgtatgaagagaaatagcctttaatcctgaattgagaattggatggacgttcatatcaggtttgttgaaaatgatcgttaacagagaagatggggacataccgtacacggtagttgtccgacaaaaccggctgaacaaggattcatcaggcaaaacaggcaacattctcatttcccacacctctctttgaccgttacgaactgttacctcattacaatttattaagtggatctatatttataagcccgcaacgctgaagagcatcgtaggtatttttcttttcagctgttctgttgataacaagatcgtggtcaagagacagtattttctcgtcgaaattgcgcaaaacctcgtctatttttcctacgaattccttgtgctgtggcctgtctatatccccagggatcaaagactttagggacttctctgccatgattttagccgaagcatcaccctcattagatgcagagagccatttagcttcctcatcttcagtcgcggcccccgggagtggagtatccttatattcctccgtatgactcacgagtaccggtacagaggccgacaagactgcgccagtgatgatttcattgccgctaccgataacctttaattgtgcccccgataaatcatctgagccaatccaatattgcctttagataaaatgaataatttttcgtttaactcatcatttaatggagtttcaacatttgtccattgtaatggccataaataatgaataaacgattgccagtcttgtgaatcgtatctaacattcttaattttcatgtaaccaccagactctgcccgcctggcaattctcattttctttgtcagcgtctcgtcaaaaggatgatttccacaaaaaaccatagatacccccatggaatctacaatttcatgtaaaaaatcaatcaacttactctcacccccggttcttgaaaatttaagcctctgcatttcatcaataacaaggatacccaaaaatgatgatttaattctttgtgcaatctggcgagccagagcaccatttctaatctcaggtgtagttcgttcaataccaattgcatcatctaatttttgtaaaatctcttcacaaaggtctctcacacttgaattgtatggacaattaatctttacccatacaatttgcttactgaagccgggaaaaactcctttatagctgctgtgttctataatctgagggaaatgatccatgacttgctcaatcatggtagtttttccagaaccactcattccaactatcgtaatagtttcagcctgggatttaaaatatccactttctggctcaatatcaggacgctcatttccatagtaatgaagatattgaattgttccgctttttaaaggattacgagctgcatagctttccctaagtgcccgtaagatcatcttataagcctggataagattggtttgagggcaacggaatttctttatacgttcgacatactgctctctaacattcgccggggcagtccagcggattttttcgtcaatttcggggaaataactcatttccagaagtacttcatcttccgtaagcgcttcaggaagtgcttcaattaagggattgccacgatactcaggtaactcctgttctttatatatcgctgaaacgcgccgtataagattcattattctgcgtcctcagtcttcttcttaccttttaaccatctttgtttctcctcccggccaggcaaaagcagaacattactggatgaaggaagtaggggttcagatcttccattagcaacatgagttcgccctaatgaatcaagttcatttttcctgttctttttaatatctttaccatgtacccggcgagattcgtatatttcatttaatctttcgttacctttcctgttaaattcatctttattattgatattgctgagcgaatccagagtaaataaattaatttctttttgagtatctacccaatcagccattacatctgtatcaagatgagctttccctttaaatacatctcttttcttaagtaggtaatgttttttgaaaatgctatttttgtcaaatcttacatatatataatctacgcaattgtcatctattcttgcttcacaagtggttcttccaaatactctgacacctgatgcaatttcaggatcacattcataaaaaagattattgtactgaatcccaccggcggtaatgttagcgttcacagggattaacaatcgtgcgatcacttcgtcggccccaacggctcttgcgctgaatctcccgtgctttaagcttatcatccaactattttttggtgatattacgagatcattttcaatcagtaagggattgatataagccagttcctcatacgttctctgattatgtgcaagtatctcccgaatcagtaaagacgtgacctcctgaatcgttaaacaagccctggattgcggtgttggctctcctttaacaatctttccccttcgtgttgttccaataagcctatgaataacctcatcattcagaatgccgaaacagcgttcaacaatgctttttctgtcgcctctaccgactggcgcaaactcaagttttgtcaggggggtcatctcttcctgaggtttaagaccaatcatctccccgttgtcacacatcaatgttaatggaatgtgagaacaaggccaatcatcatcagtaatagagattccaaataatctacaatattctttttttggcataaagcaatttgctaacgcttgtcgggcggctcgccatgaagcatggtataaagaaacatgaaggccaacaatcattcttgttgcacgatccaccactgtataaatagtaggacgcccaatgacttttcgtctgtttaaactcgaaataagatgtacatcagcgacagttgagtctatttcgaaaacatcacccggcaaaacagttgtattagccacactacctaaaagcgcccgcattttgaggtctatttcttttttcgtgttcttcttatttatcgagaaatctttagtgaagagttttttattccagtatgaaaattgttttaaagaaggaacatatggagctctattttctaggtttgctgttttaatttcatccctaaaatacaaatcaatatgtctctctaatgttttctttatcgtatctccgttaactttataatgatacgtaatgagagattttctaatattatttatatctctttcattaagaatgaaaacacgtgatcgttcattaggtaatgctctgttttttttggaattcccaagtttaatttcatgtttgattctacttttcccagcggcgccacagttcgagaatgcgggtagcaatgcataaatatcctgcccatgtcgccaatacaacgccagaagcgttctgatagtatattgtgatatttttttatttcttgagtaatccattaaaaggtgcgactttttatgtaatgcatagtcgaacagaaacattctgtcatctacaagatctttaatgatattgtaattttcatctcgccttcctctgtctttatctgttaattctttctcatctactaacatatatgaaggatatatataatctttacaagttatgctatttgattcaatataatatttaaacattgaaaatgagaaagggattggcttacccgttctttctgattttattttaaacaaaattaacaaatcgacctttctgtcaaaatccaaaacacggtaaagtccctctgcaagcaaatcagtgccttgagagagccagactgaattcctaataatatccatttgcgttcagtcctatatagtggtcattggaaattatctttatcagaccggtttcgagtattggatatgataaatcaacatttatcatttttaatccaatcattgcctgcaataacatcatcgcttcttgtgcatctaccccaaagattgatgaaatcattgcacgtagtcctactatgggataaacatctggtttaagcttccataggattttatcaagaggatatttatcataaaattcagaaccatctcttaatacagaagtagcccagcaaatgtttttaccgacgacgttattgagttccgagccaacataaatttgaaactcaacatcaatcaactgccaaaacatcctctctatttcaagtttttgggcttcgcgttcaggtatgctctcgttatgttttactgctatagctttgtatcgaagtccgccttcaggagttctcaaggtcagtaaaaaatcggttgtcataacattcagaacttcgacaggtactcctcttactcccctcaccataggatgttgaaaatgtagatgatttgctatttgttgggtaagccggagaggaaagagtgggaattgttcccggatatcaatcaccgagtcattaaactcagccagatagaaaaagttactttcgacagaagaaaggagatgatggtttcgaaacgtcttaaggccaaagactatcgaacggtttccacgggatttaacgtcctgagctctaagccagggctgataactttggccatagcccactcctatgccgtcacctagcgcattttcataatccaaataggatttgagacgcctacccctagccatgatcgtaccctaaaaacgacattgatacgtacctatatgtgcattttatagtctccaaccctataaccacacattcagtaagtatacaacattagcgtcgttttttgagaatggttacaactttagtgctttgtgtacaactttattgtcctcggacagcaatcaaatcctgcgcacaagcccacgcactcgaccacgcccactggaagttatagccccccagccagccggtaacgtccatcacttcgccgatgaagtacagcccaggcactttgcgcgcttccatcgtccgtgaagagagttcgttggtgtccacgccgccgagcgtcacttcggcagtgcgatagccttcagtgccgttgggttgtacgcgccagtcggtcaatgtgctaatcagtgcctgttggtcacgcacgttgagctgttttagcgaaacatccgggatttgcccgagttgctgtaagcgttcaaccaaccgcttcggtagatgaaccgccagtgtgtttttcaggctctgattcggatgtgcgttacgctgctcattcaggaaggtttcgagatccacatccggtagcagattgatactgacaaattcacccggttgccagtagctggaaatctgcaacaccgccggtccagacaagccgcgatgggtgaagagtaagttctcacggaaaacgatgccgttttcagcggtaatcacggaaggcaccgccacgcccgccagcacctgtaactcttcgagcaacggtttatgcagagtgaatggcaccagacccgcgcgggtcggcagcacgttgaggccaaattgttcggcaatcttataaccaaacggcgacgcgcccagccccggcattgacagcccaccggtcgcgatgaccagcttttcgcaaccgacagtcatgccgttcagttcaagcgtgaagcctgtttcatccttcgccacactcagcacttcgctacgcaatctgaaggttacattgcccttctcgcactcatccaccagcatgtcgacaatctgctgcgcggagtcatcgcagaagagttgtcctaacgttttctcgtgccaggcgatgccgtgtttattgaccagatcaatgaaatcccactgggtaaaacgcgcgagtgcagacttacaaaaatgcggattctggctcagataagcgcctggttcgacataaaggttggtaaagttgcagcgcccaccgccagacataaggattttgcgccctggttttttaccattatcgatcagcagaacccggcgtcctgcctgacctgccagcgcagaacagaacatacccgccgcaccagcgcctataataatggcatcaaacctttccacgttgcgctcctcttagaaaaaacgggcgtgaattgtaaagattcctcagtggtcgcaccagcatcaatattactaaaaggaagtatttgcctgaattatataagataattattttttgagtgaaatccatacaggaggcaaatcaaaaaaagtctatatttcactttgcccgcgccgcgaaagtcactgataatgcgccgcgttcatgtcctcaaaatggcgtaacgtcctatgctacatttgtttgctggcctggatttgcataccgggctgttattattgcttgcactggcttttgtgctgttctacgaagccatcaatggtttccatgacacagccaacgccgtggcaaccgttatctatacccgcgcgatgcgttctcagctcgccgtggttatggcggcggtgttcaactttttgggtgttttgctgggtggtctgagtgttgcctatgccattgtgcatatgctgccgacggatctgctgcttaatatgggatcgtctcatggccttgccatggtgttctctatgttgctggcggcgattatctggaacctgggtacctggtactttggtttacctgcatccagctctcatacgctgattggcgcgatcatcgggattggtttaaccaatgcgttgatgaccgggacgtcagtggtggatgcactcaatatcccgaaagtattaagtattttcggttctctgatcgtttcccctattgtcggcctggtgtttgctggcggtctgattttcttgctgcgtcgctactggagcggcaccaagaaacgcgcccgtatccacctgaccccagcggagcgtgaaaagaaagacggcaagaaaaagccgccgttctggacgcgtatcgcgctgatcctttccgctatcggcgtggcgttttcgcacggcgcgaacgatggtcagaaaggcattggtctggttatgttggtattgattggcgtcgcgccagcaggcttcgtggtgaacatgaatgccactggctacgaaatcacccgtacccgtgatgccatcaacaacgtcgaagcttactttgagcagcatcctgcgctgctcaaacaggctaccggtgctgatcagttagtaccggctccggaagctggcgcaacgcaacctgcggagttccactgccatccgtcgaataccattaacgcgctcaaccgcctgaaaggtatgttgaccaccgatgtggaaagctacgacaagctgtcgcttgatcaacgtagccagatgcgccgcattatgctgtgcgtttctgacactatcgacaaagtggtgaagatgcctggcgtgagtgctgacgatcagcgcctgttgaagaaactgaagtctgacatgcttagcaccatcgagtatgcaccggtgtggatcatcatggcggtcgcgctggcgttaggtatcggtacgatgattggctggcgccgtgtggcaacgactatcggtgagaaaatcggtaagaaaggcatgacctacgctcaggggatgtctgcccagatgacggcggcagtgtctatcggcctggcgagttataccgggatgccggtttccactactcacgtactctcctcttctgtcgcggggacgatggtggtagatggtggcggcttacagcgtaaaaccgtgaccagcattctgatggcctgggtgtttacccttccggctgcggtactgctttccggcgggctgtactggctctccttgcagttcctgtaatcgtacacaccaaaacgagcgggtcagtttactggcccgctttttttatgcgttattattgctgaagtgcttaatgccaaatcatcaatgcaatcaggctgaccaccaccagaccacacaatgcgctggtcagaataaactgccgacgcacccgctcacagcggcgaataaattcatcatcgtgatgatcgcgataacgttgggcatagatataccaaacgagacgcacctgtttgttgggttggccatgtgaggtaaaaaagccccctccatcaacatattgatagagcaatggatcgcagttacgcagtaccactaacaacgcgcgtagtgatgagaaatagcgcgccatgttaacaatgcaaacgacacataaagcccaaaataatgcgacggtgcttatcatacctcctccccggcgacctgcccgcggagttccaccccggggctaccgctcccgatacgctgccaatcagttaacaccaggtcctggagaaaccgcttttgtggtgaccaacatccgagcggctctatagatagtgtaggagatcaggttgttttttttccagaaggttaaccactatcaatatattcatgtcgaaaatttgtttatctaacgggtaagcaaggcggattgacggatcatccgggtcgctataaggtaaggatggtcttaacactgaatctttacggctgggttagccccgcgcacgtagttcgcaggacgcgggtgacgtaacggcacaagaaacgctagctggccagtcatcgacaactttatggaaggagtaacactatggcttataaacacattctcatcgcagtcgatctctccccggaaagcaaagttctggtagagaaagcagtctctatggctcgcccctacaatgcgaaagtttctctgatccacgtagatgtaaactactctgacctatacaccgggcttattgatgtgaatctgggtgatatgcagaaacgcatctctgaagagacacatcatgcgctgaccgagctttccactaatgcaggctacccaatcactgaaaccctgagcggcagcggcgacctgggccaggttctggtcgatgcaatcaagaaatacgatatggatctggtggtttgtggtcaccaccaggacttctggagcaaactgatgtcttccgcacgtcagctgatcaacaccgttcacgttgatatgctgattgttccgctgcgcgacgaagaagaataatcatccctccacgacgtgttcctgaacgcccgcatatgcgggcgttttgctttttggcgcgccttgttacctgatgcagcgtaaaccccttatctggcctacgatctgcgtacgcaatcaaaatctcctgccaatacaacatttaacaccataatattttccatcattagtgtgatcagctggttattttctgttgtaatagtgtattaatctattcaccgcatcaatattaagaatctctgacagatgtaaactttttcgcgcgttatcccttacgcgttcatacttttcaggatggtattggaaggttaataaatatgaatacaacaacacccatggggatgctgcagcaacctcgcccatttttcatgatcttttttgtcgagttatgggagcgattcggctactacggcgtgcagggcgtactggcggttttcttcgttaaacagcttggattctcgcaagagcaggcttttgtcacttttggtgcttttgctgcgctggtctatggcctcatttccattggcggctatgtcggcgaccacctgctggggaccaaacgcaccattgttctcggagcacttgtgctggcgattggctacttcatgaccggcatgtcgctacttaagcctgacctgattttcatcgccctggggactatcgctgtcggtaacggcctgtttaaagctaacccagccagcttgctttcgaagtgctatccgccgaaagatccgcggcttgatggcgcattcaccctgttctatatgtcgatcaatatcggctcgttgatagcgttatcgctggcccctgtgatcgctgatagattcggttattcagtcacctacaacctgtgcggggcggggttaattatcgcattactggtttacatcgcctgtcgtggaatggtgaaagacattggttctgaacccgacttcaagccgatgagcttcagcaaactgttgtacgtattacttggcagcgtggtgatgatcttcgtatgtgcatggctgatgcacaacgtagaagtcgccaatctggtgctgattgttctctccatcgtcgtcaccatcatcttctttcgtcaggcattcaagctggataaaaccgggcgcaataaaatgtttgtcgcctttgtcctgatgctcgaagcggtggtgttttacattctctacgcccagatgccaacatcgctgaacttctttgccatcaacaacgtgcatcatgaaattctcggtttttccatcaacccggtcagcttccaggcgcttaacccgttctgggtggtactcgccagcccaatactggcaggcatttacacgcatctgggtaacaaaggcaaagacctctcgatgccgatgaaatttactctcggcatgtttatgtgctctctgggctttttgacggctgcagctgcgggaatgtggtttgcggatgcccaggggctgacatcgccatggtttatcgtgctggtgtacttattccagagcttaggtgaactgtttattagcgcccttggcctggcgatgattgctgccctggtgccgcagcatttgatgggctttattctcgggatgtggttcctgacgcaggctgccgcgttcttgctgggcggctatgtggcaacatttaccgcggtgccggacaacattaccgatccgcttgagacgttgcccgtctataccaacgtgtttggtaagattggtctggtcacactgggcgttgcagtagtgatgctgttgatggtgccgtggctgaaacgcatgattgcgacgccggaaagccattaattattcttgcagaaagcagggtagcgttatcgctaccctggtttacttttacactggcgtacctgcataaatatcaaacctatgccctttagtgactaccgcgtttggcgtggcgacattcgccagcggtggcgcgtagtccgggcgctttaccaccacgcgtttggtcgccagcaagcgtgcaggctccagtaatccatcggcatcaagatccggtcccaccagcgactgaaagacacgcatctcttttttcactagcgcgcttttctgcttatgcgggaacatcgggtcgagataaaccacctgcgggcgcggggtaatatcagtcagcgccgtcaggctggaggcgtgaattaactgcaaccgctcctgcaaccagccgccgatttccgcatccgcataaccacgcgccaggccgtcgtcgagcaatgcggcaacgactggattacgctccagcatccgcacgcggcagccgactgaagccagcacaaaggcatcgcgccccagccctgcggtggcatccaccacatccggcaaataatcgcctttaatgcccaccgctttcgccaccgcctcaccgcgaccaccgccgaatttgcgtcggtgcgccatcgctccgccaacaaaatcaacaaagatgccgccaagttttggctcatcacgcttgcgcaattccagatgttccggcgttaacaccagcgccatcaggttgtcttcatcgtgctccagcccccagcgggccgccagaacagataaggcgccgtctccggcgcctgtttcatcaattaagcagattttcactgaatgatcagcccttaatgccgtaatgctccagcatcgcatccagctgcggttcacgaccacggaagcgtttgaacagatccatcggctcttctgaaccgccacggctcagaatgttgtcgaggaacgactgcccggtttcacggttgaaaatgccctcttcctcaaagcgcgagaaagcatctgccgccagtacgtcagcccacaggtagctgtagtaacctgccgcataaccaccggcgaaaatatggctgaaagcgtgcgggaaacggccccaggacggagatggcaccacggcaaccagtttcttgatttctgccagagtttcgaggatttttgccccctgatccgggcggaactcggcatgaaggcggaaatcaaacaggccgaactccagctgacgcagaataaacagcgccgcctggtagttcttcgccgccagcattttatccagcaactctttcggcagcggttcgccggtttcatagtgaccggagataaacgccagcgcctccggctcccagcaccagttttccataaactgactcggcagttcgaccgcatcccacggcacaccgctgataccggaaacaccagcggtttcgatgcgggtcagcatatggtgcaggccgtgaccgaactcgtggaacagggtgatcacttcgtcgtgagtgaacagcgccggtttaccatttaccgggcggttgaagttacaagtcaaatacgcgaccggtttttgcagcgaaccatcagctttacgcatctggcctacgcagtcatccatccacgccccgccgcgcttgttttcacgggcatacagatcgaggtagaagctgccgcgcagttcgttattttcgtcatacagttcgaagaaacgtacatccggatgccagacatcaacatctttacgctctttagcggtgatgccgtaaatacgtttcaccacttcaaacaggccgttaaccgctttgttttctgggaagtacggacgcagctgctcgtcgctgatgctgtagaggtgctgtttttgtttttcgctgtagtacgcgatatcccacggctgcaactcatcgacgccaaattccgctttggcgaaggcgcgcagttgtgccagctctttttcgccttgcggacgcgcgcgttttgccagatcggttaagaaatccagcacctgctgcgggttttctgccattttagtggcaagggatttaaaggcgtagttttcaaagcccagcagttgcgccagttcgtgacgcagagcgaggatctcttccatcaccttgctgttatcccatttaccggcgttcgggccttgatcggaggcgcgggtgctgtaagcgcgatacatctcttcacgcaaggcctggttgtcgcagtaggtcattaccggcaggtagcttgggatatccagcgtcagcaggtagccttccagctctttcgcttcggcctgggcttttgccgcagccagcgcgctttcaggcatccccgccagctccgcttcgtcggtaacgagtttggtccagcccatcgtcgcatcgaggacgttgttgctgtactggttgcccagctcggaaagacgagtggcaatctcaccgtagcgttgttgtttctctattggcagaccgatgccagagagttcgaagtcgcgcagtgcgttatcaaccgcttttttctgagccgtgttcagcgtggcgtaatgatcgccatcgcgcaggtcgcgatacgctttatacagcccttcatgttgccctacccaggtgctgtattccgacagcagcggcagggtttgttcgtacgcttcacgcagttccgggctatttttcaccgagttcaggtggctgaccggggagaagatacgccccagcacatcgtccacttccgccaacggctggcagagattttcccaggtgtacggtgctccttgcgctactacgcgctccacattttcgcggcagtcgttcagcgccttagtcacggctggaacgacatgttccgggagaattttagaaaacggaggcaattcaaagggagtcagtaacggattcgtcattcgcgcagtcctggttaaagaggttaaggaagcgctcaacaggcgctttacataatgtgtgtagcatggggttaagtgtagtgaatttcaatgagaaacgttacgctttcgcggcggcggcctcttttcggtatactgtcctgatacgcttttgtgcgccccgaatacgggccgatttttacttaccggaacacctttacccatgctcagttatcgccacagctttcacgctggcaaccacgccgacgtccttaaacataccgttcagagcctgatcatcgagtcgctgaaagagaaagataaaccgtttctctatctcgacacccacgcaggggccgggcgttatcagttaggcagcgaacatgccgagcgtaccggcgaatatctcgaaggcatcgcccgtatctggcagcaggacgatttgcccgcagaactggaggcgtacatcaatgtggtaaaacacttcaaccgtagcggtcagttgcgttactaccccggttcgccattgattgctcgccagctactgcgcgaacaagacagcctgcaactgaccgaactgcacccgagcgattacccgttgctgcgttctgaatttcagaaagacagccgtgcgcgcgtcgaaaaagccgatggtttccagcagcttaaggccaaactgccgccggtttcccgccgtggtttaatccttatcgacccgccgtatgaaatgaaaaccgactatcaggcggtggtcagcgggatagcagaaggttacaaacgtttcgccactggtacttacgcactgtggtatccggtggtgctgcgtcagcaaattaagcgcatgatccacgatctggaagcgaccggtattcgcaaaattctgcaaattgaactggcggtactgccagacagcgatcgccgtggcatgaccgcttccggcatgattgtgattaacccgccgtggaaactggaacagcagatgaataacgtgctgccgtggctgcacagcaaactggttccggcaggcaccgggcacgccaccgtaagctggatcgtgccggagtaattgcagccattgctggcacctattacgtctcgcgctacaatcgcggtaatcaacgataaggacactttgtcatgactaaacactatgattacatcgccatcggcggcggcagcggcggtatcgcctccatcaaccgcgcggctatgtacggccagaaatgtgcgctgattgaagccaaagagctgggcggcacctgcgtaaatgttggctgtgtgccgaaaaaagtgatgtggcacgcggcgcaaatccgtgaagcgatccatatgtacggcccggattatggttttgataccactatcaataaattcaactgggaaacgttgatcgccagccgtaccgcctatatcgaccgtattcatacttcctatgaaaacgtgctcggtaaaaataacgttgatgtaatcaaaggctttgcccgcttcgttgatgccaaaacgctggaggtaaacggcgaaaccatcacggccgatcatattctgatcgccacaggcggtcgtccgagccacccggatattccgggcgtggaatacggtattgattctgatggcttcttcgcccttcctgctttgccagagcgcgtggcggttgttggcgcgggttacatcgccgttgagctggcgggcgtgattaacggcctcggcgcgaaaacgcatctgtttgtgcgtaaacatgcgccgctgcgcagcttcgacccgatgatttccgaaacgctggtcgaagtgatgaacgccgaaggcccgcagctgcacaccaacgccatcccgaaagcggtagtgaaaaatgccgatggtagcctgacgctggagctggaagatggtcgcagtgaaacggtggattgcctgatttgggcgattggtcgcgagcctgccaatgacaacatcaacctggaagccgctggcgttaaaactaacgaaaaaggctatatcgtcgtcgataaatatcaaaacaccaatattgaaggtatttacgcggtgggcgataacacgggtgcagtggagctgacaccggtggcagttgcagcgggtcgccgtctctctgaacgcctgtttaataacaagccggatgagcatctggattacagcaacattccgaccgtggtcttcagccatccgccgattggtactgttggtttaacggaaccgcaggcgcgcgagcagtatggcgacgatcaggtgaaagtgtataaatcctctttcaccgcgatgtataccgccgtcaccactcaccgccagccgtgccgcatgaagctggtgtgcgttggatcggaagagaagattgtcggtattcacggcattggctttggtatggacgaaatgttgcagggcttcgcggtggcgctgaagatgggtgcaaccaaaaaagacttcgacaataccgtcgccattcacccaacggcggcagaagagttcgtgacaatgcgttaaatgttaaagggctaagagtagtgtgctcttagcccttaattacgtttccgctatcagttcagaagctgaagcagaaagcggatcagttccagcagcgcaattaacgccccaagaacgatgattgctttatcaatcacccgttttctccatgcgatggagtgagaatgcatccgcttactcatccactgcctgtcacggcgcatgccctattgttagataatggcattctcactccggccagagcatcagttaacggcaccacccgtacttctgaccaggactttgaaagcgtttatgcgcattaccagagtgaaaatgcctcagagctaactggataatcatacagtacattcaggttataaaaccagcatgtccttgcaatagtttcagtatggtattagcattgatgcgttagataatggcattctcactccagccagtgccaccaactcagggctggaaagtaaaaaaccgacgcaaagtcggtttttttacatccggattcggacaaggcttaatatgacgatgacccagtgaaagtatataaatcgtcattgcgatatataccgaagtgccccctccgccagctgaagaaatcgctaattcttgcaatgttagccactggctaatagtattgagctgttagataagaactctctcactccagccagagccaccaactcagggctggaaagtaaaaaaccgacgcaaagtcggtttttttacgtcctgattcagacctcttttcaaatgaatagccaactcaaaattcacacctattaccttcctctgcacttacacattcgttaagtcatatatgtttttgacttatccgcttcgaagagagacactacctgcaacaatcaggagcgcaatatgtcatttctgttacccatccaattgttcaaaattcttgctgatgaaacccgtctgggcatcgttttactgctcagcgaactgggagagttatgcgtctgcgatctctgcactgctctcgaccagtcgcagcccaagatctcccgccacctggcattgctgcgtgaaagcgggctattgctggaccgcaagcaaggtaagtgggttcattaccgcttatcaccgcatattccagcatgggcggcgaaaattattgatgaggcctggcgatgtgaacaggaaaaggttcaggcgattgtccgcaacctggctcgacaaaactgttccggggacagtaagaacatttgcagttaaaaatttagctaaacacatatgaattttcagatgtgttttatccgggaggcattatgttactggcaggcgctatctttgtcctgaccatcgtattggttatctggcagccgaaaggtttaggcatcggctggagtgcaacgctcggcgcagtactggcgttagttacgggcgtggtccatccgggtgatattccggtggtgtggaatatcgtctggaacgcgacggctgcgtttatcgccgtcattatcatcagcctgctgctggatgagtccggcttttttgaatgggcggcgctgcacgtctcacgctggggtaatggtcgtggtcgcttgctgtttacctggattgtcctgctcggtgctgccgttgccgccctgtttgccaatgatggcgcggcgcttattttgacaccgattgtcatcgccatgctgctggctttagggttcagtaaaggcactacgctggcgttcgtgatggcggccggattcattgccgataccgccagcctgccgcttattgtctccaacctggtgaatatcgtttccgctgatttctttggcctcggctttcgcgaatacgcctcggtgatggtgccggtggatatcgccgcgattgttgccacgctggtgatgttacatctctattttcgcaaagatattccgcagaactacgatatggcgctgctgaaatctcccgcagaagcgatcaaagatcctgctacgttcaaagctggctgggttgttttactgcttctgctggtgggatttttcgtcctggaaccgctcggcattccggtgagcgccattgcagctgtgggcgcgctgatattatttgtcgtcgctaaacgcggtcatgcgattaatacgggtaaagtcctgcgcggtgccccctggcagattgtcatcttctcgctcggcatgtatctggtggtttatggcctgcgcaatgccggattaacggaatatctttctggcgtactcaacgtgctggcggataacggcctgtgggccgcgacgctcggcaccggattcctcaccgccttcctctcttctattatgaacaatatgccgacggtactggttggcgcgttgtccattgatggcagcacggcatctggcgttatcaaagaagcgatggtttatgccaatgtgattggctgcgatttgggaccgaaaattaccccaattggtagcctggctacgctactctggctgcacgtactttcgcagaagaatatgactatcagctggggatattacttccgtacagggattatcatgaccctgcctgtgctgtttgtgacgctggctgcgctggcgctacgtctctctttcactttgtaatgagatactgatatgagcaacattaccatttatcacaacccggcctgcggcacgtcgcgtaatacgctggagatgatccgcaacagcggcacagaaccgaccattatctattatctggaaacaccgccaacgcgcgatgagctggtcaaactcattgccgatatggggatttccgtacgcgcgctgttgcgtaaaaacgtcgagccgtatgaggaactgggccttgcagaagataaatttactgacgatcggttaatcgactttatgcttcagcacccgattctgattaatcgcccgattgtggtgacgccgctgggaactcgcctgtgccgcccttcagaagtggtgctggaaattctgccagatgcgcaaaaaggcgcattctccaaggaagatggcgagaaagtggttgatgaagcgggtaagcggttgaaataaagcggcgatatccactgcccatagttggtaaagtgcgctttgtttatgtcggatgcgacgctaacgcgtcttatccgacctacaaaaccgtgcaaattcaatatatggcatgaaatatgtagagcgtagcgcatcaggcaattttgctatttacgcagcactcctcgcgtaagaattcaattatcgcttccagcattgcgtattgcgaaacacacatcagcgtccgactctcacggttttgtttgaccagtcctaccgataccagtgctgatatatggtggctgagtgtggagccaggtatcccaagctgcttttgcaactcaccgaccggcaacccttgttccccggctttgacaagatgtttaaatatgaacaaacgggtcgggtgacctagctctttcagcgctttagcgacttcttccaactgcatatgacacccctctgtctggttgatatttcgataataccagaaatatcttgatctgaatttcatttcgattattctggaaatatagatttatccaatgaggttacgtatgagtagttggcttgcgatgctgcaagatgccgcagagatgtttgtgtttctcgccgtcgagctttcgttgctgtttatagtgattagtgccggtgtcagcctgataagacaaaaggtgccagaccataaaatccagcagatgatgggggccagaaaagggagaggctatctcctggctgctctgttgggagccgttaccccgttctgtagttgctcgacaatacccatgctacgtggattgttgtcagcgaaagccgggtttggtccgactctcacttttttatttgtttcaccattacttaatcccattatcgtcggactaatgtgggtgacctttggttggaaagtcaccttgttgtacgcgattatcgccaccggcgtctccgttcttgccagtattatcctggattctctggggtttgaacgtcatatcattgccagtaaaagctcatcagcaaattgttgtgctccagccaaagcgtcggcaaaaactttgccggggacgacatatacgccaatagaagtgagttgctgtagtccaacggctaaagccattgagaaacccgtcgttaactgttgcaataccaaagcagtggcaagtattaatcccataaaactagccaccaaagatgcgttgcaacagtttaaagatgtactgccatatcttttgttaggggtattaataggctcttttatttatggctttattccctcagcgtggattgccgctcatgcaggagcagataatcccttcgccatcccattaagcgccgttgtcggtattccgctgtatatccgggctgaggcggttatccctctggcatctgttctgatgacaaaaggaatgggtctgggagcattaatggcattaatcatcggcagtgccggcgcaagcctgacggaagtgatattacttaaatcaatgttcagaatgccgatgatagctgcattcctgacggttatattaggtatggctatcttgatgggctatttgactcaattgctattttaaatagatgccagcagtaaactataagatgcatagttagtgccatatccttctaagtagaaaatcatagacaggataatccttaaaaatcacaaatgatttaactaatgcattgagaatgatgacggctcggtcaacaagtcatcaacagacaataaccacgtaatcatgcttctctgacattttatcggagaagcaatgactctttgtctcagtaccctcctcctttttaaaaggcagatttcagtcgctaatacaacacatttttaaatacactttaacctggttcattattacacatctaaaacatcacaaaaatattacttcacacactatcggagaacaaaataactttttaaaatgagcgctttttgatagttgttaacgttttcctttacgatactatcactgccttttttatacacaaatattaccgggtggaaatgaaagggaatttaaaggtaattatatcaggaagatataacgcattatatttattgtgtgtagaagaaaatccattcctgttctaattatccaatttaaacatcttagcataaaacaaatgatgaataaggaatttatgtcaattgactttaccccaggtataataaatacatatcacggcgatatttataactgcacaacaaataccgataatgctaaaacgccagacacaccgaagtggccttgcgataattgggaagaacaacaacccattaattccacattctctggagaaggatatatctctgatcaatatgatttagcgcaacaccaacttcaacaaattaatgcgtgccacacgaacactacatatacaaatgcagactactcaaaagttgtggctcaacttgtaagtcttattactaacattgaaacgataagttcgacacaacttacgcaacagacacaatcaatacttaatcagattaataacattagatatgaaaaaaacaaaagtgctgaatgtcgaatcattgttgtcgctaatcctaaacccgacaaggcaatcataactaaaattagcgtagaagagggaatacccataacattcagtgtccaaaccatgttttcagatactaattttattgctgaacaacgagctgacttaccaactaatataaaagatattcaaagcctgtatcaaaaaatgacgaagttatatattgagcacagtgaaaataaaaacaggatgaaagtctttgccggaaccaactttattgatttcaatatgacaggacagaacctgtccgggttcgttctaaccttgtcaaggttttatttcgaagatctacttaatataaatttcactgacgcaaatttaggtgacactattttttacataaagaacaccctaccccccaaattatataaagatggacaatatcttgacaaacaaatcgaaggtttattttcaacattattaaccattaatgacaactttttacgagcaaaagcggaaattgcttcgacaataattaaatttttagaggctaggataaccaatctttcatacaatgacatattaacatatcagcaagaattccaaaaacaatgttataagcaagttaaagcctttgcgacactctctcgatacaataaaattcaaacatgggcagaaatgtctgaatatcagttcgaagtatttcaatacgagacgcttaaccccaaaaaaatgtcacacacgccttatttaaagagccacttcctaatgaaaaagatataaattatggggtggaaatagaaataccatctggcaaaagaattcgcttatcaaatcattatcagaatataataccataatattgattattagcactttataattattgaataaaaatagattttatgtaattttaaaacaaagggttatattattgggcgatggatactcataccacgccccaaaataacggaattgaactaaacagaagggatataaacatcagacaggtttacgttactatcaggcatatcacctcagaatcagatgaaaactataaagaaatatctattatggttttaatatttgttgataaggatagtaacatgaacatgacaaaaggtgcactcatcctcagcctttcatttttgcttgccgcatgtagttcaattccgcaaaatatcaaaggcaataaccaacctgatattcaaaaaagttttgttgctgttcataaccagccggggttatatgttggtcaacaagcgcgctttggtgggaaggttatcaacgttatcaatggcaaaacggatacgttgttagaaatcgctgtattaccgttggatagctatgcgaagcctgatattgaagccaactatcagggccgactgctcgccagacaaagcggcttccttgatccagtgaactatcgtaatcactttgttaccatcctcggtaccattcagggtgaacaaccaggctttatcaataaagtcccgtataacttcctggaagtgaatatgcagggcatccaggtgtggcatttgagagaagtggttaataccacctataacctgtgggattacggctatggtgcattctggccggaaccgggctggggtgcgccttactacaccaatgcggtgagtcaggtaacacctgagctggtcaaataacaccaccgaaagatgcagatgctttctcagcatctgcatcatgtattacataaaattaatatacagtaagctaactattattattataagccctgtcctgttaattacctttggcaaactgattataaagttaatgtccgcaccaggagtcggttatgtttcttataattaccagggatacgatgttcttcaccgcgatgaaaaacattctgagtaaaggtaatgtcgttcatatacagaacgaagaagagatcgacgtaatgttgcatcagaatgccttcgtcattattgatacattaatgaataatgtatttcattctaattttctcactcaaattgaacgattaaaacctgtccatgtgattattttctccccctttaatattaaacgctgcctggggaaagtgccggtgacctttgttccgcggactatcactatcattgattttgtcgcactcatcaatggcagttactgctctgtgcctgaagcggctgtgtcactttcgcgcaagcaacatcaggttctgagctgcattgcgaatcaaatgacaacggaagatattctggagaaactgaaaatatcgctaaaaacgttctactgccataaacacaatatcatgatgatcctcaatcttaagcggatcaatgagctggtacgccatcagcatattgattatctggtgtgaatttcaggcttacggtgagtctggctacgctgccacacagattagctaattgaaacgcctttcacccctgccataccttttaataatcgcaacaggtcttctatcgacgttgtggcatgaagctggatatcaatggcgaccacttcatgatcttcattttcctgcaacgaaactaaatccgtttttattttttgctgcttaaaccagtcgagcattgataccgtattaccgttcagtaatgtcagctgtaaatggtaatttttgttcatcaggcggaaggttaattgatggaagacttccagcaccaacaaggtcatcactgaaccataaatacccagttcgtacataccgctgccaataaccatacctatggcggcggtcacccagatatccgctgccgtcgtcagacctacaatattttggttacgaacgagaatgttacctgcaccgataaacccgacgcccgtcaccacctgagcagcaatacggctggggtcgagtccgacgtgatctaaagacagcacgtcagcaaaaccatatttcgaaacaatcataaacagggcgcttcccatgccaattaatacatgtgtgcgtaaccctgctcctttgccgcgcatttgcctttccatgccaatagcgccacaggcaattgccgcgagtataagacgtataataaattctgctgtcatataaaaatgcaaaaaggagcagcaagatggctcaacttgctactcctttttacttgtacctcattaattcggcaagtcattagatgcttgatttttgaaggtatacaaatttttctgcgggtttttcttacagtattcgatcactttaggaatttgagtgagatcggtttcatttaaagtaacggtatcgccacctttatatactgtttcttcatgcagcatccaccatgcaaccggggtcattgcttttggattcagatcaataaattcctggcaggtcatatctttagcggattcattggctgccagcgcagattgtgcgttcaccagtgacaaagccgctacagcgcccataaaaataaacgctttacggagagatgaaatattcattttgtaacccattcaatatagagattatatatgaacaggaggaatagctgcttttaaagaagatattccggcctgttcaatatgcaaggaagtacgatgtaacgcattcccggaattacatatctttcttaattttgtcccattcgcctttaactttatctttaaagttggcttgtttatcctgagtacaagcctgaacgatagctggggttacggttgcaataccctgaacatctaaaaccgcatcttctggtttatctttgttgttcagcgcttcagcaaaaccaactgcagttggctggaaggattcgtccacagccaggaaatcttcacaggtccaggagttgaccggttttttgttatcagctgctttttgcgcatccgctgcattgcttacaactggcagaagaagcagaccaccaagaataacgcctaatacttttttcatcgtaatatcctcaactataaagtgaaagagccgtcacgaatcaatttcgacactgaggttataacctggttttctgtatatgtcatgttgatagaaaatatcaaaatcagatatttttatttcaatacaatgagttacagatgcatcagatactgtaattaggaaatttttattaaatcgactgcattcttagacgcgtttttggcatagattgatagcaggggattttcttcttaattttatagggtggttctatgttatatatagataaggcaacaattttgaagtttgatctggagatgcttaaaaaacatcgcagagcaatccagtttattgccgtgctgttgtttatcgtcgggttgctgtgtatcagtttcccgttcgtctctggcgatattttaagcacagtagtgggtgcattattaatctgctcgggcattgcgcttattgtcgggttattcagcaaccgcagtcataatttctggccggtattatccggtttcctcgtcgcagtcgcctatttattgatcggctatttcttcatccgcgcaccggagctgggcatttttgccattgcggcatttattgccggtttgttctgtgttgcaggggttattcgcctgatgagttggtatcgtcagcgttcaatgaaaggcagctggctacagctcgttattggtgtgctggatatcgtcattgcctggatattccttggtgcaacgccgatggtgtctgtaacgctggtttccacactggtgggaattgaactgatatttagcgccgccagcctgttcagcttcgccagtttgttcgttaagcagcaataattatcccggttgtcacccggatcatagtcacttgatgtgactatgatccgattaatactctctccgctacgcagcgttgtagatcaattgcgcactatcattgaaataattacctgctagtgattatttcaacctactgaatttcatctaatttttttcactccatggcaaattagccatttcaaacattatcatggctgatattttccgtagtcaggtttaatgttttaaaagtgcagtgggaaagtgaacaaagagttccgtaagcgttgatgctatgggcggttaaataagtaatccgggttcatttttttgcaactggcattgattacattgcataaatatccgtgtctccagacgctatataaaaacctgaagacatgaatgcgttatttactcaggtaatttcaatgcgttaaaagaaagctggcaatccaattgccagcttaagtcgaaacaaggagactcgatatttaaatcggattacattttaactttagtaatattcttcagagatcacaaactggttattgataacttattcttgggcagtaatccgcaaacgttaactttttgtttactgtttacaaactgataacaaccaggaatcttacttaggatcaatatatggagtgcgtgatggataaatctgaagtattgattagtgttaatagacgtattagttcacgaagggcaaagttcttataggcgtttactatattgaacaacgattcggacaaggatgtaaataatgaaaaggatgacatgttcgaaacgataacggctaaggagcaagttatgatttttctcatgacgaaagattcttttcttttacagggcttttggcagttgaaagataatcacgaaatgataaaaatcaattccctgtcagagatcaaaaaagtaggcaataaacccttcaaggttatcattgatacctatcacaatcatatccttgatgaagaagcgattaaatttctggagaaattagatgccgagagaattattgttttggcaccttatcacatcagtaaactaaaagctaaagcgcctatttattttgttagccgcaaagaaagtatcaaaaatcttcttgagattacttatggtaaacacttgccccataagaattcacaattatgtttttcacataatcagttcaaaattatgcaactgattctgaaaaataaaaatgaaagcaatatcacgtcgacgctcaatatttcgcaacaaacattaaagattcagaaattcaacattatgtacaagctgaaactaagacgtatgagcgacatcgtcaccctgggtatcacatcttatttttagtcaggacataagcaactgaaattgatggctggcatgacgagggatgcagatgctgatttcattacccccggtgattactaaaggagaggctaaaacgactttattcccctggtatgtgtatccaccagtagaacccttcgttgcccgaatgctggcaggaactgttggcagaacggcaacattttttttgtcgttgacctcaccatgtcgatcactatacctgtatcccaccttactggctgacaaccccactatgccgctggtctgtaaatccctcatatctctcctcgcgcgcaatttaaagaaccgttatttctcaagaattttcagggactaaaatgaacagaagaagaaagctgttaataccgttgttattctgcggcgcgatgctcaccgcctgcgatgacaaatcggcggaaaacgccgccgccatgacgcctgaggtcggtgtcgtcacactctcccccggttcggtcaatgtgttgagcgaattgcccggtagaaccgttccttatgaagttgccgagatacgtccccaggtgggcggtattatcattaaacgcaactttatcgaaggcgataaagtgaaccagggcgattcgctgtatcagattgatcctgcacctttacaggccgagctaaactccgccaaaggctcgctggcgaaagcgctctctaccgccagcaatgcccgcatcacctttaaccgccaggcatcgttgctgaagaccaactacgttagccgtcaggattacgacaccgcgcgcacccagttgaatgaagcagaagccaatgtcaccgtcgccaaagcggctgttgaacaggcgacgatcaatctgcaatacgcgaatgtcacctcgccgattacgggcgtcagcgggaaatcgtcggtgaccgtcggcgcactcgttaccgctaatcaggcagattcgctggttaccgtacaacgtctggacccgatttatgtcgatctcacgcagtcggtgcaggatttcttacgcatgaaagaagaggtcgccagtgggcaaatcaaacaggttcagggcagtacgccagtacagctcaatctggaaaatggtaaacgctacagccagaccggcacgctgaaattctccgacccgacggtggatgaaaccacgggctccgtgacgttacgggcgattttccccaacccaaatggtgacttgctgcctggcatgtacgtcacggcattagtggatgaaggtagccgccagaatgtattactggtgccgcaggaaggcgtcacccacaacgcccagggtaaagcaacggcgctcattctggataaagacgatgttgtgcagctacgcgaaattgaagccagcaaagccatcggcgaccagtgggttgtcacctctggcttgcaggctggcgatcgggtgatcgtttccggtttgcaacgcattcgtccgggtatcaaagcacgagcaatttcctccagccaggaaaacgccagcaccgaatcgaaacaataacgttgcaggcttaaggggactttcatggctaactattttattgatcgcccggtttttgcctgggtacttgccattattatgatgcttgcaggtggtctggcgatcatgaacttaccggttgcgcagtatccgcagattgcgccaccgaccattaccgtcagcgctacctatccaggtgccgatgcgcaaacggtagaagactcggtcactcaggtgattgagcaaaatatgaatgggcttgatggcctgatgtacatgtcttcaaccagtgatgcggcgggtaatgcctctatcactctgaccttcgagactgggacatctcctgatatcgcacaggttcaggtgcaaaataaactgcaactcgctatgccttcattacctgaagcggtgcagcagcaggggattagcgttgataagtcgagcagtaatattctgatggtagcggcgtttatttctgataacggcagcctcaaccagtacgatatcgcggactatgtagcgtctaatatcaaagacccgctaagccgtaccgcgggcgttggtagcgtacagctctttggttccgagtacgccatgcgtatctggctggacccgcaaaaactcaataaatacaatctggtaccttccgatgttatttcccagattaaggtgcaaaacaaccagatttccggtggtcaactgggtggcatgccacaggcggcagaccagcaactaaacgcctcgatcattgtgcagacgcgtctgcaaacgccggaagaatttggcaaaatcctgttgaaagttcagcaagatggttcgcaagtgctgctgcgtgatgtcgcccgcgtcgaacttggagcggaagattattccaccgtggcgcgctataacggcaaacctgctgccgggatcgccatcaaactggctaccggagcaaacgccctggatacctcgcgggcagtcaaagaggagctgaaccgcttatcagcctatttccccgcaagtctgaagacggtttatccttacgacaccacgccgtttatcgaaatttctattcaggaagtttttaaaacactggttgaggctatcatcctcgtcttcctggtcatgtatctgtttttgcagaatttccgtgccacaatcatcccgacgattgccgtaccggtggttattctcgggacgtttgcgatcttgtcggcggtcggtttcaccatcaacacgttaactatgttcgggatggtgctggcgatagggttactggtggatgacgccatcgtggtggtggagaacgtcgagcgtgtcattgcggaagataagctaccaccgaaggaagcgacgcataaatcgatggggcagatccaacgtgcgctggtcggtattgctgttgttctttccgcagtgtttatgccgatggcctttatgagtggcgcaaccggggagatctaccgccagttctccatcacgctgatctcctccatgctgctttcagtatttgtggcaatgagcctgacccctgccctgtgcgccaccattctgaaagccgcgccggaaggcggtcacaaacctaacgccctgttcgcacgcttcaacacgctgtttgaaaaatcaactcagcactataccgatagcacccgctcgctgttgcgttgtaccggtcgctacatggtggtctacctgctgatttgcgccgggatggcggtgctgttcctgcgtacaccgacctctttcttaccagaagaggatcagggggtatttatgaccaccgcgcagttaccttccggtgccaccatggttaacaccacgaaagtgctgcaacaggtgacggattattatcttacaaaagagaaagataatgttcagtcggtgtttaccgttggcggctttggcttcagcggccaggggcaaaacaacggcctggcgtttatcagtctcaagccgtggtctgaacgtgtcggtgaggaaaactcggttaccgcgatcattcagcgggcaatgattgcgttaagcagtatcaataaagccgtcgtcttcccgttcaacttacccgcggtggctgaactgggtaccgcgtcaggttttgatatggaactgctggacaacggtaacctggggcacgaaaaactaacccaggcacgaaacgagctgttatcactggcagcgcaatcgcctgaccaggtcaccggggtacgcccgaacggcctggaagatacgccgatgttcaaagtgaacgtcaacgccgcgaaagctgaggcaatgggtgtggcgctgtctgatatcaaccagacaatttccaccgccttcggcagcagctacgtgaacgacttcctcaaccaggggcgggtgaaaaaagtgtatgtccaggcaggcacgccgttccgtatgttgccggataacatcaaccaatggtatgtacgcaacgcctctggcacgatggcaccgctttctgcctactcgtctaccgaatggacctatggttcaccgcgattggaacgctacaacggcatcccgtcaatggagattttaggtgaagcggcggccgggaaaagtaccggtgacgctatgaaatttatggcagacctggtcgctaaacttccggcaggcgtcggctactcatggaccggactgtcgtatcaggaagcgttatcctcaaaccaggctcctgcactgtatgccatttcactggtcgtggtgttcctcgccctcgccgcactctatgagagctggtcaattccgttctcggtgatgttggttgttccgttaggcgtcgttggcgcattactggccaccgatctgcgcggcttaagtaatgacgtctacttccaggttggtttgctgaccaccatcgggctttccgccaagaacgccatcctgattgtcgaatttgccgttgagatgatgcagaaagaagggaaaacgccgatagaggcaatcatcgaagcggcgcggatgcgtttacgcccaatcctgatgacctctctggcctttattctcggcgtgctgccgctggttatcagtcatggtgccggttctggcgcgcaaaacgcggtaggtaccggcgtgatgggcgggatgtttgccgcaacagtgctggcaatttacttcgttcctgtctttttcgttgtagtggaacatctctttgcccgctttaaaaaagcgtaacgtgtaaatgagagtaaggttgaacgtgaaggttcagccttactctttcctgctaaccattcaccactcaacaaccagctaaccgtcaggaataccaggcttagtacacagcactgaaagtagaaaccactccagccattcgtcatcaatttgaacagcacaatactgacccacattcccgtaatcgtatgaattgtcagcttaataatcccaaacatgccgagtcttttcctcctgaaaatacctataccgcctggcaaactgcgaaagagaactagccggtagcccggcagaaatcatcagggaagagtttcacatgaagcaggtgtgagatcctgaccaatattcaaatgcaaaatatgtcaggaaaaggtacctggcgaatgttgcgcaaactgatgtggcgttacaccataatattgtcgaaatgtgtttataaagtacgacgtactgctatagccacatttttctgcaatagtatgcagaggaatttgacgtaactcgagtaatcgtctggccatcgacatcctggaagcgagtaatattttactgaaacaggtattttcatcctgcaacttttttttgatgagactctcgctggtatacattctttccgcgatatcgcgcagataccaacgtttggcgatatcaaagctaataaggcgttcaacttttcctgaaacagtgctgatgctattgaaaagtaaggggatcagttctttcttatgagaaaacatcgataaacaggaaaggtagagcatattgctcagtatcggtgaatttaccccggattcattgaagctatcaaaatcgccgtcaccagcggcatgggggggactggttaattaatagacggtctttgctatgtaaccctaaattgcgtggtagctgacgaatattttgtaagtaatggcaaactgtcagctcatcgatatccagtcgtcgcgtatccggtgaacaaaacgcaaaatcgtctgccaaatttttctccagcagcacgatactctcgttatgcagcgatattttatgctgttcatgataaatatcgaatgaacgacgaatgaggatcaccgagcagacatgagtcatgattatcccttatatttcatactgcgattatttcaatttcagtatactaatgaaatgttgccagactgtttcttagcgaaaaaactgccagatttggtaggaccaaaatttatccacaaagtagttttgcataacagttaattgataataagtaaatgcagcacgaatatattttcgcactgcgtatagcttatgtttataaaaaaatggctgatcttatttccagtaaaagttatatttaacttactgagagcacaaagtttcccgtgccaacagggagtgttataacggtttattagtctggagacggcagactatcctcttcccggtcccctatgccgggttttttttatgtctgagtaaaattctataatcttattccttccgcagaacggtcagtgccgtaaaaatttccttgcgcaacaatacttgccgccgagtcacggttcggcaatccctgcgccgatcgctcctgatactctgtgggcgtcatcccataataatttcgaaagacgtaaatgaaatacgacacgctgtgatatccacaggacactgcgactcgcttaattgaaaagccatgtataacaataagttgcaaagcacgttgcattctacactcagtaagcaactgtgaatatgatgtctcttcttcgcgcaattttttctttaacaggcttggactcatcaacagctcgctggcgattcgggctagtgtccactcatgggcgatattattattgataaccgtacaaactcgtgttcgcatgttcggttgcaaaacgttcaaaagcagcggtataaagtgctcatcctcaagaaaaacagataacaacgcaaagattaatgctcttttacgtagcatttctgcatagcgaagattcttattctgcgatagttgcgcaacttcctgaaaaacaggaatatctctgctacagtgatgaacgagtaatgaagaaattttttatgtgcatgaagatttaatgcctcctccttgagcatcggcagaaataatgaaagcgtatcccttgatactaatacaaaattttcaacacacttatctactcgaatttggcttgcatccgcaaaaaccaggtcaccgccattaaaatagcgatattcaccattaaccatggtgagaatatatttatgtcttgcgtacgcaattagacaattcccatgtaatgattgcatagttgacttaatattacataaacatattactgttaattaatgtagcacgccgccctcttaagtcaaattgattgataaataaatttaaacgaagcgggagaacaggatgataatgtgtgatgttctacgggcaggatgactggatttataatacaaaaacgtgtttaagaacgcagtgaaattaatagcaagcaaataatcccttttcgtgacattagaggcaatcgctacatttaataaacattcatataacatatatcttatcaacacgatgaatagacagccaatatattattgcgattaataagcaaccgaatgcccagctgtttttttaaaggctgggcattcggtttttacaacgttatgttatcaggtgtgtttaaagctgttctgctgggcaataccctgcagtttcgggtgatcgctgagatatttcagggaggctttgtagtcttccagcaacagttcagcaaagtccatttcgaagccgcgacgacacataatgcgcatcaccacgatgtcggtggcttcaccgccgagagtgaaggccggaacctgccagccgcgcagacgcagacgttcagagaggtcgtacagggtgtatcccggatcttcaccatcttttcagtttgaagcaaaccgccgggatgccttcgtccgggcgacccgtacagatgaactcatacggccccagtttggcgatttcatccgccagataagcggcaacctggtaagaggcgttctgtactttggtgtagccttcacgaccgaggcgcaggaattcatagtactgtgcaattacctgacccgccgggcgggagaagttgatggcaaaagtaccaatttgaccacccaggtagtcaacgttgaacaccagttcctgcggcagcgcttcttcgtcacgccagataacccagccgcagcccagcggagccagaccgaatttatggcctgaagcactgatcgatttcacacgcggcaggcggaagtcccagacgatatccggggcgacgaacggtgctaggaagccaccgctggcagcgtcgatgtgcatgtcgatgtcgataccggtgtcggcctggaatttatccagcgcatcgtgcagcggttgtgggaactcatagttaccggtgtaggtcacgccgaaagtcggcaccacgccgatggtgttttcgtcacaggcttcaatcatgcgtttcgggtccataaacaactgaccggggcgcatagggatctcacgcagctccacatcccagtagcgggcgaatttatgccagcagatttgtaccggaccgcacaccaggtttggtttatccgttggtttgcctgcagcttccatacgcttgcgccaacgccatttcatcgccatcccgccgagcatacaggcctcggaagaaccaatggtgttggtgccaacggcctgaccatttttcggcgcaggcgcatgccacagatcggcaaccatatttacgcaacgcaggtcgatggctgcggattgcggatattcttctttgtcgatccagtttttattgatcgacaaatccatcaatttatggacgttttcgtcgtcccaggtctggcagaaagtggccaggttctgacgagcgttgccatcaagatataattcatcattgataatctggaatgcgacatcatcgcgcatttcgtgcagcggaaatcgttttgactccgcgatagtagaaatggcctttgcgccaaaacgtgaatcgagtagttctgagcggaaatccgttaacagcttctggtccatttcgaactccttaaatttatttgaaggcaataaaaaagtaggatttatccgcaatggaagcaaggcattacaggcttaatttaaataacaaaatcctaagcagaaaaacgactttttataatataaacatttaacatgataatattaaaaacagactttattatcgtaataaaaatcgcccaaacattcctgttcgggcgatcaaattaattattgtttatcctgcatatacggcgtgtacaccccgttcagactgtgcaggaaagctacgatatcatccacatcctcctgcggcagctctttgcctacctgatagcgcagcatcagtttcaccgccccgtccagcgtcggcacgtcaccgcgatggaagtacggtgccgttaaagcaacgttacgtaaaccgggtactttctgacgcaatttatcacgctcttctttagtcacattcatacgaccaatatccgccgccgtaatttccccaaagttaaagtcttttttcagccccaacggttcaaaggaacgtccgccgagaataataccaccatgacaagttgcacatttattatctttaaataattgatagccttttttctgttgcgccgtcagcgcattttcatctccacgcaaccatttatcaaatggggaatccggcgtaattaatgttttctcaaattcagcaatggcatcagtaatattttcgccactgaaaccttgcggataaacttcgaggaactgcgctttaagctgcggatctttttccagcttagcaataatttcgtcccaggatttcgacgccatttcaatcgggttcaacggcggtccacctgcctgatcctgcaatgttgccgcacgaccatcccagaactgctcaacgttaaatactgagttaaataccgtcggcgcgttaatcggcccaactgcgccaccaacaccaatcgatgtttttctgccatcgacgccccccgcattcaacgcatggcaatgagcgcatgaaatggtgctatcagccgataaacggggatcgtgatacagcgcaaagcccaacgccactttttgcgcatcggtaggcagtttttgcgggatgggctgcaccggttcattgcgatgctccggagcagtatcattgctggcgtaatattccgcgcgctgttttgcaatccaggccagtatttccgcccgctcttcatcactcaccttacccgcccagtgtagcgcggtataacgcgttggtggcatagtttcatactgcatcacccattcaatcttattcagatcgctttgcgaaacgggtttatcagccagcagtgccgcacgcacggcctcgaggttaaaagatttatatccaagcttaatgtcgtaatccatcaactgtttcgcgccaggaatataataataggcgggtaattctgccgaaggtgtgtggcaatagtcgcatcctttttcgcggagaaagcctaaaaccttattattttcactgacagcagatgcctgaacatcggcctgtttactgcgtttattatcgtggtaccacacataaccagataaccctaaatagcaaatcgcgacgccagccaggccgatcgcggtaatacgtgagaccattttcattattcttccctcacggtggtgagttattgtgacccagaaaattttccagaatgctgcaaacgtctctgcgagacaaagccatcataaaaaacagggagatacgctttttgataggaatcaatcaattacatgaatataaactatcaataagatagcctgtgcctattacccagatcaggaatggcatatcatgattgcggcgagagcaggattgaatgttctgaaaatgaaaaacaacacgaaatccgtatttttataaattccatggatattagtgcgttatattttttgacaggttaataaacgtgatccaccgcacgctttgtcgcccaccaggcggagcgaatgactacccttaaagaaaagcccgataattagcgacgaatttcggaggttggatccttatgctcaatcagaaaattcaaaaccctaatccagacgaactgatgatcgaagtcgatctctgctatgagctggacccgtatgaattaaaactggatgagatgatcgaggcagaaccggaacccgagatgattgaagggctgcccgcctctgatgcgctgacgcctgccgatcgctatctcgaactgttcgagcatgttcagtcggcgaaaattttccccgacagtaaaacctttcccgactgcgcacccaaaatggacccgctggatattttaatccgctaccgtaaagtgcgccgtcatcgtgattttgacttgcgcaagtttgttgaaaatcacttctggctgccggaggtctactccagagagtatgtatcggacccgcaaaattccctgaaagagcatatcgaccagctgtggccggtgctaacccgcgaaccacaggatcacattccgtggtcttctctgctggcgctaccgcagtcatatattgtcccgggcggccgttttagcgaaacctactattgggattcctatttcaccatgctggggctggcggaaagtggtcgggaagatttgctgaaatgcatggccgataacttcgcctggatgatcgaaaactatggtcacatccccaacggcaaccgcacctattatttgagccgatcgcaaccaccggtttttgcgctgatggtggagttgtttgaagaagatggtgtacgcggtgcgcgccgctatctcgaccaccttaaaatggaatatgccttctggatggacggtgcagaatcgttgatccctaatcaggcctatcgccatgttgtgcggatgccggacggatcgctgctcaaccgttattgggacgatcgcgacacgccgcgtgacgaatcctggcttgaggacgttgaaaccgcgaaacattctggtcgcccgcccaacgaggtgtaccgcgatttacgcgcgggagcggcctcaggttgggattactcttcccgttggctgcgtgatactggtcgtctggcgagcattcgtaccacccagttcatccccatcgatctgaatgccttcctgtttaaactggagagcgccatcgccaacatctcggcgctgaaaggcgagaaagagacagaagcgctgttccgccagaaggccagtgcccgtcgcgatgcggtaaaccgttacctctgggatgatgaaaacggcatctaccgcgattacgactggcgacgcgaacaactggcgctgttttccgctgccgccattgtgccgctctatgtcggcatggcgaaccatgaacaggccgatcgtctggcaaacgccgtacgcagccggttactgacacctggcgggattctggcaagcgagtacgaaaccggtgaacagtgggataaacccaatggctgggcaccgttacaatggatggcaattcagggatttaaaatgtatggcgatgaccttctgggtgatgaaatcgcgcgcagctggctgaaaacggtgaatcagttctatctggaacagcacaaaatgatcgagaaataccatattgccgatggtgttccccgcgaaggcggcggtggcgagtatccgttgcaggatgggtttggctggactaacggtgtggtacgccgtttaattggtttgtacggcgaaccataatatttttacagccagccgctaacttcctgctggctgtaaaattatcctcttcaggaggagatatttaacatcattgccgcctgggtgcgatttttcacttccagacggcgatacagggattccagatgcgcttttaccgttccggtactgatattcagcgctctgccgatctccttatttgattcgcccgccgctaacatggttaaaatctcccgctggcgggcgcttaacgatttgagatctttaatgtccttttccggcgtcgtccgccagtctccaggcagaaacatcatccccatcgccgcactatttaccgccaacgcaaatgtctcgacggttgaatcacgaggcacaatggccagcacattaaaatggataacttcctgtaaccaccgtttattgcaatccgtcgccgtgattaacaccttaacctcaggaaactgcaccacggttttttgcagcaaccagtagcaaaactcaccatcctgatcgccatcgagcataactaaggcttcagggtaactttccagcttttgccataactcgtctgcctgactggccccctgaatactcactcctggaatacgctgctgtaaactgattttcattccatgaataaatattgactgcctgtcaaacatgactatttgcataactgaatctccacctgaatacgttaaaaagacttaagtagtggaagggtattacccgcgagaaaaaataagaattcgccatttggcggtggccattctacagagatgacgcgtagaaaatagttaccgatataaatagttacagctaaacgcctgaaattacatgtcgagggcactatttaaaacaattttgaggatttccttatattggtggttagtacgcatgcaattaaaaatgaaactccgcgaccacaagcaaaaataacaaacggcaatgagacaaaaataagcacaaatagccaacacgtcctctattcactttaaagggaatcgctgaaaaatacgctctgtttagggggattcacctttctcagaaagctattccgcccttttcctgctgagaaatcgccacattcgtcatgacaacattgtgaaacccggcattagatgttagaaaaaacaataaacaatgcgatatgcgcgttactgtttcgctgtgaacaacaatcggtcaaagaaatggataaaattcacgcaatgcagttgttcatcaaagtcgcggagctggaaagtttttcccgcgcggcggatttctttgctttgccaaaaggaagtgtttcgcgccagatacaggcactggaacatcaacttggcacccagcttctccagcgcaccacgcgacgggtcaaactcacgccagaaggcatgacctattatcaacgagcaaaagatgtgttgagtaatctcagcgaactggacggtctgtttcaacaggatgccaccagtatcagcggtaaattacgcatcgacatcccgccaggaatcgcgaaaagcctgttactgccgcgcctgtcggaatttctctatctgcatccgggaattgagctggaactgagtagccatgaccgtccggtagatattcttcatgatggttttgattgcgtgatacgcactggcgcgttaccggaagatggcgttatcgcccgtcccctcggcaaactgaccatggtcaactgtgccagtccgcactatctgacgcgctttggttatccgcaaagccccgatgatctgacttcacacgcaatagtgcgttatacaccgcacctgggtgtacatccgttaggttttgaggttgccagcgttaatggcgtccagtggtttaagtctggcggcatgttgacggtaaacagtagcgaaaactatctcgccgccggtcttgccggtctggggattattcagatcccgcgcattgccgtgcgcgaagccctgcgtgccgggcggcttattgaagtgttgccaggctaccgtgccgagccgctctccctttcgctggtttacccgcagcgtcgggagctttcccggcgtgtaaacctgtttatgcagtggctggctggcgtaatgaaagagcacctggactgaccgactatactttttaagaatgaccacgacagaaggacaaaagagcggatgacgcaggaaaacgagatcaaacgtcccacccaggatctggagcacgagccgattaagcagttggataatagcgagaaaggcggcaaagttagccaggcgctggaaaccgtcaccaccactgccgaaaaagtccaacgccaaccggttattgcgcacctgattcgcgcgacagaacgctttaacgatcggctgggtaaccagtttggtgcggctatcacctatttctcatttttatcgatgatcccgattttgatggtgtcgtttgccgcagggggctttgtgctggcctcccatccgatgttgctacaggatatcttcgacaaaattctgcaaaacatcagcgatccgacgctagccgccacgttgaaaaacaccatcaacaccgccgttcagcagcgtacgactgtagggcttgtcggcctggcggtggcgctttattccggcatcaactggatgggtaacctgcgtgaagcgattcgtgcccagtcgcgcgatgtctgggaacgctcgccgcaagatcaggagaagttctgggtaaaatatctgcgtgattttatttcactgattggtttgttaattgcgctgattgtgacgctgtcgatcacctcggttgccggttcggcgcagcaaatgattattagcgccctgcacctgaacagcattgagtggctgaaaccgacgtggcggttgattggcctggcgatttccatcttcgccaactatctgcttttcttctggatcttctggcggttgccgcgccaccgtccgcgcaaaaaagccctgattcgcggaacatttctggctgctattggttttgaagtgattaaaatcgtgatgacctacaccttgccatcgctgatgaaatccccctctggcgcagcatttggttccgtgctggggctgatggcatttttctacttcttcgcccgtttgacgctgttttgcgcggcgtggattgccaccgccgaatataaagacgacccgcgaatgccagggaaaacgcagccttaaaataggccggatgcggcgtaaacgccttatccggcatacgattttattcggcctggctccccgtaggccggataagatgcgccagcatcgcatccggctataatgcgcacataacctcttgaaactcgtccccagagcctcttcagccatctatttgggagcaaacaatttcattccaactcataaccccagcatataaatccagttggtaacttttatttaacctgaaaccagttttatccactatttataaaattatgtgaagcatttcatagaagaaaaatcactggcctaaacattatcccctttttgcctggtttttgaccatttccgcgatttgttacacattgaaatatcacttttgctgtgcgtaatatggctattcgttagccaaaaaataagaaaagattatgcaagcaacagccacaacactcgaccacgagcaagaatacacgccgatcaactcgcgtaataaagtccttgtcgcctctctcattggcacggccattgagttcttcgacttttacatttacgccactgcggccgttattgtgtttccgcatatcttcttcccacagggcgatccaacggcagcaacgctacagtcgctcgccaccttcgccatcgccttcgtcgcgcgccccattggctctgccgtttttggtcattttggcgatcgcgttgggcgtaaagcgacgctggtcgcctcgttgctaacgatggggatttcgaccgtggtgattggtctgctgccgggctatgccacgattggtattttcgccccactgctgctggcgctggctcgatttggtcagggtctgggcttaggcggtgaatggggcggcgcggcgctgctggcgactgaaaacgccccaccgcgcaaacgtgcactgtatggctccttcccacagctgggcgcaccgattggcttcttctttgccaacggcactttcttgctgctttcctggctactgaccgatgagcagtttatgagctggggctggcgtgtgccatttatcttctcggcggtgctggtcattatcggcctgtatgttcgcgtgtcgctgcatgagtcgccggtgtttgagaaagtcgctaaagcgaaaaaacaggtgaagatcccgctgggtacgctgctgaccaaacatgttcgcgtaaccgtactgggtacgttcatcatgctggcaacatatacgctgttttacatcatgacggtctactctatgaccttcagtaccgccgccgcgccagttgggcttggcctgccacgtaacgaagtgttgtggatgctgatgatggcagttattggttttggcgtgatggtgccagtcgccggattactggctgatgcctttggtcgccgtaaaagcatggtaattatcaccacgctgatcatcctgttcgcgctgttcgcctttaacccgctgctcggttctggcaacccgattctggtttttgccttcctgctgctggggttaagtctgatggggctgaccttcgggccaatgggcgcgctgttaccagagctgttcccaacagaagtgcgttacaccggagcatcgttctcttacaacgtagcgtcgattctcggggcttccgttgcgccgtatatcgcagcctggttgcagactaactacgggttaggtgcggtggggttatatctggcggcgatggctggcttgacgttaatcgccctgctgctgacccatgagacgcgacatcagtcgttgtaagtatcgtgtgggcagccaccctcaccccagccctctccctgaaagggagagggagaaaagcggagcgagatgttatatcgcgaacataacagccctcccccagaaagtgaacggaaaagcggtactcgttgtttcaacacgcacaaaacagtcccctcgcccctttggggagagggttagggtgaggggaacacgctgctcccgaactcaccagcaaacacaatccaacctcatcacttcttcatctgcgacaatatcgtccgacactgattagcctccccttcggaaggtgagatcagtgccagtaacgccgccgccggtgttaccagcgttgccagtgccgcagcaacagcaccacgggcaatcaacggcccggctttcaccccagcctgcggatttttaaacgtcccacgcacatacagcggcgaacgcagtgtgataatccgaatccctttactctccggatcaatagtcaaatccagctgttccgaagcaaaacttgccgtgccggtaacattaatcaacgcgttctcagtatcgaaagcaaaaatctgcgggcgcgccacgccgttggcaatattcagattcgccgccgcgcagttcacccgcacctcatcgtcaccaaatatcgcaccgacaatgtagttgccgacattcagcccaacaatctccatcaggttgcggctcaccagcccatcattcatcaacagtttcaggttgccgttactgttgcctaaaagcgccgccaccgagttaccgctaccgcgtagttccgcgtcaccgttcatttcccccagcgtcttctgcatcagttccacatcgggcatcagttctttcagtttcagtcgacgagcctgaatatctgcccgcccctgcatcggctttttatcgccttccagatggatattcgccgcaatgctgccgcccgccatgccaaatttcagcggttgcaggcgcaggtcagcatttttgaggatgatatgagtagaaagatcgctaatcggcaggctactgccatgctcaatgcgccgccctttgaagcgaacatcggcatccataacgtcccatttatcggtttcgaagcggtcataaggcagcactttgcccgcaggctgaacgcttttttcgcccttcttctgttcagaccgtttcgacttttctgcccctttcccggagtcaacgccaattaacggtcccaggtccgccagccgcaattgccgcgactcgacatcaccttccagttttggtcgtggctttccggtggtgtagaccagagaaccgtggatatcgctatcgccaattcgcccattaaaaccgcgataatcaaagaccgacgatttttcagtgtcgattttcgctaccagccgaccatccgtttcaaacggcggggtatcgggcagcagaacgcccgtcagttcatagagatcacccagtgaatcgccagaaaatttaagccgtaaatcgacaccgcccatcttcattgggtcattcacgacgccatcaaaagcaacacgggtgttaccagagcggaaatcagcctgtaccggaaacggcgtcccttcgccacgcagcgccagcataccgcctatttttcccgtacccgtgagcggttcaccgttataacgtccctgcgccttcaggccaaaaacgtaatcgcccaccttttctttatccgctttacctttcgatccagtaacttcgctgaacggcagcggcttgcctaacggatcaacaaaaatctccagatccgctttgcttactttgtcatcaatagcgatccgcccttgatcgaaaagaatattatccagccgaaacgaccatgccgacggctttgcattcgcgtctttgttatcatcgttggcgagattaaacgtccagttattgttcttttcggagaggcgaatcaggcgcgcgtcgggcttttcgagcttgatccacggcagccagaccgttttggtcagcagcgccagcggggccagcgttgcctctacgcgtggcaaatgcaccatcgtgacttcgggaatatccggtggattgccaagaatgatgtcttccgcgtgtacatggggccacggcacccagctgcgccagccagtttcttgtttttgccgctcccacaccacgcccagatcgccacggatagcgaacggacgattcaactccgcagagactttctggttgatggtcggtttgagtcgattccagtcaaaagttgcaatcaaaatgatcgccacgacaatcaacaacaagaaagcccctgaaatcgcagcggttattttgcctgccttgctcatcgttcgcttcctcatattcttcctgtgccagtcctaaagatagtccagccaggcggaaaatgaggcagcttatagcgccagaaccgccgtattcagcgtttctatcggtgccgggcgtgaaagaaaccagccttgtgcggcgaatgcgggcgagttctgaacatcacgccactcttccggtgtttctacgccctcgacaatcaccccgcgacaatagcgattcattagatgtaaaagctgagaaaagagtgtgcggccttccggcgactgacgcagcatcacgaacagctctcgcgcgattttgatgtagtcataacgcacttcacttagcgcagagaaatttgccatccggtgccaaaatcatccagccacagcgggccaaattcacacatcgaggcaaaggttgaatctttcggcaggcggatgtgttccaccagttcgaaacgcagccagggaagacgctcaatctggcgcaggatttttggttgctgacgcagggcgatgagcgtagggccatcaatattgaccgatgccagcaggccgtgctctataaagaagtcggctttttgcgccaacaaatcaatctgctctttcacaacctccatccgatggctgacggtgatttcagtaaaatagcgatccggcggcaggcgttgcgaagggttcaagggatgcgtgaccaccgttaatagctccacggccattaaccgcccgcatgtttgatagatcggctgccaggtgtaagcacgctcacactgcaaccaaaaacgccgttcctgcaagctctcgatgcttgcttcagggttgcttattcgctggataacctgccttatcatcaaagatgtcctgtgtttaaaagtgatgctgcccggactcgacaaagattatcggcgcgtaagggcagaactttaccgcctggccggggtaaatttcctcactccacaacggaatctttcaggaatacgtcctggctcaaaaaaataatggaacactgttttaatatggttgaccagcaaaccaccacagcgcaaactaacgctaattttttacagatcaggttcacgactatgtccaaaaagattgccgtgattggcgaatgcatgattgagctttccgagaaaggcgcggacgttaagcgcggtttcggcggcgataccctgaacacttccgtctatatcgcccgtcaggtcgatcctgcggcattaaccgttcattacgtaacggcgctgggaacggacagttttagccagcaaatgctggacgcctggcacggcgagaacgttgatacttccctgacccaacggatggaaaaccgtctgccgggcctttactacattgaaaccgacagcaccggcgagcgtacgttctactactggcggaacgaagccgccgccaaattctggctggagagtgagcagtctgcggcgatttgcgaagagctggcgaatttcgattatctctacctgagcgggattagcctggcgatcttaagcccgaccagccgcgaaaagctgctttccctgctgcgcgaatgccgcgccaacggcggaaaagtgattttcgacaataactatcgtccgcgcctgtgggccagcaaagaagagacacagcaggtgtaccaacaaatgctggaatgcacggatatcgccttcctgacgctggacgatgaagacgcgctgtggggtcaacagccggtggaagacgtcattgcgcgcacccataacgcgggcgtgaaagaagtggtggtgaaacgcggggcggattcttgcctggtgtccattgctggcgaagggttagtggatgttccggcggtgaaactgccgaaagaaaaagtgatcgataccaccgcagctggcgactctttcagcgccggttatctggcggtacgtttgacgggcggcagtgcggaaaacgcggcgaaacgcgggaacctgaccgcaagtaccgttattcagtatcgcggcgcgattatcccgcgtgaggcgatgccagcgtaaacgcagcatatgcaaaaggctggataaagtgttacccctctatccagctcatccataaatacctgatggttgtgctaactcatcaccatcaggcattactgtgcaggtggaatatccgtcacttcaggatgtacgtcatccgtggcgacagaggtggcggcagcagcagtcgatggggccatgatttgatcccaggccgcctgcaacgctttcatgttaaattccggctcgcctttcggctgcagcagtattaacgccatatcattcgacaactgctgacgcagatcctgatttaacatctccaccgtcaggctgttaaggaaatcctgccgcagtttctgatactgctccggcgcgatatcgacgacctgattttgcaacgaacgcatccgctgacccatcagaatatcggtatcagcccgcgcataggcggcaaacagtttctgcagctccagtttcttttgcgccactaacgcattgaactcttcttccggcagacctttatcgcgaaccttcgccagttcacgcgccaccagattaaggttgctgttcagcttgtcgtttggtgattcgatgttgatggcacactgcgcacgcagatacagcacacggcagtcaaatccaagaccgatgtctttgctgttactggcgcttaacgcttgctgaacatgccagaacagcgcctcgcgggccaggtccgcacgccagtagcgcagcagtgcggctgattcacgaatcggctgccacggcgtatcccacatgatagataaccggtcctgacgcaccgcgtcagtcataatactcaccgcttccgcacgcagcggagaaagcgtcggcaccggagctggcgtttcacgtttgcctttcagttcgccaaacgttttgtttatttggtcgacaaccgagcgcgcatccacgtttcccaccaccagtagcgtcattgcatccggggtgtaccatttctgatagaaatctttaattttttccgcttcaacgggttgtttcagcggatcggcaggatcgtgacctaacaaggttgaccctttcagacgatagcgccaccagccctctttagtatcggcaggccaggttgccaccatgtcctgactttgcagcgcgtggttgatggtttctggtgtgatggtcaatttgccagtggcatttgccagataagagagcgcttctttcagcaaatcgttacggttattgggcaaactcagattaaacagcgtggtgtcataagagacaattaccggcggcatcgggcgtttagggtcgatcccctgctgccacaatgaacgcgcctgtgctgcgtcaaggccaccgctttgcgttagcgcaatacgagggatggcgtgactgtaaccgctctgttgtgtactttcggcgagcgaaccggtattaaccagcaggcgaatttcaacacgatcgctgggacgctggggggtggtcagcacttgccactgtaaaccgttggaaagcgtcccctgttgccatgctggatcaggctggagcgcatctgcctgcacatagccagcagtggccatcatcagcaaaccgcccgctaaaagtcgaatttttgtgccctgcatgtgaacccctgatcaactatcctggtaataaaaaaactgcccgttgtcggtcagtctaaatgacgttaaaaacacttcgtgttagaccgcaagaacatgaaaatgtcacggaagaagtgaaataaacctgaactcacccaggtggtaagttcaggcacaggggtcaattatgcgcaaacacccgcactcggggaagggagtgcgggcataagtgatgagattaagaggataattcgtgcgttttgccatccggcgcacgattattcagcacatcgtccagttttttgtggtccagttctttcacccacttagcaacgacaatggtcgctacgccgttaccgaccaggttagtcagcgcacgagcttctgacataaagcggtcgataccgaggatcagcgccagacccgctaccggcaaatggcccaccgcagagagcgtcgccgccagcacgataaagccactacccgttacccctgccgcccctttagaagaaagcagcaacacgattaacagcgtgatttggtggacgatatccatctgactgttagtggcctgggcgataaacaccgccgccattgtcaggtatatcgatgtgccatcaaggttaaacgagtagcctgtcgggatgaccagccccaccaccgatttgcggcagccgagtttctccatcttgtcgagcatacgcggcagcgccgactcggaagatgaagtccccagtacaatcagcagttcttcacggatgtagcggataaatttgaagatactgaaaccagtcgctttagcgattgaacccaataccagcaccacaaacaggatacaggtaatgtagaaacagataatcagctgccccagttgcaccagtgtgccgacgccgtatttaccgatggtaaacgccattgccccgaacgcaccaataggcgccagacgcatgatcatattgatgataccgaagatgacctgcgagaaactttcgatgacgttaaaaatcagttggcctttgctgcccagacggtggagcgcaaaaccaaacagtacggcaaacagcagcacctgcagaatgttaccgctggcaaatgcgccaatgacgctcgccgggatgacatccataatgaaggcgacaatgccctggtctttcgcctgatcggcgtaaaccgctaccgctttcgcatcaagcgttgccggatcgacgttcattccggcaccaggctgcacgacgttaacgatgataagaccaataatcagcgcgatggtactgacaatttcaaagtaaagcagtgcgactgcgccggtacgaccgaccgccttcatgctttccatgcccgcaatgcccgttacgacggtacaaaagatgacaggagcgatgatcatcttaatgagcttaacgaagccgtcgccaagcggtttcatttgctcgcctatttcaggatagaaatggccaaggagaataccaatggctatcgctgtcaggacctgaaagtaaaggcttttaaacagagaggttttcatagggtgtcctttagtaaaaccacaggtcttgtaaggttatggggtacctgcggccttaaaataacacccagacaacatcacagaaatgtacctggatcataattgaaacaaaaaggttaaaaagtttgagctggctcgcacaaaccagcactttttaaagttttgtaatcagtttggggtagctacttttcttccaggtaactctcttcgaagatttcaatagggagtgggcgagcaaaaaggaagccctgggcaataccaacgcccgcttttgccagccagtcgcgttgtgcttcagtctccacgccttcggcaatcatttgtaagttcaggctctgcgccagcatgataattgcagcaatcatgctgctatcttccggcaagccttcaacaaacattttgtcgattttcagtacgtcgattggcaacgatttcatatgctgcagctgacgcagccctgcgtagcccatgccgaaatcatccagcgccacccgaactccggcattgcgcagcggacggaggattgccaccgcagcatgagggtcgtcaatacgtcggctttctgtcacttccagaatcagtgttcccggctgaatgcgatagcgggttaacagttccagcatatccgccaccatattcgggtgcatcagttgcagcgcagagaggtttaccgacaagggcagcataatgccgcgctcttgccaggctgcaagcaatcgacaggactcttccagcacccagtgaccgacggtaaccatgagcccacagcactcaatgcgatcgattaagccatccggcaggtcccaactgccatccggttgctggatacgcagtaacacttccgcactgaccagtttaccgctggtcatctcgacctgtggctgtaaccaaattgcaaactgatgattttccagtgcattaaggatatcgctctcttccgtcaaccgcttctgggcggcttccatctgctgcggatcaaagaactgaatctgattcttgcctttatggcgagcggtaaatgccgcagaaatagcgcgactgtaaagctgttcggcggtgagatcgccgtagaacatcgccacgccaatgctacagtgcggacggagttgaatacgttcaatcggcaggcgctcgctcatgatagtgagcacttgctgacctaaggtgattgcgtgccacggttcctgtacaccgttggcaatgacagcaaagtcataaccgctaatctgcgcgaggatcatacgtggcgacagtaccgatttgagtttttccaccagcgtcagcagcagaatttctcgttgcgcctctttcagcacgcccgcagtatcacgcagggtttcacaggtgatgatcatcagcgcggtggtttgtttacgcgcgacaacctgctccagcatctccatcagcaaggctttgttcggcaaatccgacaccgggaagcgcatcgcattttcgttctgttcttcataatggcgctgcagcaattgctggttgaggttgtaactgcgcaccaacataccgatttcatcgtcctgatgcagacgcggtaatgccagttggtgaccaacaagctcctgggctgggatggcgttaagttcgcgagcaatattgcgtaacggatgcaaaatcaggcggttaatgcaccagctgatggcgacggtcaggataagcgacaaaagtaagtaaatggtcactaacgttgagagggtgctcatcacgaacttatacatacggaaggaatccgcctgtagtaccagataggcaattggctgcgggtttgccggacgttcgagcgagtaaacgcccagcgagatttgaaccggtagctcaaacaggcgagtaaccattaccggcaccgggcgctctggaataaaacttttacgcagcgcctggaactggttaggcagcactacatcggcacggctgaccacgcctgccggtttaatgctggcaagaatagcttccgcttcgggaatatcgcctttcaaaatagctgaagataagggttcgcggacagagcgagcaatgctttccagttgcgtagccgtgttatagcgattctgttggaccagatggaacagcaaaacggtgcaaaaaataaaaacgaacaccaggacaacggctgccaccattgccatctgcttgattgttaacgagcgacttacgcgcaaattgtctccccccggaaatcccagattgccgcccgagtatacccgatcgcagcggcattaagagaggcgctatctgaaaacttaccagtcggcgtaaggtatcagcggctgcggcggtaaatccatgtcaccctgccatccggcggcggaataacgtacgtagagcaggaaatggctgggtgcgtaatctttcgcctgctggatatcaattgccgtgccaacaaaccagttggaagtaacacgtcgttcaagtaatgcccgcgccgtgtagccgaagccctgactgctgccgccatcgttggattgccgcgcagcttcttcctgccagtcggtcgggatcagattcatcagcggataacgcggcatggttttggtgcgtgaatgcgaccacgagccagacgcccccagctcccacgaccagttttccgtgcgctcccgccacatcaccggtatggcaaacgacaggtattcctgcggactgtagtaaccgccctgaccgagtgagtagccactcagatctttgtcgtaatgccagatcatgttgttcaggccgattgtgacgcggcgattgttctggttaatgaccttatagtaatagcccgtcatccagcgcacgcgccagttatcttcgacatttttaccggttaactggtcgccactaagcgatgcccagacgccgtttgcttcacctttatcgtagctcagacttagccccacaccgtcggcacgtacgccaccccattttttcccggtattgctcggggagtctttttgcccaccaaaggccagcaaagaactggagatgggccgacggtgggcgttaacggtgtaacccagcggcccgatatcatcgctgtaactgatgccgccgaccacatccaccacgttgaagcccatcggcgtggtaccgatatcccagctccagacgtcatttcgccagccgaccgccacgctggcaccggaatccgactggctgcggttgccgctacagtcctgtaatgtacaggtgccccagttgtcatcccatttgccatcggcattagtggagaaactgccgacgttcatattgacgaaatcactgcgaaagaacatccgcccgtcagaatacggcgcatccacctgcaacatggtagtgtgcgctttcagatcggagtaaccaccggtgccgctcgaaccccagtaatcgtgctcaagggtgacgttaagatcctgctggcgatagaggtccgccgcatcgctgcgcacgccgcgtttcagccagtcatctttctcgtcgttacgggtcagtcgggtgaatgtgtcgttatcctgcggacgcgtcgtagtcacaccggatgcgaccatggcgtctttgtaggtttccagcgcctgctttggatcgcccgcctgcgcttcaaacttcgcaccgtcgcgcagcaccatcgcgctttccatcgacggtggctgagattttgcctgcgggatcaacttattaaacgtctgctgcgccgctgcggtatctccaagctgcgcctgcgccagcgccacgcgccgctgtgtgttcagcgaggcgttatcggtagcgggcagtttcgccagctggctacgtgccgccgctgtgtcaccggcagcaatatccacttccgtcagccccagaatggcatcggcgttagttggctcccgcgtcaggacattctgatatgcagcgcgggcggcggtgtaatcacgtcgctgctgcgcccagtcagccagcgtgaggtcaatacgcgtggaaggtggttgctgacgcagcatcgcttccgcttcagcttctttgccgctttctcgcaggcgattagcggtttccagcacctgatcgctttgcagtcgattaaccagctcctgaatattgctgttccactgcgcgcgcggcaggctgttgatatgcgccagcgccgctctgtcctggtcatgaccagagaggtacagcccgtaagcgtaaacctgctccgggtcgttcggcttctgctgcgccagattgcgcattaacgtatcggcctggctgcgttgtccggcctgccagagatcctgcgaaagtcggtaagtaatccatacgctgccggggtccagcgccagtcgttgccgctgaagtgctgccgcctgcgcccatttgccctggttttccagtgcctctgcctgctgtgccagacggtcgttttgcaggctgcgttcgatatcatcaatgctacgccgctgactggcagagagcgaggcgataaacgcttcagctttttctggcgattgctggcggtaaatatttgccagcccgcgcacggcgttagtgttgccgctgtccatatgcaaggtctgctgataataacgttcggcggcgggataatcttttcgcgccatcgccacatcgcccagccccagcactgcataactgtcggtgttatcgacattacgcgcctgctggaacaggcgttctgcccggtcaggattattggctttcagcgcagcatcgccctgctggatcgccagccagtagcggtttactttcagcagactgttccatttgtcgttgttgctgctgtgcgggtccagtgcgagggctttttccagattcgccactgcattggcgcgatcgcctttctgagaatacgcctggcccagcgcccccagagcttcactgtctttcgggttcgcccgcaccgcctgttgtagttcgggaatggctttacccgccataccagagtccaccgccgctaaaccttgcgcacgagcgcggaaagcaggatcggccagctgtttttgctgttctgccagttgcgattgcgcagccgccacgctatcgccatcactaaagatcgagagatattttttcagcgccgacacactggcatcactgacgggcatgtctttaatctgcccgtaccagattttagaggccccttcgcgcccggcgttcgattttgccatctgttccaggacggcaaaaccttcgtcacggcgatcgctactaaacagcaatagcgccagattgttttgcaggcccgtattgcccggtgcatccgcattgatgcgttttaactgattaatcgcttcgccacggcgagccggaattttcgccaccgtactccagtactcgacagcaatgtcaccttccggcggcgcaccgttgaacagtttgttgtaactcgccacagcttcttctgcatgaccggtcgtcgcctgcaatcgtgcctgttgcagtgcctgacgaccatccggcgtggaaagtagcatcgtagtccgcgacgatttatacgcatttgaactcggcgctaactgcgacagccgatcgagctgtttttgcgcgccatcaatatcgccctgacgtaacaaagaacggaaacgggcggcaacgacgtccgggttattcggatcaataagttccagccgatataacgactgttgcaccagatcttcacgatgggtcgcttcgcctaaccgaacttgctccagcaactgttgctgagcggttggtgctgcctcgaccatcggcatgacggccagaccgagggaaagcgtgaatatgtttagtgtgaatttgcgcattcctggccccagtcaggtaataactcaccttttgtcgagaagcggaaacggtgttgatcccagccttgtccaaacagggtcagcacatagttgtaataggcatcgctgccgggaaagttatcggccacgcgctggcgctgaacggcctgcgcatcgcggttttgtaaaaagggcagcatggcggcagaaaaaccgaccggtcctttaccctgcgctttccccgtagccacatccactttttccggcggataaccgtttttctcagtgaatgtcgccatcggtttaaaccggttgagcatccgcgctttttgcggatcgctgtcaggcatcatgcctacccacatgtaaacgcggatagcgtcgtagctgctgatcaatgttttttcggcttttagctgccagcctttgtctttctcatagcgcacccagtctggcgaaaaacctttcggggcggtttccagcaataaacgttgattggtttcgcgcagcgtggtccacggcgcgccaaagcgggtgaaatactgcgccagcgtcggcggcaggtagctggggttaaaacgccagctgttatcctcagcaaaacccactttgcccggtaacaacatggaacccagcccaggcaccgtcaccacttcctcccgcgcgatacgttttagcaacgcgctgccgatgtcggtataacgctgctctttccacaaacgccccgcctccagcaacgaccaggccatccagacatcaccatcggaggccgaattgctgtccagcacttcccacttactgttctctttcttgccccacagccaggcgggcaaacgttcttttaaagagccctgagcgagattgttctgcgtccagtcgagaatattatcgaaagctacacggtcgttagccgccagggcaaagaacataccgtaactttgcccttcggaggtggtgattttgcgcgcgtcgctggggtcgatgacgcgcccttcctgactgatgtaatcctttttaaactgctcccaggcaggccaggtacaggctgcctgaacactaaaggcagccaacagcagcatcgtcacgattccactacgcaacacattcatcttcaattactcgttatccgggttaagacgacgacgactaataattcgcagcagacgccacagtacccatgccagcaatatcacactgatagccgccagcaccgccagcagaatcggatggtttgccagcgcataccacaagcgctcgaaccacggcagatgacctacgtaataaacgtcgccaacacgtaggctgttgataccggactcgcggatcaccgcgaccgaaccgaacatggtggcgcgtttgccgctatcgttcaccgcatcgttaagcatttcataaccgcgtgggctatctgccagcagcgcaatcacgctgcgctggtcgttatacggcgactggaagccaatcaccgccgccatcgcaccggaagaggtcagcgttgactgggtttctgccgcgcgatcgctctcgtccggcacaatgccggggaacggggtctggcgcatcggtgttttcacccagctttcggtcgcctgcaccaataggtcgatctgcttatcgtctttcagtttgtccgggataccaccgatgatcatgatgtcggcatctttgccctgaatggtgctgccatcatcggtcaccgtcagattaatcgccgggaagcccgtctgtgcgccgataaaaccaacagtattcagcaacgtttccatctgtgcttcgttaggcgctttcggcatcacggtgatggtttgcgacagatccgccatccggctgaatgggaagcccgcgttagcaaaggcgcgtagatccggcatcgggatgaagtggtaatacttcgagaagtcgatggtggagtcgtcaccaatcaccacatgattctgcaccggctggaaggtaatacagttatccaccgaaccgcccggcatcgggttcatatactcaaagtcgaagcgcagctggttggtcgcgcccagtttcagcgccggaatagagacatctgttttgccatccagcaaaccttgtaataccggaatccgcagcagcaggcggttcgcctcctgtttgctgctcaggttgaaggattgcaggaactggttattcaggctgatatccatccgcgaactgtctttcaccggcggcatggtgtagcggtaattaatatccatatcaatgccggtactgcgcatcaggtagagatccggcggcaggtttagcgaaacgttaatcgctgctggctcaagaccgctggattgtaactgttcttcataggttttcagttcgccaaatgtgaccggacgatcggtacgtacccagttcggcgcatcgtacggcttacgcggtagcagcggtttcacttcattcactaccacgctttcaccacggaacagaatgttaccctgagcgatacctttcgctgcctgcaacaggtctttgtcgtcacgaccaaacaccaccagcagtttgacgtaaggattctgcggatggttaatcatctcaatcaccggggcttttaccgccggatgatcgcgcaggaagtccggccgtttgtcgttggttgcaaagacaatggcattacgatccggcagttggttatagagcaccgggaagttctgcccacgccagccagaacgcgaaccaaaccacgaggcgacaatggcagaggcttgttgcagcccaacatccggcgcacccgcaaagaccatcggcaaggtgttggtgcggttatcacgcggatcaaagaatggcaccgggaagtgtgacaggtcattcttcacattcagggtctgataggtcagatccagtccactgctccgcccaacatccagccaaagcgtggtgctggccgggttttcgcacacgtcctgataatggccgacaaactccagccgcacacggttgaagtcggtaataaacagtgggttaatgggcatttgcgccagcgtttttttacccaactgttctttggtcactggcagcacgcccatcagctcatcattgagataaacctttaactgcgactggacaggcagtaacgatggcgatggcgtgtattcgaggttgagcatcgccttcgtcaccacttcatcgctgcgcataccaaactcaatgctgccgttcgggttaatgccacgtagcaccatgctgcccggcggcggcgcaatttgcgcaaaggtcagcttcacatcacgcgaaggaccgttctgcgccacgactggcgcatcagcgccctgcacgcccggcatcacttgccccacctgcggattttgttccgtctgggcggctacagctggctcagcattgatcagtggttgcgttgctggcgtcgcctgcgtcatgaaagaggggaacgcactcatccccatagccactgcacaaatccagaatagttttcttttcatcgcgttatcatcattgttgagccaaagcctgatccgatggttgtgccgtttcgctccgctccgggcggcgcggaataaacgatacaacccaggaaaccagagaagtcagcacacggaatatgcccttcaccgaagaaggcgcaaactccgccagatggcggtagccacggaagccgagcttcagaatatccagcagactttccagcggcttatcttccgggtagctgtcctgccagagcgcccatgtatccgcacgggcaaacgtacactgcacaaaatcgatatgttgctgggtggtgagcggcattaatttcagcccaacttcattacccatcacgcgcgccacctgggtcgggaagacgtattcctgctgaccgcgtttaagcaacagattcactttctgcccttccagaatctgcgcctgaccgttgatcttgatccccaaaccaccgtcggagaaatcctgaacggtacacgagaagaggtgaccatcttcgcgggcaattgccgcgggcatcgtcatctccacgcggtgcgatcggcgtacctgtttgctttctaccgataccgcaactgcgccgccaagaacaatcaggttgtagaacacccacaccatactgacgaccacggtgagcatctcggttggcgggccatagaagtagcgccagatgcctaccgcaacgcccaccaggttgagtagaacaaggaagatgtagggccgcgagatcacccagtcgacgtactcttcttccaccagtccacctttggcggtgacgttaaatttgcctttgtgcgggttaatcagcgccaccagcgtcggtggtgcgatataccacgccagcaccgtttcgtagatttcactccagaaagagtggcgatatttgccctggatcttcgagttggtcaggctggcatggatcatatgcggcagcacgaatagggcgatcatcaacgctggcgcatagatgatgtaggcatgaagcagcaggaacgccagcggcgcagtcaggaagatcagccgtggaatgcccgacaagaagtggaacatggcgttgacgtagcacagccgctgagcgaatttcagccctttaccggtgagcgggttatcgagacggaagatttgcaccatcccgcgcgcccagcgaatacgctgaccgatatgcgccgacagactttcggtcgccagccccgccgcctgcggaatacgcatatacgcggaggtatatccacgacggtgcaaacgcagagaagtatgcgcatcttcagtcacagtttcgacagcaatgccgccaatttcatccagcggcttacggcgaatcaccgcacaggaaccgcagaagaaagtggcgtcccacatatcgttgccatcctgcaccagaccatagaacagcgtgccttcgttcggtgttttacgaaaacgccccaggttgcgttcaaacgggtctggcgagaagaagtggtgtggagtctgcatcatcgccagctgtttctctttcaggaaccagcccatggtcatttgcaggaacgatcgcgttggtacgtggtcgcagtcgaaaatcgacacgaactcgcctttggcatatttcagcgcattgttgatgttgcccgctttcgcatgttcatgagtggtacgggcgatatatttcacccccacgttttgcgcaaactggcgaaactcttccctaccgccgtcatcgaggatccagatgttcagcttgtctttcggccagtcgatacccagcgaggcgtaaatagtatttttcaccacgttgagatcttcgttgtaagtcgggacaaagatatccaccgacggccacagcgacatatctttcggcaatggcaccggctgacgattcagcggccatactacctggaagtagccgagcaccagcacaatccacgcgtacgtttcagcgaagagcagaataagcccgcacaccaggctgaccggatcgtcccagttcagcgtagaggtgtaacgccaccagatataacggcaagaaacggtcagcgacagcacaatcaacattagcgccgagaagcgccccggcatccgccgtacgatcagcgctacaccccacagcagcatcaggaagataaactgcgccagcgggttaaacggttgagtaacgcagattaacgccagaatcagcgagaaggtgacgatgataccgaggatcaaccgccgcgccccggcactcaaatgaccgagctcttttttctcatcaagatgctgtgttttatggctaacgcgctcaggcagctcgttcatccattgatggtaacgtccacgaatattctgcagacctgaaaatgcccgcctgcgcggtttcggcgtttctttgcgcgatgtaccgatcagtaaccagcatgtttgaatgagataacggaccgggtccagcggacgcggacgcgaggcgttgatatgcggatacaggtttttatgttctgcgcgaatacgctgccagcgcgggtgctccagcggaataaaaatccaggccaggatcatccagaaacagccgagcgtcgcgctgaaagccgacgcaccgtgacgacgataatcgcgataacgcccgataagccgcgcgttgaccggcgggataagcaaccaccgggtcaggatactcatgatgcactcccgactggcgttttcagcccggagtagttcaacaggcaccagttcgccagcgtcagtatctcttcagccgccagcgcatcactgcgatattcacctactggttgcttagccgccaggcattcagccatcgcttcatcacgatgaatgagcatcggcagtaatcggcgctggctttgcaaccaaagctggtaaatatcgtcctgaacctgactgccaatacggaagtcattaatcaaaatatgtgcgccatccggcagcgcttgctgatgcagtcggatatggcagttggcatccacattgacgattgccagcgagtgatcgcacaaactcagcagctggtgggttatctgcgaggcatcacgcggtaagtcgattaaaatccactggtaacgcccgctggcttttagttgctgtaagccggagcaaatatcgctcagccgggtttgccagtgctgtggattttcttgttcttcaatggataactgaccaaaaggcagcaaatcgagctgcgaggtgtagcgcaacccagcgtcacgccagtcctggccatccagcatcgctctggcccagccctgacggtgggtaaaatcaacattaaatgacaggcgcaacaagttgtccgggcaggcatcgaccaccagaacattttctcccaacatttgtaatgaccaggctaatgcggcggtgatggttgttgtccccacgcctccccgcaccccctgcaatcccagtacggccattcaccaatcccctacttttgttgcgcaaactctgccagcaacggccagcgttttaatgccgcggccaactgttcgcgttgggaaatatcggcataatcaatatcaggcagtgaaaatgcctgctttaacgccacaatatcattctggaagatatagcctatcgcgggatcaggcagagtatctggttcattgttattcattttgcttgatccctatgaaataaccgtaccgttcatgagacaattctaaccgtgagcatttcgccggtttattgtttacggcgagacgggaatttgctcactttttgactttccgttacgcaacagaaaaagttaaaaacgaaaagactaaaatcacacgtcttgtgaccttctaaattgattcacatgctaaatctgataagttttaatttcaatggtaggtttatttcttagctttcgctagtaaactgataatcagacaaaatggtgacatgagggacattgtggaccctgtattctctatcggtatctcatcattatgggatgagctgcgacatatgccagcaggcggcgtctggtggtttaacgtcgatcgccatgaagatgctatcagtctggcgaatcaaacaattgcatcccaggctgcaaccgcacacgtcgcggtcattagcatggacagcgatccggcgaaaatctttcaattagatgattctcaagggccggaaaaaataaaattattttcaatgctaaatcatgaaaaaggtctatactatttgacccgtgatttgcagtgttctattgatccccataattacctttttattcttgtttgcgcaaataacgcatggcaaaacattcctgccgagcggcttcgctcatggttggataaaatgaataaatggagcaggttaaaccattgttcgcttttggtaattaatcccggaaataataacgataaacaattttcattgttgcttgaggaataccgttcactttttggtcttgccagtttgcgttttcagggtgaccaacatttgctggatattgccttctggtgcaacgaaaaaggggtcagcgcccgtcagcagcttagcgttcagcaacaaaatggtatctggacattagttcaaagcgaagaggcggagatccaaccacgcagcgacgaaaaacgcattctgagtaatgttgctgtactggaaggtgcgccgccgctatcggaacactggcaactgttcaacaataacgaagtcctgttcaatgaagcccgtaccgctcaggcggcgacggtggtcttttctttacagcaaaatgcgcaaatcgagccactggcccgcagcattcataccctgcgtcgccagcgcggtagtgcgatgaaaatcctcgtgcgggaaaataccgctagcctgcgcgccaccgatgaacgtttgttattggcctgcggtgcaaatatggttattccgtggaatgcgccactctcccgttgtctgacgatgatcgaaagcgtgcaagggcagaagtttagtcgctatgtgccggaagatatcactaccttgctgtcaatgacccagccgctcaaactgcgtggtttccagaagtgggatgtgttctgtaatgccgtcaacaacatgatgaataaccctctcttgcctgcccacggtaaaggcgttctggttgccctacgtccggtaccgggtatccgcgttgaacaagccctgacgctgtgtcgccctaaccgtaccggcgatatcatgaccattggcggtaatcggctggtgctgtttctctcattctgtcggattaacgatctggataccgcgttgaatcatattttccccattgcctactggcgacattttctcaaaccgtatggtctggtttgaagatgatcaaatcagtgccgagctggtgcagatgcgcttgcttgccccagaacaatggggcatgccgctgcctttaacgcaaagttctaaaccggtcatcaatgccgagcacgatggtcgccactggcgacgaataccagaacccatgcgactgttagatgatgctgtggagcgctcatcatgatgaccatcagcgatatcattgaaattattgtcgtttgcgcactgatatttttcccgctgggctatctggcgcggcactctttgcgacgcattcgcgacaccttacgtttgttctttgctaaacctcgttatgttaaaccggccgggacgttacgccgcacggaaaaagccagggcaaccaaaaaatgactcaatttacacaaaataccgccatgccttcttccctctggcaatactggcgcggcctttccggctggaacttctattttctggttaagttcggcctgttgtgggcgggatatcttaacttccatccgctcctcaatttggtgtttgccgcgtttctgctgatgcccattccgcgctacagcctgcatcgcttgcgccactggattgccctgccgatcggctttgctttgttctggcatgacacctggttgcctggcccggaaagcataatgagccagggttcgcaggtggcggggttcagtaccgattatttaatcgaccttgtcacacgctttattaactggcagatgattggggccatttttgttttattagtggcctggttattcctgtcacaatggattcgcattaccgtttttgtggttgccatactgctatggctgaacgtacttaccctggcgggaccaagtttctccttgtggccagccggacaaccgacgaccactgtaacaacgacgggtggtaacgcagcggcaaccgttgcggcgacgggtggcgcaccggtagtgggtgatatgcccgcacaaactgcaccgccaacaacggcgaaccttaacgcctggctgaataatttctataacgcggaggcgaaacgtaaatcgaccttcccgtcttcgctgcccgctgatgctcagccatttgaactactggtgattaacatctgttcgctttcctggtcggatatagaagccgccgggttgatgtcgcatccactgtggtcgcatttcgatattgagttcaagaactttaactccgccacctcctacagtggcccggcggcgatccgtttactgcgcgccagctgcgggcagacttcgcacactaatctgtatcaaccggcaaataacgactgctatctgtttgataacctttcgaaactgggctttacccagcacctgatgatggggcataacggccagttcggcggttttttgaaagaagttcgcgaaaatggcggcatgcagactgaattgatggatcaaacaaatctgccggttattttgctgggctttgatggttcgccggtttatgacgataccgccgtgcttaaccgctggctggacgttaccgaaaaagataaaaatagccgtagtgccacgttctacaacacgcttccactgcatgacggcaaccattatccgggggtcagcaaaacagcggattacaaagcgcgggcgcagaaattctttgatgaactggacgccttctttactgaactggagaaatcgggtcgtaaagtgatggtggtcgtggtgccggaacacggcggcgcgctgaagggcgacagaatgcaggtatctggcctacgtgatatccctagcccgtctatcacagacgtccccgttggggtgaaattcttcggcatgaaggcaccacatcagggggcaccgattgtcattgaccaaccgagcagcttcctggctatctccgatctggtggttcgcgttcttgatggcaagattttcaccgaagacaatgttgactggaaaaaactcaccagtgggttgccacaaacagcaccggtctccgagaactcaaatgcagtagttattcaataccaggataaaccgtacgttcgcctgaacggcggcgactgggtgccttacccgcagtaagcacgaaaaaggccgcagagtttaacctctgcggcctgatccgggcgcaaattgccattacggcagcctgacgcccgcatgacacgttacttccgcttattcagccagttcacgatcatactggcaagaatgccagcaatgaccggagccgctaaatcatgccagaaggccatgcccagctctgcgagcgtcatatagccgcctgtgttgtaatgacaacgtttcgcggctattcttgagttgtttgggttcaagattagcccccgttatgttgtcaggtgcatacctgcaacgtgcgggggttttctctctccagcaaccaatgccaccagggataaagcccccgcaacattgcgccttaccggaacctttccggcttgccgctgattctacgactgtttttctgttccgaaatccatcacttactcactctgtgctgcgcattccgcagaatattatccgcttgcaaccgttgcatttttcttacgaaaaaggccgcagagtttcacccctgcggcctggtccgggcgcaaattgccattacggcagcctgacgcccgcatgacacgttacttccgcttgttcagccagttcacgatcatactggcaagaatgccagcaatgaccggagccgctaaatcatgccagaaggccatgcccagttctgcgagcgtcatatagccgcctgtgttgtaatgacaacgtttcgcggctattcttgagttgttcaggttcaagaatggcccccgtgatgttgtcaggtgcatacctgcaacgtgcgggggttttctctctccagcaaccaatgccaccagggataaagcccccgcaacattgcgcctcaccggaacccttccggcttgacgctgattctacgactgtttttctgttccggaatccatcacttactcactctgtgctgcgcattccgcagaatattatccgcttgcaaccgttgcatttttcttacgaaaaaggccgcagagtttcacccctgcggcctgatccgggcgcaaattgccattacggcagcctgacgcccgcatggcacgttacttccgcttgttcagccagttcacgatcatactggcaagaataccagcaatgaccggagccgctaaatcatgccagaaggccatgcccagttctgcgagcgtcatatagccgcctgtattgtaatgacaacgtttcgcggctattcttgtattgtttggatgcaagaatggcccccgtggtgttgtcaggtgcatacctgcaacgtgcgggggttttctctctccagcaaccaatgccaccagggattaagcccccgcaacattgcgcctcaccggaatccttccggcttgacgctgattctacgactgtttttctgttccggaatccrtctcatcttcactctgtgctgcgcattccgcagaatattatccgcttgcaaccgttgcatttttcttacgaaaaaggccgcagagtttcactcctgcggcctggtccgggcgcaaattgccattacggcagcctgacgcccacatgacacgctacttccgcttgttcagccagttcacgatcatactggcaagaatgccagcaatgaccggagccgctaaatcatgccagaagccatgcccagctctgcgagcgtcatatagccgcctgtgttgtaatgacaacgtttcgcggctattcttgagtggtctaggttcaagattagcccccgttatgttgtcaggtatatacctgcaacgtgcgggggttttctctctccagcaaccaatgccaccagggataaagcccccgcaacattgcgcctcaccggaacccttccggcttgccgctgattttacgattgctttttactgtcagcacccagcaatcttcctcattgcgtgaggccttccagcttaatttcttaatttgcaatagttgcagttcatatccgggctgactccagactggtagtgaaatgcgcaattttgtagaattgcgcctcctcgcgacctccccagtgaatctgttgcctcattttttacatactgcgtattcgacttctccacctgttgcgcaagagaatctgggtttattcatttttgcgaggccgacttctttctggacaggactttatgcagcacaacacactaccgaaacacgatcagaaattgccgtttacacgctacgacttcggctgggttttattatgcataggcatggcgattggtgccggaaccgtgctgatgccagtacaaattggcttgaagggaatttgggtatttattaccgcagcgatcattgcttatcctgccacttgggtagtgcaggacatttatttaaaaaccctttctgaaagcgattcctgtaatgactacaccgatattatcagtcattacctggggaagaactggggaattttcctcggggttatctactttttgatgattatccacgggatttttatctactctctctccgtggttttcgacagcgcctcgtacctgaaaaccttcggtttaaccgatgccgatctttcacaatctctactttataaagtcgctattttcgccgtactggtggcgattgcgtctggtggtgaacgattactgtttaagatttctgggccaatggtggtggtcaaagtagggattattgtcgtgttcggttttgcgatgatcccgcactggaatttcgccaatataaccgccttcccgcaagcctccgtctttttccgcgatgtcctgcttaccattcccttttgcttcttttctgcggtatttattcaggtacttaacccaatgaatattgcctatcgtaaacgggaagcggataaagtactggcaacccggctcgcgctgcgtacccaccgaattagttatgtcacgctcatcgcggtgatactgttttttgccttttcgtttaccttctcaattagccacgaagaagccgtttctgcctttgaacaaaatatctcggcactggcactggccgcgcaggtgatccctgggcatatcattcatatcacctctacggtactgaatatctttgccgtactgaccgcattctttggcatttatctcggtttccacgaggccattaaaggcattattctcaatctgttaagccgtattattgataccaagaaaattaactcacgcgtgctgactctggcgatctgcgcttttatcgtcattacattgacgatttgggtttcgtttcgtgtatcggtgctggtgttctttcagttgggaagcccgttatatggcattgtgtcgtgcctcattccgtttttcctgatctataaagtcgcacaactggaaaaacttcgcggatttaaagcctggctgattctgctgtacggcattttgctatgcttgtcgccactgttgaagctgattgagtaaaccggagcacaaggctccggttttgaacattaccgctgcggattttcatcctgatcaacggcaaagcaggccaccagttgaccgccgtaatctttcagtgctggctgcaactgggtgcaggggccgaagcgtcgacgacagcgggcgttgaaggcgcaacccggcggtggattgagcgggcttggcagttcaccggtgagcttgatgcgctcgcggcgatcgtccgggttcaggcgcggcgtcgcggagagcagcgcctgagtgtaaggatgacgcgggttattgaagatttggtccttcgtccccttctccacgcagcggcccaggtacatcaccatcacttcatcggcaatgtgctccacaaccgacaggtcgtgggagataaagacataagaaagccccagttcctgctgtaaatccatcatcagattcagcacttgcgcacgcactgagacgtccagcgcagaaaccggctcatcggcaatcaccacatccgggtcgagcatcagaccacgggcaatagcgatacgctgacgttgtccgccggagaacatatgcggatagcggtcatagtgctcggttttcaggccgactttcgccatcatcgacagggctttttcccgacgctgttctttgcttaagctggtgttaataagcagcggctcttcgagaatttgcccaacttttttacgcggattcagcgaaccgtaagggttctggaagacgatctggattttctgccgacgcagcttctgcgcctgcggatcgtgcttaagcagatcctgcccctggtaatacagctcgccaccggtgggcatttcaatcatcgtcagcaaccgaccgagggtcgatttaccgcagccagattcgcccactactgccagcgttttgccacgttcaaggttaaacgaaacgccatccagcgctttaaccagacgttccggcgcgaacatgcctttcttcaccggataatgttttttcaggtcgatagcctgcaacagcggttgttgcgaggtggcctcttgcgtactcatagtgtcggcctcccggcatcatcaagtgggtaatggcatttggactgacgcccatcagcgagcatattcagcgccggttcttcagcgcgacatctgtcagtggcataggggcagcgcgggttaagcaggcagccgttcgggcggtcgtacttaccgggaacgacacctggcaacgacgccagacgttctttgtcctgagcaaattctggcagcgcacgcagcaatgcctgagtatacgggtgacgcggcgcatggaagatggcgtgcgcatcaccggtttccaccacctggcctgcatacatcacgatgattttatgtgccgcttccgccaccagcgccaggtcatgggtaattaacaccagcgccatgttctctttctgctgtagctccagcagtagttcgatgatttgcgcctgaatggtcacgtccagcgcggtggtcggttcatcggcaatcagcagttttggccgacaggcaatcgccatggcgatcatcacgcgctggctcatgccgccggaaagctgatgcgggtaaacatccagacgcgatgccggatcgggaataccgacctgattcagcaggtcaatcgctcgctgacggcgggtacttttgttgccgccctgatgcaccttaatcgcttccataatctggaaacccacggtgtagcacgggttaaggctggtcatcgggtcctggaagatcatcgccacttcggcacccaccaggttgcggcgctctttttctgagatacgctgcaaatcctggccgttaaactccagtttttctgccattacgcggcccggataatcaatcagccccataatcgccagtgaactgaccgacttaccggagccggactcacccacaatcccgaccacttcgccctgttttacgctgtagctgatgcggtctacggcgcggaacggcgcgctttcgtcgccgaaatgcaccgataatttatctacatttaataacgccatctcgaacctcttactgcttcagtttgggatcgagcgcgtcacgcagaccgtcacccatcaggttaaatgccagcaccgtcagcaggatcgccagacccgggaaggtcacgacccaccaggcgctttgcgcgaactgcaacacgtcggagagcatggtgccccactcaggcgttggcggctgtgcccccatgccgaggaaaccaagagcagccatatcgagaatggcgttagagaaaccgagcgacgcctgaacaatcagcggcgcaaggcagttcgggaagatgttaataaacatctgacgcatcgccccggcacccgccacgcgagacgcggtgacgtaatcgcggttaacttccaccagcacggcggcgcgggttaagcgcacatagtgcggcaaggcaacgaaggtcagtgccagcgcggcgttaccaatcgacgggccgaaaattgccaccagcaccagcgccagcagcagacttggcagcgccagcatgatatcgaccacgcgcataatgatgttatcgaccaggccgccaaagtaaccggcgatcaggccgagaataacgcccataatcagcgataacacaactaccagacagccaaccagcagcgacaggcgcgcaccgtacatcaggcgcgacagcacatcacggcctacgtcatcggtgcccagcaagtgcgccatgctgccgccttcctgccaggctggcggggcgagcagtgcatcgcggaactgttccgccgggttatagggtgcaatccagttggcaaagatcgcgatgaacagcacgatgacgacgtaaaccagcccgacgaccgcgcctttgttgcgtttaaaatagtgccagaactcctgtaacggggtcatcggcaccggtgcgctaatcactttattttcagtaacctgtgacatgatgtccccttacttcttatgacgaatacgcgggttcaccacgccgtacagcagatcgaccagcaggttgacgaggataatcatcgtcgccaccagcaatacgccgccctgtaccaccggataatcgcggcgttgcagtgcgtcaatcaaccagcgccccagaccgggccacgagaaaatggtttcggtcagaatcgcccccgccagcaatgttcccacctggaggccgataacggtcactaccggcagcatcgcgttacgcagcgcatggacgataatcacccgcatgcgggtcaaccctttggcgcgcgcggtgcggatgtaatcttcacccagcacttccagcatcgaggagcgtgtcatacgcacaatgaccgccagcggaatagtacccagcacaatggccggtaagatcatatgggcaacggcatcgataaagttgccatcttcaccccagatggcggtgtcgatcagcataaaaccggttaacggattggaatcatcgaggaacaccatatcgctcacgcgaccggagacgggcgtcaggttccagtgcaccgaaaccagcatgatcagcatcatgccccaccagaagatcggcatcgagtagccggtcagcgccaggccaaccgctgtgtgatcgaaaatggaaccgcgtttaaccgcagccagcacgccgaccggaataccgactgccgtagcaaaaatcatcgcgcagacgccaagttccagcgtggcctggaagcgcggcacgaactcttcccaaaccgggatgcggcttttcattgaaatgcctagatcgccatgcataacgccccaaatgtaatggagatactgctgccacatcggtttatctaagccgagttcagccagcagctgcgcgtgacgctctggggagatcccacgttcgcccgccatgatcatcaccggatcgcccgggatcatgtggacaaaggcaaatgtgagaagggtaataccgataaacgtggggatgacgagtcccaaacgtcggagaataaactgcaacataacccggattctctatagtgacccgcagcctggaactgcgtgtctgtattgctcacaaatcaattcccgcccaggtcgggcagggaatgaagtattgctgccggatggcgctgcacgcagaggcacagcgccaccgggtatggcttttaattattcgatagagacgttttcgaagtgatgtttgcctaatggatcaaccacatagcctttaacttctttgcgtaccggttcaaacacggtggagtgagcgatgatcagtgccggagcctgatcgtgcatcaccacctgcgcttgcttgtacagttcaacgcgtttgttgtggtcgtcggtagcacgcgccggttgaatcagatcttcaaacggtttgtagcaccattttgagtagttggagccttgttcagaggcggcgcagctgaacagggtggcgaagaagttatccgggtccccgttatcgccagtccagcccatcattaccgtctgatgctcgccatctttcgcacgcttgaggtattcaccccattcgtaggtgacgattttggcctgcacgcccactttcgcccagtctgcctgaatcatctccgccatgcggcgagcgttcgggttatacggacgttgtaccggcatcgcccacaggtcgatggagaaacctttttccagacccgcttctttcagcaaggctttcgctttttcaggatcgtaggtgtagtcctgaacgtcgtcgttatagccccacatggttggcgggatcaggtttttcgctgatacgcccgcgccctgataaaccgctttgatgatcgcgtctttgttcaccgcgtaggtcagagcctggcgaactttcacgtcatcgagtggttttttctgcacgttatacgagagataaccgacgttcagccccggcatttccatcagattgatggatttatcctgcttcatgcgagcgatatctgccgggttcgggtacggcatcacctggcattcattcttctgcaatttcgcgtaacgcacggaagcgtcaggagtaatagagaagaccagcgtatcgatctgcggtttggtgccccagtagccatcaaacgctttgtagcgaatacgggaatctttttgatactgctgtaactggaacggaccggtaccgattgggttgaggtccagtttttccggtgtaccggctttcatcatcgcatcagcatattcttttgacagaatagaggcgaagtccattgccaggtcagcgaggaacggcgcttccgggcgagtcagcacaaactgaactgtgttgtcgtccacctttttcacttcgctgatcagctccggcaagcccatgccttcgaagtattcgtagctgccgccagaaaccttatggtacggattttgcgcgtttttctgacgatcgaacgagaacaccacgtcatcggcgttcagttcgcgcgtcggtttgaattctttattgtcgtgccacttcacacctttacgcagatggaaggtataggttttaccgtcttcgctgacttcccacttttcagcgaggcccgggatcacttcagtggtgccgattttaaattcaaccagacggttataaagcgggacggaagaggcgtcataggtggtgccggaggtaaacagctgcgggttaaacccttccggagatccttctgagcaataaaccagagttttagcctgaacacttgctgcgacggtcatagccaccaggctgagaccaagcttcagcatccctgactttttcaaggaaatacgcattattctgctccaattgtgatgtttgttgttttaaccctttgcagtgggttgtcgctgcctgaccttttttgttttttgcccggtcgggtcaacgttatgaggtggggatgccgaactaattaacatcagtgtaacagtgcggatcctccataaaatgcccctcgtgacctacaatctgtcaacagaatgtgaaaacgtcaatacagccaaccgggatttacaccaacggtgagaatccacaaacaaagattaaaaaaacttcaaacagctatttgcagcagagaaatttgtgctactccaacatgaccagaacaatcagcttaatatttagcaacatttggtgattaagttttatgcatttagtgaaaaaaatctgaggaaaaggtggatatctgagcgattaataccatgaacgctaaaacgcacagcggaaaatgccagcgccagccataagtaacgcaaaaaaagatttaagcaaatataaaaaaagacaatggtttctgtcacaaatccgttaatggatagtgagatatggggcgcaaatttggcagggaatgtgtggtgtgtaggtcgaataaggtgttcacgccgcatcttacaataagtacggtgccgttgcctgatgcgacgctggcgcgtcttatcaggcctacgtcgagtcgaacctccctgcccccggaagttctcatcctcatgggctgcagatgcaaaaaagcctgctcgttgagcaggcttttcggatttggtcggtgatagaggattcgaacctccgaccccttcgtcccgaacgaagtgcgctaccaggctgcgccaatcaccgaatgcggggcgcatcttactgcgcagatacgccctcgtcaatcccttaatagcaaaatgccttttgatcggcgagaaagtcagcaggcctcttagttagccgctgccttttttgtctgcgggatgtgacaccagttgttgttttcgttaattcccccatccggtgaagtatagccaagacaacccatgatggtgtcgtacagctctacgtgacggcgtggcactttcatgtcggcttcttttttcagctgcgcaaatgcctgcgcattgaccggattttccagatatttatctgacatccagaccatcatcggtacgcggaactgctccggcggtgccagttcacgcggcgtgccgtgcaggtgctcgcgttcattaattgactcaccgtggtcagctgcgtagaacacaatcgctttcttatcgcgaacctgatcaatcacgctggagataaagtgatccacataggtcaccgaattgtcgtaggagttgatcatctgcgctttggtacagccgctatcaacaccaatacattccggcttccactgcgcgaagctgcgcgggtaacgctgggtgtagttaaagtgcgaacctttggtatgcagaatgatcagatgcttaccatccgggttgcgccccagcgattgctgcatttcgtctaccagcaacatatcatctaccggcttgccacggttacgtggctccgcaccaatctgttcacggtaagcaatattgtccgccatcgtattgctgtagaaccacatttcgctctgcatagcgtagaggtcagaactgaatcctaactgcttcagcaccgcgaaaatgttctgttcttttaatgtgcgctgcggattatcttccgcgcccccctgacgtacaaacatgcaacgcagtgagagtttggttgcggtatcacaggagtaaccacggaatgccgccagatttttctcctgggccagcttcggcgtggtattacgctcatagccgaaaatgcccatatggtcccaacgcgtggtttcaccgatgataaacacgacataagtgtcatcaacgttttgcggtgcctggtacgtaaacttcttcgccgggttaaggagagaattgttatcggaagattcatcgacccgcgcccaggcgtacagccccaacgcagaaagccagtttgatggcagataagagttcgctacgacaccgccataactcggcaaatcaacgccggtcgccctctccactttcttctgctggatatccagcaaacgaatcggtgcccaaaccataatacccgccagtacgacgaccgccaggctgcgaatacgctgccctggggttcgcagttgtcggagcaaggtgtagcgacagcggttattccagataaggataagaggcaatgcactaacggcgattaaccagagaataaagttcagaccaacaacttcttttgacaggtcgatatcggtggtcatgacggaagcgatgatgccataaccaatgaccacattaaggaaggtcatgtaatagctggcacctgcggaaaagagcaccaccagcgacgccagaatacgccagctgcggcggccaaacagcgatagaagacgtagtaaaaagaaggtcaccagtacggtggcggccagttcaacaacagcagaaacgcctttccagacggtaaaatcgtgcgcatagctgccgaagcggcgataaaaaaccgcgccattcataaaaaggccaatatagattgcaagcaaaaagctcagcttctgctgtgtaatcgatttgatgtatctcatgcaaacaaaccctggacaaacaggtgataacaccctgcttagcggcttttcaggcccggcaggggaaaagtgcggaggtagtcagataagtaaaatctacacgcgcgaataagtagaccacagcaaagcgaaaaagtgtggggaaagagtgtgcatgaagcacaaatttacaaaaatgcaagtttgaaaagagactttagcgttacaaaaagcagtaaaaagggccagttaactggcccttaagatgtgaaattattcgtactgtacagtaaagtcgaccgttgcatctgcgcgaccaatagttgcatcggcgcgaataggcacgtagctggcgatatagttcagttgatgtgcgccatcaccgttaattgcaaactcaaccggtgtcggcgttgtattttccgggaactgttgtactccagcagcggttttgattttcagcccaacgcctgtagcgccacccgcatccagcgcaaaaagatttgagtcgtctgcattgggtgtaccgtccatagtcacgtaggctctgaccacttcgctacagtttttcaggccgatggaaaaaggagtgggattaatttccgttccgattcttaccggctttttgagaaccgcggtgcccatgtcaacctcaacgctgtctttcaccagttcgcaagcaccctggctgattttaagggtgaatttcaatgttcctttcggccctaaatccgtggttgccgcgaatgacgaaaaggaaagaggcagcaggcataacgcaagtattgttcgcttcatgactgttactccagttcgacatgtatggtagcaataccgctataatccccggcagcgggtaattttccggtagtgctaacgggataagcggtaattgtggttgtcgctttgcgtttgacatcttcatacagcgagcctgggttcatttctaataagctattactgtcattcggcttaagaatattacctttaccgtcctcaatgactgcaccaacatcggcgttgcctaaatcaattgcgctgggataggcagtatttggtgttgcatcaatactgagataaattttgacgccatctgaaatattattgcagtcaaagcttaattctttttgtaccttctgaacattttgtggtggttgtccggcacgccctttaaaatcatgggcctgatattctccgaatggaatatccagtacggtgccagcggcaagttcacagccttgagtaactgtaatactcccggaaatactgacattggccatgggctgactatcattgtaaacacctttcttttttgtcccaaagagggacgcaactcgtgttttaggaataatcatttgcccaacaaaaggatgtgaaatataaatactgatacttcctttaccacctgtcccccaattgttagcagtatagggcgtacattctttctgtgccgtgccattgcttcgatcggtaaaaggcaccgggatatctaattgtgtgtagacatatattttggtgagaatatcaatgtaattattgaatttatagtacccatctacagttccaggctcaggcagaagcgttacacctttaaaataagtcacaactccattatctggaatgggatccgggcattcacaataagcggaatattttgtacctaaagcaaagggctgagttaatattttcccagccttattttctgaaggtacctggatagtctgtacgaaatcaaaactatactcatgggccaccccatttgatgtctgacatggtccccaatccgcagcccatatatttccagcaaaagtgctcgtccctaacagcaccatacctgccaacaaatttttaattttcatctaaatatccttatttctcgcataccgcattaaccatcacgatagccgcattgtccttgttctctggcaagcggaatggcacacggcaacgttgcgcctgctcgttcccccagctcacctgcaattcgccctcttctggcatcccgctgatataaagctgtccttcttcacccacaatgctgctggcaggtttgctctcatcaattaacgctgcggttgcaccaaacggtactgcgttgccattcgcctgttttaagctcatcagcacacggtaaccgacgcgggtatcaaagcgggaacgcacaactgcaccacgagtaggcacgactttctggaacgcttcctgtagttcaacgttttgccccaacgtgtcgctacgcaattccacaatggtttcacgatatggtgtgagataaggcaccacggcgttgcccatccagtcaacttctacgccgctgctgttaaccacatgtccaccacgcgcgcccggtgcagaaacaatcgccagactttcgcctaaaggctgcgaaagcgttataccttcactgtgaacgatgacaccgccgcgcacgccatagttaacctgttggttatctttagaatagttatagcctacgtcaatgttaccagagccacccatataccccatgttgacgctgccactgtagcctacgccattactggtgtaaccctgctgaacgttatagctcaggttacgatcttccagtaacgtgccgctaacagaggcctgttgcgacgtcttgccattctggtcggtagtcatgcgataactgctccacgcgccccccagagggatggaaacactgaatgaccacaagcgatcgtcttcttcccattccggacttctcgtccaggtataggccacgctgtaattcacccgaccaatgtgaccgtgataaccggcgcttaaggagttttccttaccgtcaacgttccagtaatcctgctgcgtcatattgaaataaaccgagccgtagtctcccagttgctgggtaatattgccctgtatctggctgcgcttgtgataacggcggtaatcactgtcggcgtcactgcgaacatcagttgcttcctggaaggtgtagtagccgctggttgagtatttgtagcccaacagacgcaggtcagtgccaccctcaaaacttttcgaatagaggaagcgataagactggccttcctctttttcattgttgcgtaactgacttttcgcctgagtgacatccaccgatactgcgccaatggtaccgaagtttttccccaggcccagagctaaagcgctgtaatctgccgacaacaatgcaccaccgtaggcggtcataccccacggcaagccgtacatggcggtaaactgcccgaaatgtggtttatcgctgtcgtaattaccagcacgatattcaccggcagccagactgtatttcagatacccttcacgctggaaaatcgccaccgccgaaaacggctggataaaacgttgttcacttccgtcggcttctttaatgatcaccgtcaggtcgccgctgccggaggttgcgtagagatcgttaatctcaaatgcacccggctgaacaaaagtgcgataaatgacatagccgttctgttcgatactcacttcagcgttgcttttggcgatgccgcgcactaccggagcaaagccacgctggctgtccggcaacatttcatcgtcggatgccagtaacgccccacgcatttgtacgctatcaaaaatctcgccaggcgtggcggtatcacccagagttatctgtgatttaagtggaataattgcccggtttaacgatgtaccaacgttatcccattggtttttgccatcggtacggttccagatactgttattacgtaaacgccacggaccaacgttcaaaccgctgcgcaggttcaggtaataactgtcactggtcgaatctgaagatgaacctgtaccttcattgcgtccattgctgccactaaagctgtaatccagcaacagcgcaggtattccttcgtcccagcgagaaggatcaaccgtgccgcgagcggtcatcatcattgccgcctgtggaaaggaaagatgcagcgtctgagtattaaaatcaaagcggctggtggcctggggaatgatttcatcaaacgctacgcaggcttctggtggtgacatcttcagcgccggaaagctgtcaacgcgcacgcccatttcttccagttgcacccggctaaggcaaggcataagcgactcaccgctggctttgcgtttcgcttcgctggcggtactaaaatccagcgtccgggaagccattttttcttcgtttacaaacaccgaaacccggtatttaccggggatttgctggccgacaggtgagtcgtataccgacaagtcgatgtgttgatcgataccctgaacgttttcgagaaatttagggttaaattttccgccatacgcaggtaacgagctggcaatcgttaatgccagcagagagaaggaaaaatgcgctctgtagtgatagagaggtaaatgcatccaatgcatagtaaaagcgccttgtaaaaggatcagttaatcggcttcgtcagcatttcgccagcaacaccgaaatcattaataatgctgtatttcacttcgtgcgcgttgcctgtaccggctggaaggttaatgtttaactttcctttcgcgagaaccattcccgcccgttcaatcttttgtccattaatggaaaactgattaaaggtcaggttataagcggagtcgttattaaccacaatttggttattttgacgctggaaacgtaactgtttcatggcctcgaggttgcttcccggcaaaccttttggacgatagaacaacttcaaacgggtgcgaacggctatctgtaagacgtttttattttcattttcagcacttttcgcaggaatggcctttacattaatccagtaaacggattcacgatctttaggtaaggtatcttcaatattgacgatacgtaagacgttatttttatcaggatcaagtttgaataatggcggtgtaataataaacggtgtttttttattgccattcacatcatcaatccatgactggatcaaaaactcttcatttttattatggttttcaacggtcagcgacgcttctttcttgccgccatcataaataacacgcgtcgtgcttaaggctacgccaccagcaaaacactgttgtgcggtcattaaaagtgccagcacagcaaagctaatacgtttcatgattcggtccctgagtcattggtgtgaataatggcaacacagtctctgttgccattgagagatgatcgttccgtcaggatcgattagttgtaagtcaggttgaagtcgacttcagcgttaccgtaacccgtggttactgcatctttggtagagacatagttagcggtgaaatacagaacggtctgaccttctttcaggacagtagcagatttaccagtattcaggtcaaccagggtattggtgttatcataaataccgatacctacgccagttgcggcacctggttcagtgcttacagaaaccagtttgctgttgtctgcatcgccaacgccgttaaagctgatttccacatttttgaaagtggagatatcgcagttttccagtttgattttgaacggcgttgctgtggatttatcacccatagcagtaaatacagacttgttcacctgacccagaacaacttcttgtttttgagtgtctggagacacaacacaagcggcgtcaacaatctcaccggtgaatttaacagtaccgtcgcccgcatcagctgcgaatacggaagtagaggtcagcgcaagcgcagataaggcaaacagaacctttttcatttataactccatttatatagataaatatgcttgatgttgttcatacaacggggcgcagattatacaaatggtgctaaaaaagaaaattatttttaatgaatattaatttttgcaacaagttgaaatatacttcaacttcaattaattgcatacaaaaaaggtttccaacgactantttttnngnat

SEQ ID NO: 202 - DNA, 58949 bp, Escherichia coli
  modified_base (4)..(4): a, c, t, g, unknown or other
  modified_base (16)..(16): a, c, t, g, unknown or other
  modified_base (45854)..(45854): a, c, t, g, unknown or other
  modified_base (45856)..(45856): a, c, t, g, unknown or other
  modified_base (45865)..(45871): a, c, t, g, unknown or other
  modified_base (45875)..(45875): a, c, t, g, unknown or other
  modified_base (45888)..(45888): a, c, t, g, unknown or other
  modified_base (58939)..(58944): a, c, t, g, unknown or other
atantatataaacaantaaaatatatttgtggtatgaatattattgttcttttaatatgcgtccataaaaagggagactttgaagtctccctactcgtatttatttcagtagcaacatatttctaaatatgcgcctcacgcaacattttctgctctggctgacgaatcgtcgtagaaagcgccaatgacagaatcagcagggcgaaaatcacgtagaaggtcacatagaaaccgccaaacagtgaggcgataatcgaaccaaaaatgctaccgataccgaaaccgaggtaaatcacaccgtagtttttcgccaggttattgaggccgaagaactcactgaccagtgacggaaagacggtaatagtgccgccaaagttaaatgccacgcaggcaatcgctgcaaagaacgtcactgcattcagtggtgcaaacagcagggccgccatacccactagcgaaatcacctgaccaatggtgataacacggatacgggcgattttgtcagacagtatccccagaaccagacgacctgaaaggttggcgatggaaataacagtgactgcattagctgcggaaaccacatcaaggtgtgccagactttgggcgatatctttcgctaccccaatcacgtacaggccgctcatgcaggcagtcaggaacattaccgctaacatccagtactgcggtttacgcatcgactctgccagcgtgtaatctttctccaccacaccattgctggttttcacttcctgttttggtgcgtctttcattaacgttgcgccgaaaacaatcatcaccagcgcaatcgctccccaaatcacaaaggttttttccagacccaccgtttccagcagccgcgtgtcgataaatttgaaacccaggctacccagaccataagaaccgatagcgaacgcggatatcagacctttacgctccgggaaccacttcacgcagttagagagcgtcagcaggtaacccgcgccatccgccagaccgaccagcacaccggcgcttaaccacagcatcatcaggttgtcagaatgcgcggtcaggaagaagcctaatcccagcaaaatgccggaagccatggtgacgcgtttaacgccaaaacgttcctgtaatttgcccgcaacagaagatgaaattgccagccccagacttaacaagccgaaagagaaagcgacctggcttaccggcgcatccagcttggcggaaagcgcgccattaaacaggctccaggtataaaccgaccccagcgcaaactgggtaatgattgtaccgatgagtgtcagccagcgggtacgctgataatttgaaggtgtcatggcagtattcctgcagtaataaaaaggaaaaatctctgccgacaaccataacgaagtgcactttatgcctggggaaaaacggcatgaaatgccatcagaacggaatgaaatgccttagttcaggaatgaatgacgcgacaattattcaccaaatttattatttggtaagttagcacccactatcgccacaactgttgttattcaatggtttcaattgtgactgttacgttaaaatctggcgctaacccccatcgtatacagatagtcgctattattagtggtattttctgcctgagttagcgcggcataggcggcaatattttgattgagcaacatatcagcgcctacggtgacatccagccagttgccgttctggtttgtcgccgtcatccggctcaggcctgattgcgccttccagatattctcgccaaattgctggttatagctgatttgcgcccagggtcggagatcgccaagccgggagtcaacacgccagcctaaggtactcacgctggcatgccataacggatcggtcagcgtggtagtactgtcgccaaactcgttatacatcgaggtggttgtgccatcgtaatgtaatgccgcgaccgggccggttgtaacctgttcatataaaggaaaattccagcccatactcatactgctggtcacatccacaggagtttcttccgccagattgacttccagtcccagcgccctttggctactttgaatacgttgcgacaaaatatcgttgtaatcaggttgatgatcactatcccaggtgtaacgctctgtggaaagtccgggttgcgtatcaacgatatattcttgttgccaggcgtaagctgtgttgagaaaaaaggcactgattaccacgctcgccagcaggcttagctgccagcgaccaccgcttttttttatgatcattaacacgactccagggaagagccgaattcggcaatattattgtcattgtatgaaggatatcgggcatagtagccctgtattaaatattgactttttcaccgatgcgtcaagaaaagcggctgaaatttttacgatcgggtacatagcgagggaaagtatggaacgttgcggctgggttagtcaggacccgctttatattgcctaccatgataatgagtggggcgtgcctgaaactgacagtaaaaaactgttcgaaatgatctgccttgaagggcagcaggctgggttatcgtggatcaccgtcctcaaaaaacgcgaaaactatcgcgcctgctttcatcagttcgatccggtgaaggttgccgcaatgcaggaagaggatgtcgaaagactggtacaggacgccgggattatccgccatcgagggaaaattcaggcaattattggtaatgcgcgggcgtacctgcaaatggaacagaacggcgaaccgtttgccgactttgtctggtcgtttgtaaatcatcagccacaggtgacacaagccacaacgttgagcgaaattcccacatctacgtccgcctccgacgccctatctaaggcactgaaaaaacgtggttttaagtttgtcggcaccacaatctgttactcctttatgcaggcatgtgggctggtgaatgatcatgtggttggctgctgttgctatccgggaaataaaccatgattcgggaagcgcaacgttcagaactccccgcgatcctcgaactgtggctggaaagtacaacctgggggcatccctttataaaagcgaattactggcgtgactgcattccgctggtgcgggatgcctatcttgccaacgcgcaaaactgggtctgggaagaggacggtaagcttctcggttttgtcagcattatggaaggccgatttctggcagcaatgtttgtcgcaccgaaggccgtcagacgcggtattggtaaggcgctgatgcagtatgtgcagcagcgctatccccatctgatgctggaggtttatcaaaaaaatcaaccggcgatagatttttaccgtgcgcagggttttcacattgtcgattgcgcatggcaggatgaaacccaactacccacctggattatgagctggccggtggttcaaacgctgtaagtgtcagttccggaccgttgtatttttccagccatgccagcgccgtattacccgcacagccattccccagccgcgagctggggagatctttggtcagcacgttgactgcgccgtttttacaaataccgtcagcggttaaatccaaatccggccatgccccttcgtgaatacaaatcacgccaggtttaattccctcgctaatgaccgctccggcaagaatttgcccgcgtgcgttccacagccgaacagtatcgccatcttgaatgccgcgcgcctgagcatcgtcaggatgaatggtgacaggctcacggtttgctaccgcgtacaattcgcgcagagaactgtaattcagctggctgtgcaggcggtgcgccggatgggcagaaagtacctgcaactgttctggttcggcattgccctgccattcgtccggctccagccacattggatgccagggcaatccgggtaaccgtaatcggcaatacgctgtgagaagatttcaatcttgccgctggcggtttttaacggatgcgccagcggatcgcggcaaaaatcagcgaagcgaataaaccgctcgctgtccgggttttccggcatctcaattaactggttggcttgccagaactcagcaaatggcggcaattcaacctgctggcttgccccgcgctgccgggcaacgttataaaacgtttccagccattgcagctcactttttccttccgtaaaacgtgcataaccgcccttctcccagcgttcacttaactcggcaaaaacatcaaaatcattacgcgcttcatagcgtggcggcaccacttgcttcatcggcaccagatgctgattactgtaatcaccggtcatggtgagatcattacgctcaaaagaggtagtcgcaggcagaacgatatccgcgtgtttcgccgccgccgtccagaagcattcagagatcaccaccagctccggtttttgccaggcacggatcagacgattggtatcctgatgatgagtaaagttggcaccgcccgcccaccagataaaacgaatatccgggaaatgtcggttcataccgttgtgttgatatgcgccaccagggttttccagtgcttcaacaatgcgggcaacagggattttatccaccgcatcgcagccacccggcaagctgccctgcatggaagagagcaccgcagaacgccgcgtggggttaccaccattggcaaaatgataagaaagaccaaaaccgccgccgggtgtgccgatttgccccaacattgccgccagcgtgacgatcatccagtgtttttgctcaccaaactgttggcgctgcattccccagccagccatcagcatggtcgtgttttggtggaaaagagccgccagctcgcggattttcgctgcgttaaccccacaaatctctgccgcccattcggcgtttttcgctattccgtcactctcgcccagcaaataagaggcgaagacggcataacctgtggtgcaacgcgtcagaaacgcttcgtcgtgccaaccattttccaccagcgtatgggcgatccccagcatcagcgcaacatcggtgcccatgtgcggtgccacccactccattttatcgccaaagaaatcgacggtttccgatcgcattggatcaatacagatcagctttttcccgctgtcacgcagtgcggaaaagtaagaaagcccctgctcatcagatgcattccacgcaattttcagcgtattgagtgggttagcactccacaacaccacgacatcgctatgttccagcaccagcggccaactggtttgctgttgataaacttcgctaccacccacgacatacggcatgatcgcctgtgccgcgccggtcgaataatcccccagatgcccggtataaccgcctgccagcgccatatagcgttgtaataatgtcgaggccttatgcagcacgccgtttgaacgccagccgtaggaaccagcaaaaatcgatgccggaccataagcctcacgaatgcgtttatgttgttggtgaataagatccagcgcctcatcccaactcacgcgaacaaattcatcctgcccacgaatgccttgcggattttccggtgacgcaagaaagcctttgcgcaccattggaaatcgtacccgtgtattgctgtgaacctggtcgcgaaccgcgctctgcaaggagttttccattcctgtggctaacgcgccatgcgagctaaacacggtttcgccgtcggtttcaaccagcatgggcccccaatgggcggcagtcagaacggaatatcgtgaggatgagttggccaaaccgaaaactcctgaaaggttagatgtattgagcagttaaatattacttacaaatttccgagtattcccaggaataatcttcatgttcacgcggcataatctcccgccacggaacccgtggcaaagaataaaaaggttattaaggattaacaatgaagaaacgtgtttatcttattgccgccgtagtgagtggcgctctggcggtatctggctgcacaactaacccttacaccggcgaacgcgaagcaggtaaatctgctatcggcgcaggtctgggctctctcgtgggcgcgggtattggtgcgctctcttcttcgaagaaagatcgcggtaaaggcgcgctgattggcgcagcagcaggcgcagctctgggcggcggcgtgggttattacatggatgtgcaggaagcgaagctgcgtgacaaaatgcgcggcactggtgttagcgtaacccgcagcggggataacattatcctcaatatgccgaacaatgtgaccttcgacagcagcagcgcgaccctgaaacctgcgggcgctaacaccctgaccggcgtggcaatggtgctgaaagagtatccgaaaacggcggttaacgtgattggttataccgacagcacgggtggtcacgacctgaacatgcgtctctcccagcaacgtgcggattccgttgccagcgcgttgatcacccagggcgtggacgccagccgcatccgtactcagggccttggcccggctaacccaatcgccagcaacagcaccgcagaaggtaaggcgcaaaaccgccgtgtagaaattaccttaagcccgctgtaatccctttcatgccaggtgatgcagaaatcacctggcattcttcagttttccttcatcatatttcaggctaaggtgatcgccttatcagtgaatggagagaagcatgaagccgtccgttatcctctacaaagccttacctgatgatttactgcaacgcctgcaagagcatttcaccgttcaccaggtggcaaacctcagcccacaaaccgtcgaacaaaatgcagcaatttttgccgaagctgaaggtttactgggttcaaacgagaatgttgatgccgcattgctggaaaaaatgccgaaactgcgtgccacatcaacgatctccgtcggctatgacaattttgatgtcgatgcgcttaccgcccgaaaaattctgctgatgcacacgccaaccgtattaacagaaaccgtcgccgatacgctgatggcgctggtgttgtctaccgctcgtcgggttgtggaggtagcagaacgggtaaaagcaggcgaatggaccgcgagcataggcccggactggtacggcactgacgttcaccataaaacactgggcattgtcgggatgggacggatcggtatggcgctggcacaacgtgcgcactttggcttcaacatgcccatcctctataacgcgcgccgccaccataaagaagcagaagaacgcttcaacgcccgctactgcgatttggatactctgttacaagagtcagatttcgtttgcctgatcctgccgttaactgatgagacgcatcatctgtttggcgcagaacaattcgccaaaatgaaatcctccgccattttcattaatgccggacgtggcccggtggttgatgaaaatgcactgattgctgcattgcagaaaggcgaaattcacgccgccgggctggatgtcttcgaacaagagccactgtccgtagattcgccgttgctctcaatggccaacgtcgtcgcagtaccgcatattggatctgccacccatgagacgcgttatggcatggccgcctgtgccgtggataatttgattgatgcgttacaaggaaaggttgagaagaactgtgtgaatccgcacgtcgcggactaagccgcgactgcgtgaagtaaagcccgataatcgctcgggcttttactctttattgggttgcagtaactgctgtagtccaggcctgattaaacgcctgatgttgtgccggtaatggcgcaatcagtttgttatattcacttgcctgctgtgaagtcgggaactggatgccatttgcgacaaagctcacctgagtaccttgctgagcaatgtagtctccaaccatcaccagttgttgcgtgaaagtttgtgcagccggaatcaacggttgcaatgcatcagctggcgtcgttaccactttggtgaatgcctgatcaaagaccggtttcaaatcatcggtctgttttagcgcagagtgcgcagcatcggcctgcaacttcgcattttgcagttgttgcgccagcacacccagcgaaccgttcatttcacgcagcggaccgctttgcgtaacgtaatcctgcggtacgcgaattgcgttaacgctgtctacgaccgggcgcagaccggaatccatcgcctgattcacctgctgagaataaccatacagaatcgcgtaatcagagacaaaaggaccaaactgttttttctgatcggcagtcagggttggtagacgttcaccgctacgcatcactgtattctgcaggaagtcgataaacgctttacgctgatcgccttctttatcaaaacacccactcaggctaactaccattaataacgccgcaagaggcgcaaaccagcgagagcaggactttcctgtcgccattttcttactcctttcacccaaaaaaagcgcacaacgacacacgcgtgtctgacgtgacaaggatagtccaggacaggcttgcaggataccctttctacgtaatcttcctggtaaaatcatggagaaaatgaaacaaggttaatttgttgtttcattgttaaaaaatgatagtgccgttgccttttttgtagccagagatttacgccttcgcagaaggttagattttcgaaatctttacaaaacaggagtggtaagagatatatcggcatttatcagatcgttaggtggctataagtcacgctaaatgacaggctgaatcgaatcatagccagagcatgccctgacttcaccccgctgtgtctgcttttcccgactattcttaatgagcttcgatgcaattcacgatcccgcagtgtgatttgaggagttttcaatggaatataaagatccaatgcatgagctgttgagcagcctggaacagattgtttttaaagatgaaacgcagaaaattaccctgacgcacagaacaacgtcctgtaccgaaattgagcagttacgaaaagggacagggttaaaaatcgatgatttcgcccgggttttgggcgtatcagtcgccatggtaaaggaatgggaatccagacgcgtgaagccttcaagtgccgaactaaaattgatgcgtttgattcaagccaacccggcattaagtaagcagttgatggaatagacttttatccactttattgctgtttacggtcctgatgacaggaccgttttccaaccgattaatcataaatatgaaaaataattgttgcatcacccgccaatgcgtggcttaatgcacatcaacggtttgacgtacagaccattaaagcagtgtagtaaggcaagtcccttcaagagttatcgttgatacccctcgtagtgcacattcctttaacgcttcaaaatctgtaaagcacgccatatcgccgaaaggcacacttaattattaaaggtaatacactatgtccggtaaaatgactggtatcgtaaaatggttcaacgctgacaaaggcttcggcttcatcactcctgacgatggctctaaagacgtgttcgtacacttctctgctatccagaacgatggttacaaatctctggacgaaggtcagaaagtgtccttcaccatcgaaagcggcgctaaaggcccggcagctggtaacgtaaccagcctgtaatctctgcttaaaagcacagaatctaagatccctgccatttggcggggattttttatttgtttttcaggaaataaataatcgatcgcgtaataaaatctagtattatttttgtgaaaaataaatttgggtgcaatgagaatgcgcaacgccgtaagaaaggcgggaataacttcccgccgaagactcttactcttttaaattgcaggctaaaaatgccgccagctcataactcccctgtttaatatgcaattcacacagtgaatctcttatcatccaggtgaaaaataaaagcgtgaaacaaatcactattaaagaaagtaatctatatttctgcggcattcccagccccctgtgttgatttccaacgagtaagaggctaaccttatggtgttcaggcatagggtagcctcactttgatttatagtcaggtggggcttttctctgtctgcctttcggtgaatacctgagacaaacagtctcaagcacccgtggctattctagcttaataagtttgtttcttctccttgatataatcctaaaaaacctcataaaattaatatatgagataatctttattcagcagaagattattaaaggttgctgtattatttagcgataataaaaaaagcctgccagatggcaggctttttaataacggcgttattactgcaacagcgaaatatccgcaacgcgcaggaacagttcgcgcagtttctccagcatggtcagacggttgagacgcaattctttgtcatcaaccatgaccatcactttatcgaagaaagcatcaaccggctcacgcagctctgccagttcgaccagcgcatcctggtaacgaccttccgcaaagtacggctccagcttgtcacgtagcaccacaacctgcatcgccagtttaatttcttccggctctttcagggtagaggcattcacgcggtcgctcagcacttcgtcagatttcgccagaatgttagatacacgtttgttcgccgccgccagtgcagcagctgcatccagggtacggaaatgcgataccgctttcatacgggcatcgaaatcagccggacgagtcggacgacgcgccagtaccgcctggatggtgtcaacggtataaccttcgtcctgataccaggcgcggaagcgaccgagcataaagtcgataacatcatcaactacgttggcattagtcagcttatcgccatacagacgcaccgcttcttcggtcagcgtttgcagatcaaggttgaggttcttctcaacgataattcgcagcacgccaagtgcggcacgacgcagcgcaaacgggtctttgtcgcctttcggatgctggccgataccgaagatacccgccagagtatccatcttgtcagcaatcgccagcgcacaggctaccgggttagacggcaggtcatcaccggcaaagcgcggctgatactgctcattcagcgccaccgcgacatcttccgcttcgccatcgtgacgcgcatagtgcatccccataacgccctgggtgtcggtgaactcgaagaccatgttggtcatcaggtcacacttagacagcaggcccgcacgggttgcgtggttaacgtcagcgccaatctgttcagcaatccagccagccagcgcctggatgcggtcagtttgtcacgcagcgtacccagctgttgctggaacagcacggtttgcaggcgcggcaggttatcttccagacgttttttacggtcggtgttgaagaagaactcggcatccgccagacgcggacgaacgactttctcgttaccggagataatctgctgcggatctttcgattcgatgttggcaacgaagataaagttcggcagcagtttgccgtcgttcgcatacaccgggaagtatttctggtcacctttcatggtgtaaaccagcgcttcagccggcaccgcgaggaatttctcttcgaattttgcggtcagaacgaccggccactccaccagcgaagccacttcttccagcaggctttcgcttaagtcagcgttaccgccaatcttacgcgctgcttcttcggcatcggctttaatcttcgctttacgttcttcgtaatcggcgatgactttcccgcgctcacgcagaatttccggatactgatcggcgttgtcgatggtgaattccggttcgcccataaagcggtggccgcgaatcacgcgatcggactgaatgcccagaatggttgccggaatgactttgtcgcccagcagcagggtcacggtgtgcaccggacgcacgaagtgcacgtcgcttgcgccccaacgcatcagtttcgggatcggcagtttcgccagagaagtcgcaaccatattcggcagcagtgcttcggtgctttcgcccttcacatgggcgcgatacagcagccattcgcctttatcggtagtcagacgctcagcctggtcaacggtaataccgcaaccacgcgcccaaccttctgccgctttgctcggtttgccttcagcgtcgaacgcctgggcaatcgccgggccgcgtttttcgatttcacgatccggttgcgcttccgccaggttagctactttcagcgccagacgacgcggagcagcaaaccattgaacggtgccgtgtgcgaggccagcgttatccagctccgcagtaaaattcgcagcaaaggactcagccaggctgcgcagtgcttttggtggcagctcttcagtgccgatttccaccagaaaagttttctcagacatagccgcctcttacttatctttgttgcacatcgggaagccgagggcttcacgggaagcgtagtatgcttctgccactgctttggtcagggtgcgaatgcgcagaatgtagcgctgacgctcggtgacggagatggctttacgcgcatccagcaggttgaagctgtgggcggctttcagaatacgctcgtaggctggcagcggcagcggattttccagcgccagcagctgctgcgcttctttctcgtactgctcaaagcaggtgaacaggaagtccacatccgcgtattcgaagttgtaagtggactgctccacttcgttctgatggaacacgtcgccgtaggtggttttacccagcgggccgtcgctccagaccaggtcgtaaacgctgtctacgccctgaatgtacatggccagacgttccagaccgtaggtgatctcgccggtaaccggtttacactccagaccaccaacctgctggaagtaagtgaactgcgtcacttccatgccgtttagccacacttcccagcccagtccccaggcacccagagtcgggttttcccagttatcttccacgaaacggatgtcgtgaatagtcgggtccatgcccagctctttcagagaaccgaggtacagctcctgaatattgtccggcgatggcttaatgaccacctggaactgatagtagtgctgtaaacggttggggttttcgccgtagcgaccatcggtcgggcgacgagaaggctgaacataagcagccgccatcggttctggccccagcgcgcgcagacaggtcattgggtgagaggttcccgcgccgacttccatgtccaatggttgaacaatggtgcagccctggcgagcccagtaatcctgtaaggtcaggatcaagccctggaaggtcctggtatcaaacttttgcatattatttcgtgctggatacgtgtggatttaaaggaagggatcagtatacccgctggatggaagatatacagtacgaaacgggaaaaagcagggcttaacgcatggaaagatgcaaaaaatggccatctgcgtcaaaagaacagacaaactgctctttacggaaggtataaccgcgcatttcatagcttccctggaactgttcgaaggcggtgacgtcgattttttgctcgccggtgttataacgttttgccgcctgatccttgcataacgcttccatattcaacgaacgcagaggatcaacctttacccgttgtgctttctgcacgggtgacggtgtagaacaacccactagcaccataagcgccattgccggaaagaaagcgttcatcatcattaaattaccgtctggtttgcaggtgagtcttattatttatatcggtatagtggctgatatcttacgaatttccttaagcctctataagctgtagtgataaaactcagattattccagtgcgccaactgaatgatttatcggtcagactttttttaaccagatacagagacacagatgcagcccaaaatttactggattgataacctgcgagggatagcgtgtttaatggtggtgatgattcacaccactacctggtatgtgaccaatgctcatagtgttagccccgtcacctgggatatcgccaatgttctgaattctgcctctcgtgtcagcgtgccgctatttttcatgatttccggctatctcttttttggcgaacgcagcgcccagccgcgccatttcttgcgtatcggcttatgtctgattttttatagcgcaatcgcactgctctacattgcgctgtttacctccatcaatatggagttagcgctgaaaaacctgctgcaaaagccagtgttttaccacttgtggtttttcttcgcgattgcggtgatttatctggtttcaccgctgattcaggtgaagaacgtcggcggaaaaatgttgctggtgctaatggtggtgattggcattatcgctaacccaaacacagtgccgcagaaaattgacggttttgaatggctgccaattaacttatatatcaatggcgatactttttactacattctgtatggcatgttgggccgcgctatagggatgatggacacacagcataaagcactgtcgtgggtgagcgccgcgctgtttgcgacgggggtttttattatctctcgcgggacattatatgaattgcagtggcgcggaaattttgccgatacctggtatctttactgtgggccgatggttttatctgcgcaatcgcgctattgactctggttaaaaacacgctggatacgcgtaccattcgcggacttggcttaatctcccgccattcattgggtatatacggattccacgccttgattatccatgcgctgcgcacccggggaattgagcttaaaaattggccaatactggatattatttggatcttttgcgcgacgttggcagcgagtttgttactttctatgctggtacaacgaatcgacagaaacagattagtgagttaagtaaaagcccgttcacattggactgaccgggcttacgtgaattattcgctgtattcttcctgggtaacctgtgtttcttttggcgggtttattccggtatcacgaatattcttctgcaccgctactgcaccaaacaagcttaagaagaaagccagtccataaaaacctttttcactgagtaataatgtcgcattccacagacctaccatcagtaatgcaacagagataataaagacagtcaggcaggtcatataataaatggaagtggtcggtatgccttcatacttgtcccgaacggtcttttgataagacgcagcagaaaacagtcctaacaccagtacggcaaaataataccctttttcatttaactgcatctctgcattccatagccctaacagataggtaacgataccaccaacgagagctatccatgacacaatactaaaggccggtgaataggttgatattttgttgtccatcacagtattcctttcattcctgaatgtgtaagagctttatgttgctcataccgagcgaaacaaacgcatttgaccaaacaagcagacaaaaaaggcgatggggtagatcaccatttcataagcattgataggtgcatttaaaacaccgataaacaagagaccgatagtgattaacgcaactaactggcagatatgggtaaaaaaattatccagttgcccgagtttttctgcgcgaagatatgcatagttaccaaaagttgctgtcattaacacgccaagaaaatagccttttccacttagcaatgggcatgagatccatagcccaaccagataaaccagcgccccgacaacaaataatagttttgccacagtttttgaggttttcataacgatctccatatctaccagcgatacattacgagtaaccaacgaaagacaaaactgaaaaatgccattaacaaatgattttcagaataaattcatactaaatattaattaattagtgagatatatagatgtgaattatcccccacccggtcaggcaggggataacgtttacgccattaatggcagaagttgctgatagaggcgacggaacgtttcacgtcgtggctgataagcggcataacgctgcgcatctggtagatgcgactgttctaacggtagctgcggcaacaactcaatgagcgatttctctggattcgccgcaatctgcgccagccttgctgcgcccagtgctggccccacatccccccccgtacggtaatcgagctgctgaccgctgatatccgccagcatctgacgccagtactcactacgcgccccgccaccaatcaacgtaacactttgcggtttaatgccgcaggcatgcacgacatccatgccatctgccagcgcataacccacgccttccagcactgctcgcgccagttcattggggccatgttgatgagtcaaaccaaagaaaacccccttcgcctggggattattgtgtggtgtacgctcgccggaaagataaggcagaaaccaaactggctcggcactttcatcagcctgttgagctgcagcgattaaagctgggacattgcacaggccggttaatttcgcgacccaatccagacacgatgctgcactcagcattacagacattaaatgccaacgctgcggtagcgcatggcaaaagctgtgtacagcgctttctggcttgcttaagaacccttcgctgacagcaaaatagacccccgacgtccccagcgataacattgcctgattagcatcaaccattcccacaccaactgcaccagctgcattgtcgccaccgcctgcgacaactggcaccgtcgccataccccacgctttcgcaacttcaggtaacaaagcaccagtaatttcgctgccttcatataatgcgggcatctggtcacgagataagtcgcaagcctgcagcatgacgtcactccagtcacgctttgcgacatccagccacatggtgccagctgcgtcagacatatcgctggcaaactcccccgtcatacgcagacgcaagtaatctttcggtaataatactttgtcgatttgacggaatatctccggctcatgccgctgaacccatagcaatttaggcgcagtaaatccgggcatcatcaggttgccggtaatcactcgtgattgcggaactctcgcttccagcaaagtgcactcttgcgcacagcgcccgtcgttccacaaaatggcagggcgcaatacccgttgttgagcatccagtaaggttgctccatgcatctggccggcaatacccaatgctttaacgtcctgcagagaatgctgatcgcccagagctttcattgcgcgatcagttgcctgccaccactgttccgggtcttgttccgaccagagtggatgcgggcgcgaaacggtcagcttttccgtttgcgaagcaaccacctcaccctgctcgttgagcaaaataacttttacgcccgaggtgccaagatctatcccgatatacatatcgatcgttccttaaaaaaatgcccggtatcgctaccgataaccgggccaacggactgcacagttagccgttatttgtcgaacagataatgatttaccagattttccagttgctcctggcgaccactctgatgcaccggagacaaattatgttcctgagcatatttggctaaatctgccagtgacatttggcctttcaggatttgctggcccaattcgctattccagccggaataacgctgcgcgatgcgtttatccagctcgccatcttcaatcatgcgcgctgcaattttcagcgccagtgccatcgtatccatcgcgccgatatgaccgtaaaacagatcatatttatcagtactttgacgacgtactttggcatcgaagttcagaccaccggtggtgaaaccgcctgctttgagaatttcatacatcaccagcgcattctcttccacactgttcgggaactggtcggtgtcccagcccagttgcgcatcgccacggttggcgtcgacagaaccgaacaggccaagcgcaatggcggtggcaatttcatgatggaaagagtgacctgccagcgtcgcgtggttagcttcaatgttcagtttaatctctttttccagaccaaactgtttcaggaagccatagaccgtcgcggcatcgtaatcatattgatgtttggtcggttcttgcggtttcggttcgataagcaacgtgccctggaaaccgattttatgtttatgctcaaccaccatctgcataaagcggcccagctgttcacgctcctgacgcaagtcggtatttaacagcgtttcgtaaccttcacgaccgccccacaggacatagttttcaccgcccaatttatgggttgcttccatcgctgtaacaacttgcgttgccgcccaactgaagacttcaggatctgggttcgtcgccgcacccgcgccatagcgagggtttgtaaagcagttagcggttccccacagcagcttcacgccgctctcttcttgcttgcctgccaggacatcaaccatttgcgcaaaattattgatgtactcttttaacgacgcgccctcaggggaaacatccacatcgtggaagcaataaaatggcacatgtaacttgtggaaaaactcaaatgcgacatctgctttacgcttcgccaacgccagtgcctcaccaggctgctgccacggacgattaaacgcccccacaccaaacatgtccgccccgttccagcagaatgtgtgccagtagcaggcggcaaaacgcaagtgctcttccatacgcttgcccaacaccagttcgtcgggattgtagtgacggaatgctaacgggtttgaggattttgagccttcataacgaacgcgatcgagctggtcaaaataggcttgcatattgaactccataatcaggtaatgccgcgggtgatggatgatgtcgtaatattgggcactccctttcagttgctcaattatgttatttcacactgctattgagataattcacaagtgtgcgctcgctcgcaaaataaaatggaatgatgaaactgggtaattcctcgaagagaaaaatgcaataagtacaattgcgcaacaaaagtaagatctcggtcataaatcaagaaataaaccaaaaatcgtaatcgaaagataaaaatctgtaattgttttcccctgtttagttgctaaaaattggttacgtttatcgcggtgattgttacttattaaagctgtcctctaactacagaaggccctacaccatgaaaataaagaacattctactcaccctttgcacctcacttctgcttaccaacgttgcggcacacgccaaagaagtcaaaataggtatggcgattgatgatctccgtcttgaacgctggcaaaaagatcgagatatttttgtgaaaaaggcagaatctctcggcgcgaaagtatttgtacagtctgcaaatggcaatgaagaaacacaaatgtcgcagattgaaaacatgataaaccggggtgtcgatgttcttgtcattattccgtataacggtcaggtattaagtaacgttgtaaaagaagccaaacaagaaggtattaaagtattagcttacgatcgtatgattaacgatgcggatatcgatttttatatttctttcgataacgaaaaagtcggtgaactgcaggcaaaagccctggtcgatattgttccgcaaggtaattacttcctgatgggcggctcgccggtagataacaacgccaagctgttccgcgccggacaaatgaaagtgttaaaaccttacgttgattccggaaaaattaaagtcgttggtgaccaatgggttgatggctggttaccggaaaacgcattgaaaattatggaaaacgcgctaaccgccaataataacaaaattgatgctgtagttgcctcaaacgatgccaccgcaggtggggcaattcaggcattaagcgcgcaaggtttatcagggaaagtagcaatttccggccaggatgcggatctcgcaggtattaaacgtattgctgccggtacgcaaactatgacggtgtataaacctattacgttgttggcaaatactgccgcagaaattgccgttgagttgggcaatggtcaggaaccaaaagcagataccacactgaataatggcctgaaagatgtgccctcccgcctcctgacaccgatcgatgtgaataaaaacaacatcaaagacacggtagttaaagacggattccacaaagagagcgagctgtaagcgttacgccccggcgcggagcgggggcgtgatttctctccatgccgcgtgaatgaattggcttaggtggagtcgttatgccttatctacttgaaatgaagaatattaccaaaaccttcggcagtgtgaaggcgattgataacgtctgcttgcggttgaatgctggcgaaatcgtctcactttgtggggaaaatgggtctggtaaatcaacactgatgaaagtgctgtgtggtatttatccccatggctcctacgaaggcgaaattatttttgcgggagaagagattcaggcgagtcacatccgcgataccgaacgcaaaggtatcgccatcattcaccaggaattggccctggtgaaagaattgaccgtgctggaaaatatcttcctgggtaacgaaataacccacaatggcattatggattatgacctgatgacgctacgctgtcagaagctgctcgcacaggtcagtttatccatttcacctgatacccgcgttggcgatttagggcttgggcaacaacaactggttgaaattgccaaggcacttaataaacaggtgcgcttgttaattctcgatgaaccgacagcctcattaactgagcaggaaacgtcggttttactggatattattcgcgatctacaacagcacggtatcgcctgtatttatatttcgcacaaactcaacgaagtcaaagcgatttccgatacgatttgcgttattcgcgacggacagcacattggtacgcgtgatgctgccggaatgagtgaagacgatattatcaccatgatggtcgggcgagagttaaccgcgctttaccctaatgaaccacataccaccggagatgaaatattacgtattgaacatctgacggcatggcatccggtcaatcgtcatattaaacgagttaatgatgtctcgttttccctgaaacgtggcgaaatactgggtattgccggactcgttggtgccggacgtaccgagaccattcagtgcctgtttggcgtgtggcccggacaatgggaaggaaaaatttatattgatggcaaacaggtagatattcgtaactgtcagcaagccatcgcccaggggattgcgatggtacccgaagacagaaagcgcgacggcatcgttccggtaatggcggttggtaaaaatattaccctcgccgcactcaataaatttaccggtggcattagccagcttgatgacgcggcagagcaaaaatgtattctggaatcaattcagcaactcaaagttaaaacgtcgtcccccgaccttgctattggacgtttgagcggcggcaatcagcaaaaagcgatcctcgctcgctgtctgttacttaacccgcgcatcctcattcttgatgaacctaccaggggtatcgatattggcgcgaaatacgagatctacaaattaattaaccaactcgtccagcagggtattgccgttattgtcatctcttccgaattacctgaagtgctcggccttagcgatcgggtactggtgatgcatgaagggaaactaaaagccaacctgataaatcataacctgactcaggagcaggtgatggaagccgcattgaggagcgaacatcatgtcgaaaagcaatccgtctgaagtgaaattggccgtaccgacatccggtggcttttccgggctgaaatcactgaatttgcaggtcttcgtgatgattgcagctatcatcgcaatcatgctgttctttacctggaccaccgatggtgcctacttaagcgcccgtaacgtctccaacctgttacgccagaccgcgattaccggcatcctcgcggtaggaatggtgttcgtcataatttctgctgaaatcgacctttccgtcggctcaatgatggggctattaggtggcgtcgcggcgatttgtgacgtctggttaggctggcctttgccacttaccatcattgtgacgttggttctgggactgcttctcggtgcctggaacggatggtgggtcgcgtaccgcaaagtcccttcatttattgtcaccctcgcgggcatgttggcatttcgcggcatactcattggcatcaccaacggcacgactgtttcccccaccagcgccgcgatgtcacaaattgggcaaagctatctacctgccagcactggcttcatcattggcgcgcttggcttaatggcttttgttggttggcaatggcgcggaagaatgcgccgtcaggctttgggtttgcagtctccggcctctaccgcagtagtcggtcgccaggctttaaccgctatcatcgtattaggcgcaatctggctgttgaatgattaccgtggcgttcccactcctgttctgctgctgacgttgctgttactcggcggaatgtttatggcaacgcggacggcatttggacgacgcatttatgccatcggcggcaatctggaagcagcacgtctctccgggattaacgttgaacgcaccaaacttgccgtgttcgcgattaacggattaatggtagccatcgccggattaatcctcagttctcgacttggcgctggttcaccttctgcggagaatatcgccgagctggacgcaattgcagcatgcgtgattggcggcaccagcctggctggcggtgtcgggagcgtggctggagcggtaatgggggcatttatcatggcttcactggataacggcatgagtatgatggatgtaccgaccttctggcagtatatcgttaaaggtgcgattctgttgctggcagtatggatggactccgcaaccaaacgccgttcttgattttgataaaaattttctcgaagccggtaacgtattaccggttttgagtttttgcatgattcagcaggaaaagaaccatgtttactaaacgtcaccgcatcacattactgttcaatgccaataaagcctatgaccggcaggtagtagaaggcgtaggggaatatttacaggcgtcacaatcggaatgggatattttcattgaagaagatttccgcgcccgcattgataaaatcaaggactggttaggagatggcgtcattgccgacttcgacgacaaacaaatcgagcaagcgctggctgatgtcgacgtccccattgttggggttggcggctcgtatcaccttgcagaaagttacccactcgttcattacattgccaccgataactatgcgctggttgaaagcgcatttttgcatttaaaagagaaaggcgttaaccgctttgctttttatggtcttccggaatcaagcggcaaacgttgggccactgaacgcgaatatgcatttcgtcagcttgtcgccgaagaaaagtatcgcggagtggtttatcaggggttagaaaccgcgccagagaactggcaacacgcgcaaaatcggctggcagactggctacaaacgctgccaccgcaaaccgggattattgccgttactgacgcccgggcgcggcatattctgcaagtatgtgaacatctacacattcccgtaccggaaaaattatgcgtgattggcatcgacaacgaagaactgacccgctatctgtcgcgtgtcgccctttcttcggtcgctcagggcgcgcggcaaatgggctatcaggcggcaaaactgttgcatcgattattagataaagaagaaatgccgctacagcgaattttggtcccaccagttcgcgtcattgaacggcgctcaacagattatcgctcgctgaccgatcccgccgttattcaggccatgcattacattcgtaatcacgcctgtaaagggattaaagtggatcaggtactggatgcggtcgggatctcgcgctccaatcttgagaagcgttttaaagaagaggtgggtgaaaccatccatgccatgattcatgccgagaagctggagaaagcgcgcagtctgctgatttcaaccaccttgtcgatcaatgagatatcgcaaatgtgcggttatccatcgctgcaatatttctactctgtttttaaaaaagcatatgacacgacgccaaaagagtatcgcgatgtaaatagcgaggtcatgttgtagcgatgatgagaattgtcggcgtcacatcaggtaacgctgcgtggttgtcggatgcggcgtgaacgccttatccgacctacccgccaggcatgataaaacgcaccaacaacgcttcaggctcgtagctcaactgcctgagacaaagtaaaaagccttatccgactgacaagtcggataaggctcaaggaaatgcaattacatatgcgccgcgattaaccgttggttatcctggtacattgcgaacaggtagttgttataactcttccctttggtcgagtagcccttcagcttgtgaatcatcgctgtggcagtcacttcctgatccgctttacgcagctgcgcacgcgatttacggaacgaagagtaagccgggtgcgtattcaggttagtgacataggcgctcaccgattctttgacagaactaaactgtgagtaccctttcactttacctggcgcattggtacaacgtcctttcatgcatttcatgccgaacaggttgttgttgttgcgcgccagcttcgacgttccccaaccgctttctgctgcagccatcgtcgccaccatactggtggggataatgtctacgcgttcaagcaaggtattccacgggatttttcgcgtattaccagaccacttcaccttgtagcgtttggcgatgtctttcagacgcgcacgctcagcaggtgaccattggccctgatactgttttgaaatcagccagttacgttctgcagcaatggctgcattttggctggtaatgtaaggcattacggtccggagaaacgcctttttccttggtgttccggaagggtattttcgcaaatcaggaagtgaactactctttgcactattgcgagaatactcttgtttactgcttacctgtttattactagctttagttaagtgggacttttgactcgctgttgttgtgtgcgtcttcgctaacacctcactcgaaaacaccagagtgagtaacataagaatcatcgccccatatcgtcgtatgggagtcaaaatcatcaggtctcctggtcggatttaatcattccaacaccttatatttttcacaaatttgagagttgaatctcaaatcatatcaaaaatagctgtcaagagcaccccaaggaatagtccaaatctgaaactatgtcacgtgttaacgattaagattggcgctaaatcgcagaaaatgtggggtttatcgcaaaattcagccgttttttgcgcgagatcgctcacccttgcttctcatcctgtggacttaccgctcagggatgagttttgtctggcttatcgctggcaaactgtctgaaatcgcagcaataaggactcatccaccatgaaactcgccgcctgttttctgacactccttcctggcttcgccgttgccgccagctggacttctccggggttccctgcctttagcgaacagggaacgggaacatttgtcagccacgcgcagttgcccaaaggtacacgtccactcacgctaaattttgaccaacagtgctggcagcctgcagatgcgataaaactcaatcagatgctttccctgcaaccttgtagcaacacgccgcctcaatggcgattgttcagagacggcaaatatacgctgcaaatagacacccgctccggtacgccaacattgatgatttccatccagaacgccgccgaaccggtagcaaacctggtccgtgaatgcccgaaatgggatggattaccgctcacgctggatgtcagcgccactttcccggaaggagccgccgtacgggattattacagccagcaaattgcgatagtgaagaacggtcaaataacgttacaacccgctgctaccagcaacggtttactcctgctggaacgggcagaaactgacgcccctgcccctttcgactggcataacgccacggtttactttgtgctgacagatcgtttcgaaaacggcgatcccagtaatgaccagagttacggacgtcataaagacggtatggcggaaattggcacttttcacggcggcgatttacgcggcctgaccaacaaactggattacctccagcagttgggcgttaatgctttatggataagcgccccatttgagcaaattcacggctgggtcggcggcggtacaaaaggcgattcccgcattatgcctaccacggttattacacacaggactggacgaatcttgatgccaatatgggcaacgaagccgatctacggacgctggttgatagcgcacatcagcgcggtattcgtattctctttgatgtcgtgatgaaccacaccggctatgccacgctggcggatatgcaggagtatcagtttggcgcgttatatctttctggtgacgaggtgaaaaaaacgctgggtgaacgctggagcgactggaaacctgccgccgggcaaacctggcatagctttaacgattacattaatttcagcgacaaaacaggctgggataaatggtggggaaaaaactggatccgtaccgatatcggcgattacgacaatcctggattcgacgatctcaccatgtcgctagcctttttgccggatatcaaaaccgaatcaactaccgcttctggtctgccggtgttctataaaaacaaaacggatacccacgctaaagccatcgacggctttacccctcgcgattacttaacccactggttaagtcagtgggtccgcgactatgggattgatggttttcgggtcgataccgccaaacatgttgagttgcccgcttggcagcaactgaaaaccgaagccagcgccgcgcttcgcgaatggaaaaaagctaaccccgacaaagcattagatgacaaacctttctggatgaccggtgaagcctggggccacggcgtgatgcaaagtgactactatcgccacagcttcgatgcgatgatcaatttcgattatcaggagcaggcggcgaaagctgtcgattgtattgcgcagatggatatgacctggcagcaaatggcggagaaattgcagggtttcaacgtgttgagctacctctcgtcgcatgatacccgtctgttccgtgaagggggcgacaaagcagcagagttattactattagcgccaggcgcggtacaaatcttttatggcgatgaatcctcgcgtccgttcggtcctacaggttctgatccgctgcaaggtacacgttcggatatgaactggcaggatgttagcggtaaatctgccgccaacgtcgcgcactggcagaaaatcagccagttccgcgcccgccatcccgcaattggcgcgggcaaacaaacgacactttcgctgaagcagggctacggctttgttcgtgagcatggcgacgataaagtgctggtcatctgggctgggcaacagtgacttttccggcttcccgttcgtcagtacctcgggaagccgccaaccaggataaaatgtcagccctaatcagcgttgcaggataaagcaccgctcactcttcaacagaccgatttgcaccccagcaaatgtagcgttattgttaccttccttgctacagagttcgacagatatcccgctatgacattctccctttttggtgacaaatttacccgccactccggcattacgctgctgatggaagatctgaacgacggtttacgcacccctggcgcgattatgctcggcggcggtaatccggcgcagatcccggaaatgcaggactacttccagacgctactgaccgacatgctggaaagtggcaaagcgactgatgcactgtgcaattacgacggtccacaggggaaaacggagctactcacactgcttgccggaatgctgcgcgagaagttgggttgggatatcgaaccacagaatattgcactaacaaacggcagccagagcgcgtttttctacttatttaatctgtttgccggacgccgtgccgatggtcgggtcaaaaaagtgctgttcccgctggcaccggaatacattggctacgctgacgccggactggaagaagatctgtttgtctctgcgcgtccgaatattgaactgctgccggaaggccagtttaaataccacgtcgattttgagcatctgcatattggcgaagaaaccgggatgatttgcgtctcccggccgacgaatccaacaggcaatgtgattactgacgaagagttgctgaagcttgacgcgctggcgaatcaacacggcattccgctggtgattgataacgcttatggcgtcccgttcccgggtatcatcttcagtgaagcgcgcccgctatggaatccgaatatcgtgctgtgcatgagtctttccaagctggggctgcctggctcccgctgcggcattatcatcgccaatgaaaaaatcatcaccgccatcaccaatatgaacggcattatcagcctggcacctggcggtattggtccggcgatgatgtgtgaaatgattaagcgtaacgatctgctgcgcctgtctgaaacagtcatcaaaccgttttactaccagcgtgttcaggaaactatcgccatcattcgccgctatttaccggaaaatcgctgcctgattcataaaccggaaggagccattttcctctggctatggtttaaggatttgcccattacgaccgagcagctctatcagcgcctgaaagcacgcggcgtgctgatggtgccggggcacaacttcttcccagggctggataaaccgtggccgcatacgcatcaatgtatgcgcatgaactacgtaccagagccggagaaaattgaggcgggggtgaagattctggcggaagagatagaaagagcctgggctgaaagtcactaaaaattgcctgatgcgctacgcttatcaggcctacatgatttttgcaatatattgaatttggaagaatttgtaggccggataaggcgtttacgccgcatctggcataaacaaagcgcactattccggcgttgagaaacgccggaaaaacgtttcaaacaggctgctgccgtagccgatgccgctgcactttctcgacatccatgcactgcaacgcctttgtcgggcaggcttcaacacaggccggtcccgtctcccgatgccagcacagatcgcacttaatcgccctcgcctttttgcgcgaagaaacgacctccatcgcaccaaacgggcaagccagcatacagcttttacagccaatgcaacgtgtttgttcaacgaaaatatgcccatgttcgcggcttatcgcgtcaacagggcagacattcgcgcacggtgcatcttcacactgatgacaggctactgccgtggtccagctgtggtctttaatgacacgaatacgggaaataaactcgtctggtgacaacgcagcgcaatcctgattctcctgatgcgacactgcgcaagccacttcacaggtacggcaaccgatacatttcgtcgcatccgcaataataaaccggttcatgatcactcctttgcactaaaacagcagagtgccagagagcgcgtccctactgctttgatccaacgaaggaaatgttaaagttttggcacttgtccaaagcgttatgtgatcgcgcccaggtcatccctgacagtaaatcccagttcattagaaatagcctgcgcggtttcacgcagtggtttcaggagatttttctctcccacctgtttcagacgtgatgtcgaaagcgaaatcgacacggcgtacggcacccgcccatgaatatcaaacaccggaacagcaatacaggagacgccgagttcgttttcttctctgtccatcgccgctccgctttcacgaatgtgcgccagttcgtcgaacatcgcgggcagctcggtaatggtattgcgggttaacggctggatctcatgctgatggttttcccagtatgacttcacgtagtccgggtgaccaaacgccatgtagatcttgcccattgcggaacagtagagcggcatatgctggccaatataggcacgggttcgcagcatcccggttgtgggttccagcttataaatcaaaatagcgtgatcgtcttcgcggctggagaagttaatggtttcaccagtggcgatgttcagtgcctcaagatgcggagcggcgatatgaatgatattcagcgaagacagcgccttctgcccgacggcaataaatttggtagtcaggcggtaactccctgcggcgggcgcggtggtcacatagccgcaggactgtaatccctgcaataagcgatggacggtactcttatttaaaccagccagctccgaaagatgcgccaacggacaaccgtttggatagttgctcaaaatctcaatcagcatcaacccgcgaaacagactctggcttccggctggacgctctttttcctgcgccatctcgttctctttttttcccatcacttctttccccattttgtcgcgtcctgatggtagcgcaaagtgtgccgtagttcacgatctcgacagataatttataaccacttgatttttatgtcttttgaaattcatcaatcagattgctttgttaaaaagtgatcgatatatttgaaatcaagtttcgcatattgaaattttaagccaaaaaagcgatcaaaaaaacaaggaagcctgggatgaaagtgacatttgagcagttaaaagcagcctttaatcgggtcttaatttcacgcggcgttgacagcgaaacggctgacgcctgtgcagagatgttcgcccgcaccaccgaatccggcgtttattctcacggcgttaatcgtttccctcgtttcattcaacaactggaaaacggcgatatcattcctgatgcccaacccaaacgtataaccagcctcggcgcaattgaacagtgggatgcccagcgttcgatcggcaacctgacggcgaaaaagatgatggatcgcgccattgaactggctgccgatcacggtattggtctggtggcacttcgtaatgccaaccactggatgcgcggcggcagctacggctggcaggcggcggaaaaaggctatattggcatttgctggaccaactccatcgccgtaatgccgccgtggggcgcaaaagagtgtcgcattggcactaacccgctgatcgtcgccattccttccacgccgatcaccatggtcgatatgtcgatgtcgatgttctcttacggcatgttagaagttaaccgcctggcgggccgtcagctcccggtcgatggtggctttgatgatgagggcaatttgaccaaagaacctggcgttatcgagaagaatcgccgcattttgccgatgggctactggaaaggttctggcatgtcgattgtgctggatatgatcgctactctcctttccgacggcgcatcggttgccgaagtcacccaggacaacagcgacgaatacggcatttcacaaatttttattgccattgaagtggacaagcttatcgacggtcccacccgcgatgccaagctgcaacgtatcatggattacgttactaccgctgaacgcgctgacgaaaaccaggccatccgcttacccggccacgaatttactaccctgctggccgaaaaccgccgtaacggtattaccgttgatgacagcgtgtgggccaaaatccaggcgttataaggagataagtcatgatttttggacatatcgcgcagcccaatccgtgccgtttgcccgccgccattgaaaaggcgctcgattttctgcgcgctaccgatttcaacgccctggagccgggcgttgtcgaaatcgacggcaaaaatatttatgcgcaaattatcgatttaaccacacgcgaagcggtggaaaaccgtccggaagtgcatcgtcggtatatcgatattcagtttctggcgtggggtgaagagaaaatcggcattgctattgatacgggaaataataaagtcagcgaatcactattagagcagcgcgatattattttttatcatgacagtgaacatgaatcatttatagaaatgataccgggcagctacgcaattttctttccgcaggatgttcaccgaccaggttgtattttgcaaacagcctctgagatacgaaaaattgtggttaaagtcgcattaacggcgctgaattaatcgaataatcgtctacgccagaacgactgggtaatgttattgctctaactatattaataatttaggttgctgcacatgcaacttgaattatgacagacatagcctcaaggaatagctatgaaaaaaatacttgaagcaatactggcgattaatctcgccgtactttcctgtattgtgtttataaacattattttaagatatggttttcagacaagcattttatctgtagatgaattgtcacgttatttatttgtctggttaacatttattggcgcgattgtggcttttatggataacgcccacgttcaggtcacctttctggtggagaaactctcccccgcatggcaacgacgagtcgctctggttacccattccttaatcttatttatttgtggcgcactggcctggggcgcaacgctaaaaacaattcaggactggagcgattattcaccgatcctcggtttacccatcggcctgatgtatgccgcttgtctgcccaccagcctcgttatcgcattctttgaactgcgtcatttatatcaactcatcacgcgtagcaattctctaacgtcgccaccgcaaggagcttaatcatggctgtgctgatttttctgggctgtctgttgggtggtattgctatcggtttgcctattgcctgggcactgttgttgtgcggggcggcgttaatgttctggctggacatgtttgatgtccagatcatggcacaaacgctggtgaacggagccgatagcttctccctgctggcgattccgttctttgtgctggcgggtgaaatcatgaatgcgggcggcttgtcaaaacgcattgttgacctgccgatgaaactggtggggcataaaccaggcgggctgggctacgtcggcgtgctggcagctatgattatggcgagcctttctggttctgccgttgcggataccgccgccgttgccgctctactggtgccgatgatgcgcagcgccaactacccggtcaaccgggcggcggggctgattgcctctggcggcattatcgcgccaattattcccccttccattccgtttattatcttcggcgtttccagcggattatccatcagtaagctgtttatggcgggcattgcccctggcatgatgatgggcgcaacgctgatgcttacctggtggtggcaggccagtcgccttaatttaccccgccagcaaaaagcaacgatgcaggaaatctggcactcttttgtctccggtatctgggcgctgtttcttccagtcatcattattggcgggtttcgctccggtctgtttacccctaccgaagccggggccgttgctgctttctatgcgctgtttgtcgccacagttatttaccgtgaaatgaccttcgccacactttggcatgtactcattggcgcggcgaaaaccacctcagtggttatgtttctggtggcctcggcacaagtttccgcctggctgattaccattgctgaactgccgatgatggtttctgatttactgcaaccgttggtcgattcaccgcgtctgctgtttatcgtcattatggtggctatcctgattgtcggcatggtcatggatttaacgccgacggtattaattcttaccccggtattaatgcctttagttaaagaggcaggaatcgatccgatttatttcggtgtcatgtttatcattaactgctcaatcggcttaattacaccgcctatcggtaatgtacttaacgttatttcaggggtggcaaaactcaaattcgatgatgcagtcagaggcgttttcccttacgtcctggttttatattcattattagtcgtatttgtttttattcccgatctcatcatcctccctttgaaatggattaattaaaaggaaaatattatgaaattacgctctgtaacctacgcattattcattgctggcctggctgcattcagcacatcttctctggcggcgcaatctttacgtttcggttatgaaacctcacaaaccgactcgcaacatattgcggcgaaaaaattcaatgatttattgcaggagagaaccaaaggcgagctgaaattaaaattgtttccggatagcaccctcggtaacgcgcaggcgatgatcagcggcgtacgtggcggcaccatcgatatggaaatgtccggctcgaataactttgccgggttatcaccagtgatgaacttgcttgatgtccctttcctgttccgcgataccgctcacgcgcataaaacgctcgacggcaaagtcggtgatgatctgaaagcctcacttgaaggtaaaggactaaaagtactggcctactgggaaaacggctggcgcgatgtcaccaactcgcgcgcaccggttaaaacccccgccgacctgaaagggctgaaaattcgcaccaacaatagcccgatgaatatcgccgcattcaaagtctttggcgctaacccgatcccgatgccgtttgccgaagtctataccgggctggaaacccgcactatcgacgctcaggaacacccgatcaacgtcgtctggtcagcaaaatttttcgaagtgcagaagtacctttctctgacgcaccacgcctattccccgcttctggtggtgatcaacaaagcgaagtttgatggcttaagcccggagttccagcaagcgctaatttcatctgcgcaggaagcgggtaactaccagcgcaaactggttgccgaagatcagcaaaaaatcatcgacggcatgaaagaagcgggcgtggaagtcatcaccgatctcgaccgcaaagcctttagcgacgcactgggtactcaggtccgcgacatgtttgtaaaagatgttccgcagggtgctgatctactgaaagccgtggatgaggtgcaataaaccatgacgcaatactggctggggttagattgtggcggtagctggctgaaagccgggctgtatgaccgcgaaggccgggaggcaggcgtgcagcgcctgccgctgtgcgcattaagcccgcagccaggttgggcagagcgcgatatggcagaactgtggcaatgctgcatggctgtcattcgcgaactgcttacccattccggcgttagcggggaacaaattgtcggtatcggtatctccgcacaaggaaaaggcttgtttttgctggataaaaacaacaagccgctcggtaacgccattttatcctcggatcgccgggcgatggaaatcgttcgtcgctggcaggaagatggcatcccggaaaaactctacccgctgacccgacaaaccttgtggaccgggcatccggtatcgctgttacgttggcttaaagagcacgaaccggaacgctacgcgcaaattggctgcgtgatgatgacgcacgactacctgcgctggtgtttaaccggcgtcaaaggctgtgaagagagtaatatttccgagtccaatctctacaacatgagtcttggggaatatgacccgtgcctcaccgactggctggggattgctgaaatcaatcacgccctgccgcctgttgtcggatctgccgaaatctgcggggagatcaccgctcagacagccgtactgaccggtctgaaagcgggtacgcccgttgtcggcggcctgtttgatgtggtttccaccgcactctgcgccgggatcgaagacgaatttacccttaatgcggtgatgggcacctgggcggtgaccagcggcataacccgcggtttacgtgacggtgaagcgcatccgtatgtctatggtcgctacgttaacgatggtgaatttatcgttcacgaagccagccccacctcttccggcaacctcgaatggtttaccgcacagtggggagaaatctcgtttgatgagatcaaccaggccgttgccagcttgccgaaggccggtggcgatctctttttcctgccgttcctgtacggcagcaacgccggactcgagatgaccagcggtttctacgggatgcaggccattcacacccgcgcacacctgttgcaggccatttatgaaggggtggtgttcagccatatgacccatctcaaccggatgcgcgaacgttttactgatgtgcacaccctgcgcgtcactggcggcccggcgcattccgatgtctggatgcaaatgctggcggacgtcagcggtctgcgtattgagctgccgcaggtggaagaaaccggctgctttggtgcagcacttgccgcccgcgtcggcaccggggtttatcgcgatttcagcgaagcccagcgtgatttacagcacccggtgcgcaccctgctgccggatatgaccgcccatcagctttaccaacaaaaataccaacgctatcagcatctcattgccgcacttcaggctttcacgcccgcatcaaggagcacatattatgagccgaccacttctgcaactggcactcgaccactcatcacttgaagccgcacagcgcgacgtgacgcagttaaaagacagcgtcgatattgtcgaagcgggcaccattctctgtttaaacgaagggcttggcgcggtgaaagccttgcgcgaacagtgccctgacaaaatcatcgttgccgactggaaggtcgccgacgctggtgaaacgctcgcgcaacaggcatttggcgcaggcgctaactggatgaccatcatctgcgccgcaccgctcgcgacggtggaaaaaggccacgcgatggcgcaacgctgcggtggtgaaattcagatcgagctgttcggtaactggacgctggacgacgcccgcgactggcatcgtattggcgtgcggcaggcgatttatcatcgcggtcgtgatgcacaggccagcgggcaacagtggggcgaagccgatctggcacgcatgaaggcgctttccgatatcggccttgagctttccattaccggcgggattacccctgctgacctgccgctgtttaaagatattcgcgtgaaagcgtttattgccgggcgagcactggcaggctcagcaaatccggcgcaggtggctggcgatttccatgcgcaaatcgacgctatctggggaggcaagcgtgcgtaatcatccgttagggatttatgaaaaggcgctggcgaaagatctctcctggccggagcggctggtgctggcaaaaagctgcggttttgattttgtcgaaatgtcggtggatgaaaccgacgaacggctttcacgtcttgactggagcaccgcacaaaggacttcgctggttgccgcgatgatcgaaacgggtgttgggatcccgtcgatgtgcctgtccgcacatcgtcgctttccttttggtagccgtgacgacgcggtacgccagcgagcacgggagatcatgagcaaagcgattcgtctggcacgcgatctcggcatacgcaccatccagctggcgggctacgacgtctattacgaagaccacgatgaaggcacccggcaacgttttgctgaagggctggcgtgggcggtcgaacaggcggcggcatcacaagtcatgctagcggtggagattatggacaccgcgtttatgaactccatcagtaaatggaaaaagtgggacgagatgctcgcctcgccgtggttcaccgtctacccggacgttggcaacctcagcgcctggggcaatgatgttcccgccgaactgaaactgggcattgaccgtatcgccgcgatccacctgaaagacacccagccagttaccgagcaaagtcccggacagttccgcgacgtgccgtttggcgaaggctgcgtcgatttcgttggcatcttcaaaacgctgcataaactgaactatcgcggttctttcctgattgagatgtggaccgaaaaagccaaagagccggtgctggagattattcaggcgcggcgttggattgaagcgcgtatgcaggaggctggatttatatgttagagcaactgaaagccgacgtgctggcggcgaatctggcgcttcccgctcaccatctggtgacgttcacctggggcaatgtcagcgcggtagacgaaacgcggcaatggatggtaatcaaaccttccggcgtcgagtatgacgtgatgaccgccgacgatatggtggtggttgagatagccagcggcaaggtggtggaaggtagcaaaaagccctcgtccgacacgccaacgcatctggcgctttaccgtcgctacgccgaaatcggtggcattgtgcatacccactcacgccacgccaccatctggtcgcaggccgggctggatctccccgcctggggcaccacgcacgctgattatttctatggtgccatcccctgcacgcgacagatgaccgcagaggagattaacggcgaatatgaatatcagaccggcgaagtgatcattgaaaccttcgaagaacgtggcaggagtccggcacaaatcccggcggtgctggtgcattctcacggcccgttcgcatggggtaaaaacgccgccgatgccgtgcataacgccgtagtactcgaagaatgcgcctatatgggcctattctcgcgccagcttgcgccgcagctccctgcgatgcaaaacgaactgctggataagcactacctgcgtaagcatggggccaatgcctattacgggcagtaatccctcacgccggggcttcatcgccccggcactacgaattgatatgttccttgctgtaacgccgcttccacgctgctggcgttaaaccggtgtgcttgcgaaaaatctgccggaaatagccaacgtcattaaaccgtattgcatggagcaggccgacaacgtcgagtcactgcataacctgttgctgcccgccgatgcgccatttacgacatttgaaggcaagggattgttcagccataagatcctgattcagacgccaggttcccggtatgaacagagcaatccagagcaacaacctttgtggcattacgacggagcaccagccgcaccgacatccaccggtgaattaaaaacgccagctcacgccggtgataaaggtaaaactctcattacgatcaatcatcgggctgttggtaatctcttccggcagctcgctgtatcctgcgctcgccatcaatacgacgtgctctcctatcgggtattttgccgtcaggctgacatagggcacccaggcatcctgcgcggaataacttgccagaccgctacgacgggactcactctctgaaatgccatagtaatagtcactgaaattctcgtcataatagagaacgcccagcgcaggtgtcagcgacaggcgacctatctgcattttgtggaataccgatagctcccccacccagccgttgctgttatccagaacgtccgcagccgcagaggctttcacggttccccaacgctcgtggtgataccaggcaacccccgccatagccgtactatcacgcttatcaagctgttgcatggcataatcgtcattatcggcagggtcaaattccagcggcatccaggatgcggtcaggctaagttcatttttttcactttgcgacagaataaaacctaatgtggtctgacgaacataaaaagaatcaccttcataactaatcagcggaattgcctttgtattttcattataaccgcgataaggcgattcattataagctgcaccagcaccaatggataattcagaagcagttgcgcttgccataaaaggcaacgcaaataacgccacaatattgcgattaattaacatgtccggtattccattttaaaataagataaaaaagagtcggcataataatgcttacaatttctccggtgcaagattcatatttatatagtaatatataaaattatatataattgggctgttgcgatgacaaaattacaacttaagtaccgggagttaaaaattatctcggtaatcgctgccagtgaaaatatcagccatgccgcgactgtacttggcatcgcacaggccaacgtcagcaaatatcttgctgattttgaatcaaaagtgggtttaaaagtttttgaccgaaccacccggcagctgatgctcacaccttttggcaccgcgctgttaccgtacatcaacgacatgctggacagaaacgagcaacttaataattttattgcagattataagcatgagaaacgtggtcgggtcaccatctacgccccaaccggcataattacctatttatccaaacatgtaatcgataaaattaaagatatcggtgatatcaccttatcgctaaaaacctgcaatcttgagcgtaatgccttttatgaaggcgtcgaatttcctgatgattgtgatgttttaatcagctacgctccaccaaagatgaatcgctggttgccagttttattacccaatatgccgtaaccgcttatgccagccagcgctatcttgagaaacatcccattagccgtcctgacgaactcgaacatcactcctgtattttgatcgactcgatgatgatcgacgacgcgaatatctggcgcttcaacgtcgccgggagtaaagaggtgcgggattatcgcgtgaagggaaattacgtttgcgacaacacgcaatctgcgctggagctggcacgaaatcacctggggattgtgtttgcgccagacaaaagtgtgcagagcgacctgcaagacggcacgctggtgccctgctttcagcaaccctatgaatggtggctggatctggtggctatcttccgtaaacgggaataccagctggcgggtccagtatgtgctggatgaaatgctgcgtgaaattcgccaccagcttgctcagtcgcagcaactgcggcctgaacaagcggcggaaagcgaagattaatgatcgagataaaggtaatgcacccagctggtcatgcgtaatagcactttgcgcatcaccgagacatggctgaaatgatcagagtaaaccgccacctgggcgtaaataccgtctggtaaagcgctcaaatcagtgtgctcatccagttcaatggtcgcgataacgccatctgaacccggcgctgtgtttaacgtctgtaaggtgccggtcgactgataagctccgccgggaacggctggactaatggctgccagcttaccgctgaataccttacctggcagagcattaaacaccacttccgcatcgtcgccaggagccagtcgcagcaaggagttctgacggaactgcgccacgatttgtcgtttctgatcgggtataaacaccatcaccggacgtagcggcagcgacgcggcataggtacccggacgaatcagtacctgggtcacataaccatcgctcggcgcacgcactatcgtctgctcaaggttatattttgcttccgcgagctgtgctttcaggctggcgatttgagaatgttcacccaacaccaggctatccagctggctctggatctgtttttgttccgccgccgatgacttcacggaggcttcctgcgccagataattttgccgcgccacatcgatatcgcgttctgaaaacgggtttactttcgcctggctgccacgtgcgtaacgcttatactctttagcgaatttatcccgcgtggcctttgcctgctgagtattcgccgccatctcatctaactctgcgcccaacgcccgctgtttatgttctgcggtaacgatatccgccatcagccgatccacccgcgcctgataacgcgtcgggtccagtcgaaatagcacctcaccttttttaatcagcgtatttttcttatccgtcacttcgatcaccacgcctgtcacctgtgggacaacaggaatagaaataaccgctttttgcgctttgaaggtatacggatggttatagttcattaacagaattaaaccactgacaataaatatgccacccagggccgctgtgggaatggtccatttatttacaggaattttgaagatcttaaacattgcccatgcaaaagccacataggtcaaaataatcagtaaatccataagtattactcggcagaagaggatttgatgtcggcgagctgtttctccagcccggcaatacgctgttgtagttgcacaacggaggagtcatggttttgcattccccatccccgctccgggcggtaaagcgtggcccaaatccacaaaaatggccagataacatgcagcgtaaaaagactcacccaaccagcaacatgaatggcgtcggcatgaggatgattacgttttttagcaatcaggtagggaatatcatgtaaaataataatcccatagaatatcaccagaaatacaaaaataagcactcccagtgcaaaataatccagaaacatatttccctcagagaatataaaaaagaacaattaacgcatattatgaaatcccatgatgcagtgcaatttccttatttatataacggcatattgttttttatatactttctgaagtgtgctgcgtggcttttcaacaggtcgaggtttatcatattgaaataatggaactattgaccaagctaatgaataactccagtaaaacatccacagtacagataaagcgtattaaaccttcaattatctaccgtttattgctgattggcctcggaacgccaatggtgatttacggcctggtttgcccgctcaccatcgaaacgcgagagtaaactcctggcaaaacacgccccagaaacgcacttctgttggcgtagtctgggttattgcgcacgtaggtttaaaacgtaaattgtaacaacgtgcgctttgtttatgccggatgcggcgtgtacgccttatccggcctacggtcaggttcccgtaggcatgataagacgcgtaagcgtcgcatcaggcaatgaatacccaatgcgaccagcttcttatatcagaacagccccaacggtttatccgagtagctcaccagcaggcacttggtttgctggtaatgctccagcatcatcttgtgggtttcgcgaccgatacctgattgtttgtagccaccaaacgcagcatgtgccgggtaagcgtgataacagttggtccacacgcgcccagcctgtatgccgcgccccatcttataggccagattaccgttgcggctccagacgcccgcgcccaggccatattgcgtatcgttcgccagctccagcgcttcttccatcgttttgaaggtggtcaccgccagcaccgggccaaaaatctcctcctggaacacccgcatattgttctgaccaaacagaatcgtcggttcgaggtagtagccgtctttcagttcaccttccagcagcttgcgccgcccgccggtgagcacgtctgcgccctcttttttaccgatatcaatgtagttgaggatggtttccagttgcccgtgagaaacctgcgcgcccatttgcgtcacgctgtcgagtgggttaccgctgcgaatgctttcgacacggcggatggcgcgttccataaagcgttcgtagattgactcctgcactaaggcacgactcggacaggtgcaaacttcaccctggttaaaggcaaacagtgcaaagccttccagcgctttatcgaaaaaggcatcttcttcatccatcacatcagcaaagaagatatttggcgatttgccgcccagctccagcgtcaccggaataatgttttgcgtggcgtattgcataatttgttggcccacttccgttgagccggtaaacgccactttggcgatgcgtttcgaggtcgccagatattcgccaatttccccacctgcgccgttgaccacgttcaccacgcccggcggcagtaaatcaccgacgatttccattagcagcagtacagaaagcggggtaagacgtgcgggtttcagcaccacacagttgcccgccgccagcgcgggagccattttccagctcgccatcagcagcgggaagttccacgggataatctgccccaccacgcctaacggttcatggaaatgataggccacggtttcgctatcaacttcactgatcccaccttcctgcgcccgaatacacgaggcgaaatagcggaaatggtcaatcgccagcggtacatccgcagcactggtttcgcgaatgggtttgccgttatcccaggtttcagctgtcgctaacagctcgaggttttgttccattcgatcggcaatcttaaacagaatcgccgcgcgatcctgcaccgaggtgtgcgcccatttatctttcactttgtgcgcagcatccagcgccagatcgatgtctcgtttgcccgaagacgccacttcgcacagcagctgcccggtcaccggcgtcagattctggtaatactcgccgtcggcaggggctacccattcgccgccaataaagttgtcatagcgggcttttaacttgagggggaaaccatactcgccgggcttaatctgtgctgaagggggattattggtcatgatcgtctccttgcggtgtgaggtataacaagggtagacgtgactggcgaaatcttcgccagtcggtaacagctttacgacagctatcacgaatttacgggcaagggttacagagatagttgaaaaagcggctgacaatttgccagccgttgtggaaatgatgattacatcgctgcgcgataaatcgccacaatttcttcgtgagttgcctggatcgggttagtaaaaccacaggcatctttcagggcattagtcgccagaaccgcgaaatcttcttctttcacgttcaggtcgcgtaggcctgccgggatatccactttcttcgccagttcacggatggcgttaatgcaggcttcagcaccttccgcatcgtttttacctgtcacgttcacgcccattgcagcggcacagtcacgcagacgtgcggcggcgactttgctgttgaatacctgaacatgcggcagcaaaacggcgttacatacaccgtgtggcaggttgtagaaaccgcccagctggtgcgccatcgcatgaacataacccagagaagcattattgaacgccataccggcgaggaactgggcataagccattgcttcacgcgctttcgcattactgccatcttcaacggctaacggcaggttttcggcaatcatggtcacggctttcagtgcacaagcgtcagtgatcggcgtggcggcaatagaaacatacgcttcgatagcgtgcgttaaggcatccatacccgttgcggcggtcagtgacttcggcataccaatcatcagagaggagtcattgacagaaagcagcggagtgacatgtttatcaacaatcgccattttgatatgacgcgcttcgtcagtgatgatgcagaaacgggtcatttcagaggccgtacccgccgtggtattgatggcgatcatcggcagctgcggttttgcagagcggtcaacgccttcgtaatcgcgaatatcgccgccattggctgccaccagcgcaataccttttgcgcagtcgtgtggagaaccaccgcctaaggagatcacgctatcgcaattattctctttaagtaatttcaaacctgcggcgacgttttccgtggtggggttaggttgggtgccatcataaataacgctaaaaatattgcgttcttccagtgctttttgcacatcgcccgccatacctaatttcgttaacatactgtcagtgacaattaaggtacgggtaaatccataatctgccatcatattcattgcatcagtcaatgaatcagcgccgatgacattcacagaaggaataaagaaagttgaagatgccataacacactcctgaaagtgtaaaaaagggtgggcagcttactgaggattttcattcgaaaacatgatcattattattgattatcaaaattaatctaataaaaagcacattgtattcattnancaatgtgcnnnnnnnaaantcataagaaattngtattaatttattttaaaaattaattaatcatttccttatttttccggaaataataatgcgtcgcgcaataaatgatcatttccacgacgacgcgtaaagccaatgcggtcaaaatattccagaatctgaattgccagctttcggcctacgcctaagcgatcgcggaaatccgccgcgcaggttgaaccacactcctgatcgagatcgcggatcatattggcaaattcgacaatccgatcgttacggtaataacgatctttgacgatcgcggtaattattccttgctgcgccgcctggcgtagcgtcaggcgcattgcctgctcgtcggtacccgtctcttttgccagatcacgcacccaccacggctcgtcaccaaacagcggctctgctttttgccagatggcctgctgctcttcgctgaagcccgctttgtgatccggcagatgcagccaaccgtgatgactgaggatgtcgccgctttcgcgcatcttttcaatcagcaacagtactagcgcttcatcttccattggcaacgccatacgtcgcagacgttcgcgcccaggcccaggttcatcgcgatgttgctcatgataagtcgctaatgtgtcgagaattttccgttgccagcgagcggcaaccggcgcattcaacaagctataaccagcctgaatatagccaggctgttgcagcaattcgcgcatcccttcgccgttgagctggcgcgcccaggcgaaatccgcaaggttaaccgcgccgcgttccagatgaacagataacgcatcggcatcgctctgcgcccgtgcaagagacgccagccattgcagatattccggcttacgtttaccgcgacgcggcgggttaagcatcaccacacgcgcccccgccagcgtgttgcgggccgagatatcgcgcagcactaagcgatcgttatccgccagccacagcggcgtgtcgaacaccagctcggcaaggttatcttccagcagcgaaacgcgtcccgtaacgtggctggcggcgtggtgaatatgcagcggctgccactgggtcagcggcgtatgggtttgaagctcgacaatcacccgtgtgaacggctctggcggcgcatcggcaagcagccagtcgccacggttaatctgctctttttccgcatcacccgcgatgttaagcgcgatacgctgcccggcatgggcggtttctgttggctggttttgtgcatgcagcgcacgtacacgcatcggtttatttacaccagtcagccagagtgaatcgcctaccttcacttccccgcttaacgccgtaccggtgacgaccagcccggcaccttttacggtaaatgcgcggtcgatcgcgaggcggaaactatgttggctggcgttttcacgtcctggtaactgaagcagatgctcgcgcagggcatcaattccccgaccttcggttgctgcggtgataaacagttttgcctcagcaaaaccgtattcccgcagcacctcctttacctggcgttcaacctcatcaacacgcgcttcgtccacgcgatcggccttggtcagcgccactgtcagcatcgggttaccggtcagctgcaaaatcgccagatgctcacgggtctgcgccatcacgccgtcatcgcacgccaccaccaacagcgcgtgatcgataccaccaacgcccgccagcatgttggaaagaaacttttcatgaccgggtacgtcgataaaaccaggcacgcgaccatccggctgcggccagtaggcatagccgagatcgatggtcatgccgcgctttttttcttccggcagacggtcagcatttacgccagtaatcgcctgcaataaggttgttttgccgtggtcaacgtgtccggcagtcgcaataatcatttcaacaacatctccaaaaaccgttgctcatcttcaaggcagcgtaaatccagccacaatcgtccgtcataaatacgaccaatcaccggcactggcaattcacgccagcgggcggctaatgactcaaggtggctaccgcgtccatcatggggtgtaaacgttaatgccgcgctcggcaggcgatcaaccggcagcgaaccactgccaatctgcgaaagacatggcataacctgtaccgcaaactccgcgccgtaatgtgcggcaaggggagcctgtaaacgttgtgcctggatttgaatgacctctgcgctgcgggtaagcaggcgcagggtcggtaatttttcactcagagcttcagggtgtaaataaagacgcaacgtggcttccagcgccgcgagggtcattttatccgcgcgtaatgcacgcttcagcgggtggctttgcaggcgggcgatcatctcttttttaccaacaataattcctgcctgcggcccgcctaacaacttgtcgccggagaaactcaccagactgacgcccgccgcaatcaactcctgcggcattggctctttcggcaaaccgtactggctaagatcgaccagcgagccactgcctaaatcagtcactacgggaacatccagctctttgccgagcgccaccagttccgcttcatctatcgctttggtgaacccctgaatgctgtagttactggtatgtactttcatcaacagtgcggtattttcattcaccgcctgacgataatcattcgcgtgcgtgcggttggtggtccctacttcgtgtagggtgcaacctgcctgacgcataacatcgggaatacgaaacgcgccgccaatctccaccaattcgccgcgagatactaccacctctttcccgctggcagtggccgccaacatcaataacaccgccgccgcattgttattgacgatacaggcatcttccgcccccgtaatacggcacagcagttgcgccagcgcccgatcgcgatgtccgcgtccggcgtcgtccagatcgtactcgagggtcactggcgaacgcatagcctgcgcaacggcttccaccgcggcttccgcctgtaaagctcgtccaaggttggtatgcagcacggttcccgtcaggttgatcaccggacgcagcgcgctctgcgcttctttcgtcaaccgggcatcgacttcttgcgcccagttttcacaccacgcaggcagcgtctggctgccacgaatcacttctcgcgcttcgtcgagcatctgacgcaacaattccaccacgcgggtgtgaccataagtatcacgcaaagaaaggaaggagctatcgcgcaataagcgatcaatagccggaagttgactatagagggaacgcgtttcggttgtcataggaaacctggctgatcaaggccctctcacacggagaagggcgtttaacataaccacggattgtaacgtgagatgggtcaggaggacatatcgcgcatcaagcctttggcggttcggtgcgagcaaaactttcgcggctaaacaggttttcgaccagtttgactaagtgtgggcggtcgacacaccaacctggcgcaacgcggcggaaattgagatatccgacggcacaggcaatggcgatagtcgccagattgaccgtatcggttttgagtgtgccatcgaccagatatccttccagcacatccagactgcggttgattttctcccgctggcgtaacaattcatcttcagactgctgcgccgctggacgcgcctgttcacgcaccgataccagcccggcatccataatgccatccgccagtgcctcaattttgcgcacccgcaacgactccagcggatcgcgcggcaacatcgccggagcgacattcattaattcaatatattcagcgatgatcggcgaatcaaaccaacattcgccctcttcggtcaccagcaccggcacttttcctaacgggttaaattgcgccacgccgttgtccgcgttatagggcagttcattaataaattcgaaagttatgcccttttctaacaacagaatagaaagtttgcgtacaaacgggctggtgtagctaccgacgagtttcatgccgagtcctttgtgcgaggaaaaatatcagtatggcctggtgatgggaaaaagggcagaaaatgttgatggtttgttacttccaaataaatcacatatttatcatggtgatataaatattttcctaattgtttctatctgatggatatctcacttaaggctttcttataaatctgtagggttttgcctggaagcagacaaataacccgataaaacaaggatgagcagatgagcggaaaaccggcggcgcgtcagggcgacatgacgcagtatggcggtagcattgtccagggttcagccggggtgcgcatcggtgccccaccggcgtggcctgttcggtgtgccccggcggagtgacgtccggccatccggtcaatccsctgctcggtgcaaaggtccttcccggtgaaaccgacatcgccctgcccgccccgctgccgttcatcctctcccgcacctacagcagttaccggacaaaaacgcccgcgccggtggggagcctcggccccggctggaaaatgcctgcggatatccgcttacagctgcgcgataacacactgatactcagtgataacggcggcagaagcctgtattttgagcacctgtttcccggtgaggacggttacagccgcagcgagtcactgtggctggtgcgcggcggcgtggcgaaactggatgaaggtcaccggctggccgcactctggcaggcgctgccggaagaactccgcttaagtccgcatcgttatctggcgacaaacagtccgcaggggccgtggtggctgctcggctggtgtgagcgggtgccggaagcggatgaggtgctgcctgcgccgctgccgccgtaccgggtactgaccgggctggtggaccgcttcgggcgcacacagacgttccaccgcgaagccgccggtgaattcagcggcgaaatcaccggcgtgacggatggtgccgggcgtcacttccggctggtactgaccacgcaggcgcagcgggcagaagaagcccggcagcaggccatttccggcgggacggaaccgtccgcttttcctgataccctgccgggttacaccgaatatggccgggacaacggcatccgtctgtctgccgtgtggctgacgcacgacccggaatacccggagaatttacctgccgcgccgctggtgcgctatggctggacgccacgcggcgaactggcggtggtgtatgaccgtagtggcaaacaggtgcgcagctttacttacgatgataaataccggggccggatggtggcgcaccgtcacacgggccggccggaaatccgttaccgttacgacagcgacgggcgggtgacagaacagcttaacccggcaggcttaagctacacgtatcagtatgagaaagaccacatcaccatcaccgacagcctggaccgccgtgaagtgctgcacacgcagggcgaagccgggctgaagcgggtggtgaaaaaggaacacgcggacggcagcgtcacgcagagtcagtttgatgcggtgggcaggcttaaggcacagacggatgccgcaggccggacaacagagtacagcccggatgtggtgacgggcctcatcacgcgcatcaccacgccggatggcagggcatcggcgttttactataaccaccacagccagttaacgtcagccaccgggcctgacgggctggaaatacgccgggaatatgatgaatccggccgtctgattcaggaaaccgcccctgacggcgatatcacccgctaccgttatgataatccacacagtgacctcccctgcgcaacggacgatgccaccggcagccggaaaaccatgacgtggagccgttacggccagttgctgagcttcaccgactgttccggctaccagacccgttatgaccatgaccgcttcgggcagatgacggcggtgcaccgcgaggaagggctgagccagtaccgtgcatacgacagccgtggacagttaattgccgtgaaagacacgcagggccatgaaacgcggtatgaatataacgccgccggtgacctgaccaccgtcattgccccggacggcagcagaaacgggacacagtacgatgcgtggggaaaggccatctgtaccacgcagggcgggctgacgcgcagtatggaatacgatgctgccggacgggtcatccgcctgaccagtgaaaacggcagccacaccaccttccgttacgatgtactcgaccggctgatacaggaaaccggctttgacggccgcacacagcgttatcaccacgacctgaccggcaaacttatccgcagcgaggatgaggggctggtcacccactggcactatgacgaagcagaccgcctcacgcaccgcaccgtgaatggcgaaaccgcagagcagtggcagtatgacgaacgcggctggctgacagacatcagccatatcagcgaagggcaccgggtgacggtgcattacgggtatgatgagaaaggccggctgaccggtgagcgtcagacggtgcatcacccgcagacggaagcactgctctggcagcatgagaccagacatgcgtacaacgcgcagggactggcgaaccgctgtataccggacagcctgcccgccgtggaatggctggcctacggtagcggttacctggcaggcatgaagctcggcgacacaccgctggtggatttcacccgcgaccgcctgcaccgggaaacgctgcgcagcttcggccgttatgaactcaccaccgcttacacccctgccgggcagttacagagccagcacctgaacagcctgctgtctgaccgcgattacacctggaacgacaacggcgaactcatccgcatcagcagcccgcgccagacccggagttacagctacagcaccaccggcaggctgaccagcgttcacaccaccgcagcgaatctggatatccgcatcccgtatgccacagacccggcaggtaaccgcctgcccgacccggagctgcacccggacagcaccctcagcatgtggccggataaccgtatcgcccgtgacgcgcactatctttaccggtatgaccgttacggcaggctgacggagaaaaccgacctcatcccggaagggggtatccgtacggatgatgagcgcacccaccggtaccattacgacagtcagcaccggctggtgcactacacgcggacacaatatgcagagccgctggtcgaaagtcgctatctttacgacccgctgggccgcagggtggcaaaacgggtgtggcggcgtgaacgggacctgacgggctggatgtcgctgtcacggaaaccgcaagtgacctggtacggctgggacggcgaccggctgaccacaatacagaacgacagaacccgcatccagacgatttatcagccggggagcttcacgccactcatcagagttgaaaccgccaccggtgagctggcgaaaacgcagcgccgcagcctggcggatgcgcttcagcagtccggcggcgaagacggtggcagtgtggtgttcccgccggtgctggtgcagatgctcgaccggctggaaagtgaaatcctggctgaccgggtgagtgaggaaagccgccgctggctggcatcgtgcggcctgaccgtggagcagatgcaaaaccagatggacccggtgtacacgccggcgcgaaaaatccacctgtaccactgcgaccatcgcggcctgccgctggcgctcatcagcacggaaggggcaacagcgtggtgcgcagaatatgatgaatggggcaacctgctgaatgaagagaacccgcatcagctgcagcagcttatccggctgccggggcagcagtatgatgaggagtccggcctgtattacaaccgccaccgctattatgacccgctgcaggggcgatatatcactcaggatccgattggactgaaggggggatggaacctgtatggatatcaattgaatccgatatcagacatcgaccccctgggtttatctatgtgggaggatgcaaaatcgggggcatgtactaatggtctttgcggcacactatccgctatgacaggtccagataaatttgattctatagatagcaccgcatatgacgccttaaataaaataaatagccaatctatttgcgaagataaagagttcgctggtttaatatgtaaggataatagtggcagatatttctcaacagcacctaaccgaggagaatgaaaaggatcatatccattcaatagcccttgccctaatggtactgagaaagtatcagcttatcatactcatggtgcagatagtcatggagaatattgggacgaaatattttcaggtaaagatgagaaaatagttaaaagtaaagataacaatatcaagtaattttatttaggtacgcccagtggtaattttaaagcaatagataaccacgggaaggaaataacaaacagaaaaggattacctaatgtctgcagagttcatggtaatatgtaaaaaaatattgtttaggaactgtgtcattgtatctttgtttgtttttacatacaacacatgggcgcagtgtaataataatattaaaataatgcgcaagtatgaaagtgaaggtaaatataccgttagaaatttggttaaaaataaagctatagcattggaattagctgagatatatgttaagaatcgttatggacaggatgccgcagaagaagaaaaaccatacgaaatcactgagttaacaacaagttgggttgttgaaggtaccattcactcagaccaaattgctggtggggtttttattatagaaataggcaaaaatgatgggagaattctgaattttggccacggaaaataagtatgtaaggataatcaaacatcgtgtgcgctgatggcagagtaggtggaggactccagacagtcaaacgatagaaaaagatagcctttatggaggttcctgcaatgtcaaatacataccagaaaagaaaggcaagtaaagagtatggtttatataatcaatgtaagaaactaaatgatgatgaattatttcgcttacttgatgatcacaattccttgaaaaggatttcatctgccagagtattacagttaagaggtgggcaagacgctgttagattggcaattgagttctgctctgataaaaattatatccgtagagatatcggagcatttatactcgggcaaataaaaatttgcaaaaaatgcgaagataatgtttttaatattttgaacaatatggcattgaatgataagagcgcttgcgttcgagctacggcaatcgagtcaacggctcagcgatgcaagaaaaacccaatttattcacctaaaatagtagaacaatctcaaattactgcttttgataaatcgactaatgtcagacgtgctacagcatttgctatttctgttatcaatgataaagcaacaattccactattgattaatctgttaaaagatccaacttattgatagtgttttatgttcagataatgcccgatgactttgtcatgcagctccaccgattttgagaacgacagcgacttccgtcccagccgtgccaggtgctgcctcagattcaggttatgccgctcaattcgctgcgtatatcgcttgctgattacgtgcagctttcccttcaggcgggattcatacagcggccagccatccgtcatccatatcaccacgtcaaagggtgacagcaggctcataagacgcccagcgtcgccatcgtgcgttcaccgaatacgtgcgcaacaaccgtcttccggagcctgtcatacgcgtaaaacagccagcgctggcgcgatttagccccgacatagccccactgttcgtccatttccgcgcagacgatgacgtcactgcctggctgtatgcgcgaggttaccgactgcggcctgagttttttaagtgacgtaaaaatcgtgttgaggccaacgcccataatgcgggcagttgcccggcatccaacgccattcatggccatatcaatgattttctggtgcgtaccgggttgagaagcggtgtaagtgaactgcagttgccatgtttacggcagtgagagcagagatagcgctgatgtccggcggtgcttttgccgttacgcaccaccccgtcagtagctgaacaggagggacagctgatagaaacagaagccactggagcacctcaaaaacaccatcatacactaaatcagtaagttggcagcatcacctgattaatctgttaaaagatccaaatggagatgtcagaaactgggccgcatttgcaataaatatcaataaatatgataatagtgatattagggattgttttgtggagatgcttcaggataaaatgaggaagtccgtattgaagcaataatcggactttcctacagaaaagataaaagggttttatctgttttatgcgatgagttaaaaaaaaatactgtttatgatgatatcattgaagctgcgggtgaattaggtgataaaacgctacttcctgttttagatactatgttgtacaagtttgatgacaatgaaattataacttccgctattgataagctgaagcgttcatagcgtgagttgcctatgcacagtgggggattcccgccggcacggtgcagatgctcgaccggctggaaagtgaaatcctggctgaccgggtgagtgaggaaagccgccgctggctggcatcgtgcggcctgaccgtggagcagatgaaaaaccagatggacccggtgtacacgccggcgcgaaaaatccacctgtaccactgcgaccatcgcggcctgccgctggcgctcatcagcacggaaggggcaacagcgtggtgcgcagaatatgatgaatggggcaacctgctgagtgatgagaacccgcatcatctgcagcagctcattcgcctgccgggtcagcagtatgatgaggagtccggcctgtattacaaccgccaccgctattatgacccgctgcaggggcggtatatcactcaggatccgattgggctgaaggggggatggaatttttatcagtatccgttgaatccggtcataaatgtagatccgcaaggtttggttgatataaatttataccccgaaagtgatcttatccattctgtagctgatgagattaatatcccaggcgttttcacaatcggggggcatggtacccccacatctattgaatccgcaacgcgcagtatcatgacagctaaagatctagcatatctaattaaatttgatgggaattataaagatgggatgacagtttggttattttcttgtaatacaggtaaaggacaaaattcatttgctagccaattagctaaagagttacatacaaatgtaataggacctgacacgctatggacgtggtgggggcgaggaactaatggtaagttaaaaatggatacagtgctaacagcaccaacgaaccttaattcaaataaggatctaatggctataacaacaaaagaccttggtaattggataacatatgggccatctgggcaccccatttctaatatgcaaggtacgccagaaaaacccagtgatataagataggttgtagatgtatgaaagcatgcttgttactatttttttatttttctcttattggtcaattgcatggtgctgatgtgaaaataaaagaaaacgaaagtgtgatgggatctacagcaatgacctatgatttaagtgaagaaaagctgatgaaactgaagtataaatcacaacatggtgattcagaggcatcatttcgactatatcaatattactgctttactaaaaataatattgataaacaattgcgattcttggaaagatcagcatctcaggggaatgttacagcgcagtttaattatggggtctttttatcagatacaaatccaacattatcagaatattataatttgaatagagctatttattggatggaattcgctgtaaataacggtaatattgatacaaagagcaaacttcaagagctcaaaaagctaaagcgaatggatagaaggaagaataaggagaatccgtaaaagcaatagttcatcagactgccgcagcagtagtatgatgatgaatcagggctgtactataactattatcggtaacattaaccgcagcaggggcggtataacactcaggctccgattgggctggaaggtaggtggaatttttatcagtatccgttgaacccgatttctggaatcgatccccttgggattagccacctgtttatacagtataactttaggtatgctttcgtgtgtttcagatataccatgtgatgataatttttatgatgtgcttagtattccagtcgcttctggtaataatatgcaatgtaaaaataatccccgttgtacacatttataaatagatggccaatacctcaaggcctatggagttggaatgttaatgacccgggagcaagcaatagaaaacctgacggcatacgattagtaccgtcagttaatacaggaacttataatcgcaatggattttcaatacatagttgtttaaacgcttttggtccgtctttaggacctcgattctgttccgagggttgtataactggtttatctaatgacatgcaaaaattaaatgagttaatattttcagagccagatagcacattaacagttacggactaaaaaatatggcaaggttattaacaattgtatttttttctctatttctgcgagtgcagttactgcaagacaatttcagagagagttagatttggcagacaaagcaatattatgggcactaatatcagccagtaataaagagggacgaaaagcgtgttcactaagctattttgcctgtaaggccgcagaggctgaactcggactggcatatatggctgcgaatgataacaaggaatttctcacatccttatctaatataatgaggtacaaaatagatgctggactttccgaatcctatacatgctatttattaagtaagggaaagatcataagaccatatctgaaaaatctaaatccactccaacttgccgctgattgcattgaaacagtaaataaaatataagaataaaaaaatcattgatataaattcagttaatatttgtagtgatgataaaaatatnnnnnngagag

SEQ ID NO: 203 - DNA, 150192 bp, Escherichia coli
  modified_base (37326)..(37326): a, c, t, g, unknown or other
  modified_base (37351)..(37351): a, c, t, g, unknown or other
  modified_base (37384)..(37384): a, c, t, g, unknown or other
  modified_base (150183)..(150184): a, c, t, g, unknown or other
  modified_base (150187)..(150191): a, c, t, g, unknown or other
agtgaagaagaaaatagttgtatacatatattccatgaccctacattgtgatctatagattaaatattttttaaatgtgactgtcatccttcagataataaagccatcatcgcaatagatggaaaagcactcctgctcttttttgattagagccgtcgcaggaggaacaactcatatcatcattgcgatctcgacgatgtatagtctcatcctgcggcagaacaagacggataaaaaatccaatgagagtacactcatccagaacttattaacataatgaatattaaagaaaaatcatcgcagctaatgaagtaatatgcaaaaataattagtccttacaaggagcaaagttccataatctcccccctccccctcaatgatccaaataaagataatgcatccagctggtcattcttagcagcactttccgcatcaccgaaacatggctgaaatggtcggagtaaaccgccacctgggcgtagatgccgtcgggtaaggcatcgatatcatcgttagggtccagttcaatggttcccagcacaccgtccgtgccgggcacgaccgttaatgattgcaataccccctgcgcctgataagaaccgcctggcacgacaggtaaaatactagtcagtttgccgtgaaacacctgcccaggtagcgcgttaaacaccacttccgcatcatcgccgggtttcagacgtaacagcgagttttgccgaaattgggcgacaatttgccgtttttgctcggggatgaagaccatcaccggacgcagcggcaaggcagctgcgtatgtacctgggcggatcagtacctgagtaacgtagccattgctcggcgcgcgaatgacagtctgctcaaggttatattttgcttcagtaagttgcgctcttaagctcacaatctgcgattgctcgccgttaaccatactgtcgagctggctctggatctgcgcctgctccgccaccgagcctttcaccagcgcatcctgcgcgaggaaattttgccgcgcatcgtcgatgtcacgttccgagaacggattcaccgccgcctggctgcctttcaagtaacgttgataatttttaaacagacggtcgcgctccgctgaaacctgggtggtgttggcctgcgcttcagtgagctgcgcacgcagcgtctttatattatgcgtcgccgtcatcaggtcagcctgaagtctgtcaactcgcgcctggtaacgaaccgggtcgagcttaaaaagcacctcgcccttttgaataagctgattattcttgtcagtgacttcagtaacaattcccgtcacctgtggcgtgatagggatcgctatcactgccttttgcgcggtaaaagtgtaagggtggttgtagttcatcaacaaaattaaaccactcaccagaaacacgcctcccagcgccgccgtcgccagcgtccactgatttaccggaatgcggaagattttaaagaccgtccacgccagcgccacgtaagttaaaacaatcaatagatccataattagatctccgggaacgtggaatagtcagtctttttctcggcggcgagttgatgctccagccgggaaattcggtcagaaagtgaggcgatttccgggtcagtcgctttctcctgcgacgcaacatgtgactgcataccccagccacgctccggttgatagagcgtcgcccagatccacagaaacggccagataacatgcagagtaaacaggctcacccagcccgccgtatgaatagcgtcggcatgggggtgattgcgctttttggcaatcagataagggatgtcatgtatcgcgatgattccataaaaatcaccagaaagacgaagatcagcactcccaacgcgaaatagtttagaaacatatctgcctcggattcacgtttatcagtgttgtttttgggctggcagccagaagggagtcaggctgatattttgacaataatccgggttcgcgattctcgccataacaccaaagaataatttttagaggtgatgagttgcttagttacataacgattgtatgacgaaggcataacatgctgtagatcacatcaggtgaacgccgtaagaaaatatcttgtgattcagatcacaaagattcaacaaaccatcaaaacaaaaatgtgacactactcacatttaaatgccatttttagcgaaaatcgccgtcttgttgcttttttacacaagcgttttgtgatgagtatcacgtcaattacctctctaccccctatatttatgtgactgatatcacacaaaaggccgtcgactggacagttaaccgattcagtgccagatttcgcagtatctacaaggtccggctacctctgccgccacattaacaaaaaacctcgggcttccagcctgcgcgacagcaaacataagaaggggtgtttttatgtcatccgatattaagatcaaagtgcaaagctttggtcgtttcctcagcaacatggtgatgccaaatatcggcgcgtttatcgcgtggggtatcatcaccgcgttatttattccaacagggtggttaccgaacgagacgctggcgaagctggtcgggccgatgatcacttatctcctgccgctgctgatcggttataccggtggtaagctggtaggcggcgaacgtggcggcgtagtcggtgccatcactaccatgggcgttatcgtcggcgcagacatgccgatgttcctcggttctatgattgcaggtccgctgggcggctggtgcattaagcacttcgaccgctgggtagacggtaagatcaaatccggttttgagatgctggtgaataacttctccgcaggcatcatcgggatgatcctcgccattctggcatttctcggcattggcccgattgttgaagccctgtccaaaatgctggctgcgggcgttaacttcatggttgtccatgacatgctgccgctggcgtctatctttgttgaaccggcgaaaatcctgttcctcaacaacgccattaaccacggtatcttctcgccgctgggtattcagcagtcccatgaactgggtaaatccatcttcttcctgattgaagctaacccaggtccaggtatgggcgtgctgctggcgtacatgttctttggtcgtggtagtgctaaacagtctgcgggcggtgcggcaatcatccacttcctgggtggtatccacgaaatctacttcccgtatgtgctgatgaatccgcgtctgatcctggccgttatcctcggcggtatgactggcgtgttcacgctgactatcctgggcggtggtctggtttctccagcatctccggggtctatccttgcggtactggcgatgacgccaaaaggtgcttacttcgctaacatcgcgggtgtgtgtgcggcgatggctgtctccttcgttgtctctgctattttgctgaaaaccagcaaagtgaaagaagaagatgatattgaagcagcaactcgtcgtatgcaggacatgaaagctgagtctaaaggcgcatctccgctgtctgctggcgatgtgactaacgacctgagccacgtacgtaaaatcatcgttgcctgtgacgccggtatgggttccagtgcgatgggcgcaggcgttctgcgtaagaaaattcaggatgcaggtctgtcgcagatttctgttactaacagcgcgatcaacaacctgccgccagatgtggacctcgtcatcactcaccgtgacctgaccgaacgcgctatgcgccaggttccgcaggcacagcatatttcgctgaccaacttcctcgacagcggcctgtacaccagcctgaccgaacgtctggttgctgcccaacgccacacggcaaacgaagagaaagtaaaagacagcctgaaagacagctttgacgattccagtgctaacctgttcaagctaggcgcggagaacatcttcctcggtcgcaaagcggcaaccaaagaagaagcgattcgttttgctggcgagcagctggtgaaaggcggttacgttgagccggaatacgttcaggcgatgctggatcgtgaaaaactgaccccgacttatctgggtgagtctatcgcggtgccacacggtacggttgaagcgaaagatcgcgtactgaaaacgggcgtggtgttctgccagtacccggaaggcgtgcgcttcggtgaagaagaagatgacattgcccgtctggtgattggtattgcagcccgtaacaacgagcacattcaggttatcaccagcctgaccaatgcactggatgatgagtccgtcatcgagcgtctggcacacaccaccagcgtggatgaagtgctggaactgttggcaggtcgtaagtaatccaatcccaccctctccacatggagaaggtggggttaattgcctgatgcgctacgcttatcaggcctacaggatgcatcacgatttgttgaatttgcacgttcttgtaggccggataaggcgcttacgccgcatccggcgctgcccctctcctcacggagagggtttgggtgagggaaaagcctcaccccagccctctcgggtaaaaacattgatgaaggttaatactatgaaagcattacattttggcgcaggtaatatcggtcgtggctttatcggtaaactgctggcagacgcgggtatccaactgacgtttgccgatgtcaatcaggtggtacttgatgccctgaatgcccgtcatagctatcaggttcatgtggttggtgaaaccgagcaggtagataccgtttccggcgtcaatgctgtcagcagcattggtgatgatgtcgttgatctgattgctcaggtcgatttagtcactaccgccgttggcccggttgtgctggaacgtattgctccggctatcgccaaagggctggtgaaacgcaaagaacaaggtaatgaatccccgttgaacatcatcgcctgtgaaaacatggtacgcggtaccacgcagctgaaaggccatgtgatgaacgccctgccggaagacgccaaagcgtgggtagaagaacacgttggctttgtcgattccgccgttgaccgcatcgtaccgccttcggcttcggcaactaacgatccgctggaagtgacggtagaaactttcagcgaatggattgtcgataaaacgcagttcaaaggcgcactgccgaacatcccaggcatggagttaaccgacaacctgatggcatttgtcgaacgtaaactcttcaccctgaacacgggtcatgctataaccgcgtacctcggaaaactggccggtcatcagaccattcgtgacgctattctcgacgagaaaatccgcgcggtggtaaaaggtgcgatggaagaaagtggtgcggtactgatcaagcgctacggctttgacgcagacaaacatgcggcgtacatccagaaaatcctcggtcgttttgagaacccgtatctgaaagatgatgtagagcgcgtaggccgtcagccgctgcgtaaactgagtgctggcgaccgtctgatcaagccattgctcggtacgctggaatacagccttccgcacaagaatctgattcaggggattgctggtgcaatgcacttccgcagtgaagatgatccgcaggctcaggaactggcagcactgatcgctgacaaaggtccgcaggcggcgctggcacagatttccggtcttgatgccaacagcgaggttgtatccgaggcggtaaccgcttataaagcaatgcaataatggtggaccaggcgcaggacaccctgcgcccgaataacagattgtcagatatgcaggcaacaatggaacaaacccaggcctttgaaaaccgtgtgcttgagcgtctgaatgctggcaaaaccgtgcgaagctttctgatcaccgccgtcgagcttttgaccgaggcggtaaatcttctggtgcttcaggtattccgcaaagacgattacgcggtgaagtatgctgtagaaccgttactcgacggcgacggtccgctgggcgatctttctgtgcgtttaaaactcatttacgggttgggcgtcattaaccgccaggaatacgaagatgcggagctgctgatggcattgcgtgaagaactaaatcacgacggcaacgagtacgcctttaccgacgacgagatccttggaccctttggtgaactgcactgcgtggcggcgttaccaccgccgccacagtttgaaccagcagactccagtttgtatgcaatgcaaattcagcgctatcaacaggctgtgcgatcaacaatggtcctttcactgactgagctgatttccagaatcagcttaaaaagcctttcaaaagtaagcaacgtctgcttactgcccctctacctgcttcggccgataaagccgacgataatactccagacgttgtagatataacggcacgctttcatcgggtattccggacggaatcgcgttacggggaggaagttttttcagatactcccggaacgcctggcttgatgccatgaaatctacggctttatcgataagaagcggaacgttttcacctaatttgcccatgatgatatctccgtattaccccgcgccgggaatgcgcggccgccaattttagtttaggttcccggtaaagatgacattaaggaaaacgtgctgaatcctcaataatcatccgctgctgtttattatcttttttctatagatttcttaattaatcaataaattgcgtagtttttaagcatgttaatgattacgttacagaactattgcaatgtcatcagttgtgaacaaagcacctggtcgcgcatactaggggctataaatttatctttatcagaagccatcacatgaaagaagtcgaaaaaaacgaaatcaaacgtctcagcgatcgtctggacgccatccgccaccagcaggccgatctgtcgctggttgaagccgcagacaaatatgccgagctggaaaagagaaagccacgctggaagcagaaattgctcgcctgcgtgaagttcatagccaaaaactgagtaaagaagcacagaagctgatgaagatgccgtttcagcgcgcaattaccaaaaaagagcaggctgatatgggcaagctgaagaaaagtgttcgcggactggtggttgtgcacccaatgaccgcgctgggccgtgaaatgggcctgcaggagatgactggattctctaagactgcgttttaagcgcctcagacgactggttcgatcatatcaacccgcatctggcttgccttagctggtcaatgcggggactctcctgtctactcgcctaattaccaaacaattcactccctttacttcgatttaccgctggttgatattctgaaaatgcatttttaccgtaatagccatctataaacaataaaaatatatagaagatatcatttgttaattaacaagcatttacgtctctttttttcggatttaattgtgaaattttaatcatcatattcacaaaatcaattatctgtaaaatttttcccagacatggtttctttcatatttgacatttattaataatcatcattagaatctacgaaaaataatatattcatacaaacacagacatcttttgaaacgaatgatacatttttatgatgaatgcttaaaacaatatttaatcgacacacatcactgtcattaatgtaaagcaacatagctcaccaataatacaatggacaactctaccggcattgatcgctggtcggaggaaataaggatttttacatgaacttgaagaagatttttttcagtgctgtcactgtttcagttctctgcgcattaacgggatgtgactacattgaagaaggcaagccagaaagtagtttactgaaacaacaagaagaacataataataaaattgtgctacttgaaaaacaacaagcacagctaaagagtcaactcgaaactattcaaaaacaacaaactggcataataaacagtacaaagactttaactcacgtaattaaatccgttaaagaccaacaaaatacttttatttttaccgagtttaacccagcaaaaacgaagtatttcatcctgaacaacggttcggtggctttagcgggtcgagtgttatccattgacgccacagagaatggtagtgttattcatatctcactggtcaacttattaagtacacctatctcaaacattggttttaatgcgacatggggtggtgaaaaacctgtcgatgccaaagagtttgcccggtggcaacaattacttttcaacacatcaatgaaatccacattgaaattattaccaggtcaatggcaagacattaatttgaccctgaagggtgtatcgcccaataacctgggatatctgaagttagccatcaacatggaaaatattcagttcgacaatcttccctctgctgaaaatcggcagaaaagaagcaaaaaataaatgcagttagtacgcttataacaaggaatagcgagcatcattaatgaacaaaatatttaaagttatctggaaccctgcgacagggaattatactgttaccagcgaaacggcaaaaagccgtggcaagaaatctgggcgcagtaagctgttaatttctgcgctggttgcgggtggaatgttgtcgtcgtttggggcattggcgaatgccgggaatgacaacggtcagggtgttgattacggtagtggatcagctggcgacggctgggttgctataggcaaaggggcgaaagcaaatacttttatgaacaccagtggttccagtactgctgtgggttatgacgctatagctgaaggccaatatagctctgccatcgggtcaaaaacccatgcgattggcggtgcatcaatggcctttggggttagtgcaatatcagaaggcgatagaagtatagcactgggtgcctcttcgtattcattgggccaatactcaatggccctcggccgttattcaaaagcattgggtaaattgtctattgctatgggggactcttccaaagcggaaggagcaaacgccattgccctgggaaatgccactaaagctactgagattatgagtattgctcttggcgacaccgccaatgcgtcaaaagcgtattcaatggcgctgggagcaagtagcgtcgcatctgaagaaaacgcaattgccctggggcgtagcagtgtagctagcggtactgacagcctcgcatttggcagacaatcacttgccagcgcagcgaacgctattgcgataggtgctgagaccgaagccgctgaaaatgcaactgctattggcaataatgcgaaggcaaaagggactaatagcatggcaatggggttcggaagccttgccgataaagtcaatactatcgcattaggaaatggcagccaggctctggcagataatgcaatcgccataggccagggcaacaaagctgatggcgtggatgccatcgctctgggtaatggtagccagtcgagaggcttaaacaccattgccttaggcacagccagtaatgcaactggtgataagagtcttgcgcttggtagtaatagcagtgccaacggtattaactctgtcgcgctgggcgcagattccattgcggatttagacaataccgtctctgtcggcaatagttcattaaaacgcaagatcgttaatgtgaaaaatggcgcgatcaagtctgacagttacgatgccattaatggttcacagctttatgccattagcgactcggtagcaaaaaggcttggaggaggggctgcagtagatgttgatgacggtactgttacagcaccaacctacaatttaaaaaatggtagcaaaaataacgtaggggctgcgctcgctgtacttgatgaaaacaccctgcaatgggaccaaaccaaaggcaaatacagcgctgctcatggtactagtagcccaactgccagcgtaatcaccgatgttgcggatggcacgatttcagcctccagtaaggatgcggttaacggttcccaactgaaagctaccaatgacgatgtcgaagccaataccgccaatatcgctactaataccagcaacattgccacgaatacggcaaatattgccaccaataccaccaatatcaccaacctgacggattccgttggtgaccttcaggctgatgccctgctctggaacgaaactaaaaaggcattcagtgcagctcacggccaggataccaccagcaaaatcaccaacgttaaagatgccgacctgacggctgacagcactgatgctgttaacggctctcagctgaaaaccaccaacgatgctgtggcgacgaataccaccaatatcgccaataacacttccaatattgccactaacaccaccaacatctctaatctgactgagacggtgactaatcttggtgaggatgcgctgaaatgggataaggacaatggtgtattcacggcagctcatggcaccgagaccaccagcaaaatcaccaacgttaaagatggcgacctgacgactggcagcaccgatgccgttaacggctctcagctgaaaaccaccaacgatgccgtggcgacgaataccaccaatatcgccactaacaccaccaacatctctaatctgactgagacggtgactaatcttggtgaggatgcgctgaaatgggataaggacaatggtgtcttcactgcagctcatggcaacaataccgccagcaaaatcaccaatatcctggacggcacagtcactgcaaccagttccgatgccattaacggtagccagctttatgacttaagcagcaatatcgccacctacttcggcggcaatgcttctgtgaatactgacggtgtgtttaccggtccaacctacaaaatcggtgaaacaaattattataacgtcggcgatgcactggctgcgattaactcctcatttagcacgtctctcggcgatgctctgctttgggatgccaccgcaggtaaattcagtgccaaacacggtactaatggtgacgcaagcgtgatcactgatgtcgcagatggtgaaatttcagactccagttctgacgcagtaaacggctcacaactccacggcgtgagcagttatgttgttgatgcgctgggggtggtgccgaagtcaatgcagacggcaccatcactgcgccgacgtacaccattgctaatgctgattacgataatgtcggtgatgccctgaatgctatcgataccactcttgacgacgctctgctctgggatgcggacgccggtgaaaatggtgcatttagcgccgctcacggaaaagataaaactgccagtgtaatcactaacgtcgctaacggtgcaatctctgctgccagcagcgacgcgattaacggctcacaactctataccaccaataagtacatcgctgatgcgctgggtggtgacgcagaagtcaacgctgacggcaccatcaccgcaccgacttacaccattgcgaacgccgagtacaacaacgtcggtgacgccctggatgcgcttgatgataacgccctgctgtgggatgagactgccaatggcggtgctggagcctacaatgccagccatgacggtaaagccagcatcatcactaatgtcgctaatggcagtattagtgaggacagtaccgatgcagtgaacggttctcagttgaatgcgacgaatatgatgattgagcagaacacccaaattatcaatcagctcgctggtaacaccgacgcaacctatatccaagaaaacggtgcgggtattaactatgtgcgtactaacgacgacggcttagcgttcaacgacgccagcgcacagggtgttggcgctacagctataggttataactctgtcgccaaaggcgatagcagcgtagctattggtcagggcagctacagcgacgttgatacgggtatcgccctgggtagcagctctgtttccagccgagtgattgccaaaggctcccgtgacaccagcataacggaaaatggcgttgttattggttacgacaccacggatggcgaactgctcggtgcattgtctatcggtgatgacggtaaatatcgtcaaatcatcaacgtagccgatggttccgaagcccatgacgccgttacggttcgtcaattgcagaatgcgattggtgcggtcgcaaccacgccgactaaatacttccacgctaattcaacggaagaagattcactggcagtgggaactgactcgctggcaatgggtgcgaaaaccatcgtgaatggcgataaaggtattggtatcggttatggtgcctacgtggacgcgaatgcacttaacggcattgccattggtagcaatgcgcaagtcattcatgtcaacagtattgcgataggtaatggttctacgaccactcgtggcgctcaaaccaattataccgcctacaacatggacgcaccgcagaactctgtcggtgaattctcagtcggtagtgcggatggtcaacgtcagatcactaacgtcgcagcaggttcggctgataccgatgcggtcaacgtgggtcagttgaaagtaacggatgcgcaggtttcccagaatacccagagcattactaacctggataatcgggtaacgaatcttgattcacgcgtcaccaatatcgaaaacggtattggcgatatcgtcaccaccggtagcaccaagtacttcaagaccaataccgatggtgtagatgccagcgcgcagggtaaagatagcgtcgcgattggttctggctccattgctgccgcggataacagcgtcgcactgggtaccggttccgttgcagaggaagaaaatacaatctctgtaggttcttctactaaccaacgccgtatcaccaacgtagctgccggtgttaatgccaccgatgcggttaacgtgtcgcagctgaaatcttctgaagcaggcggcgtgcgttacgacaccaaagctgatggttctatcgactatagcaatatcaccctcggtggcggcaacggcggtacgactcgtatcagcaacgtctccgctggcgtcaacaacaacgacgcggtgaattacgcgcagttgaagcaaagcgtgcaggaaacgaagcaatacaccgatcagcgaatggttgagatggataacaaactgtctaaaactgaaagcaagttgagcggtggtatcgcttctgcaatggcaatgaccggtctgccgcaggcttatacaccgggtgccagcatggcttctattggtggcggtacttacaacggtgaatcggcagttgctttaggtgtatcgatggtgagcgccaatggtcgttgggtctacaaattacaaggtagtaccaatagccagggtgaatactccgccgcactcggtgccggtattcagtggtaatgatccattaagttagtgtgactaagggcaaacgccaaattgcctgatgcgttacgcgcatcaggcaagataaggcgctccgggtcaacaatctaagggcaattctctgatgaggattgccctttttctttaccagacatctccccccacaagaattggccctaccaattcttcgcttatctgacctctggttcacaattccccaattaaaactcacatcaatattgccaatacataacatttagttaaccattcattgtcattatccctacacaacacaattggcagtgccacttttacacaacgtgtgacaaggagatgagcaacagactcattacacgatgtgcgtggactccaggagacctgcaatgaatctctggcaacaaaactacgatcccgccgggaatatctggctttccagtctgatagcatcgcttcccatcctgtttttcttctttgcgctgattaagctcaaactgaaaggatacgtcgccgcctcgtggacggtggcaatcgcccttgccgtggctttgctgttctataaaatgccggtcgctaacgcgctggcctcggtggtttatggcttcttctatggtttgtggcccatcgcgtggatcattattgcagcagtgttcgtctataagatctcggtgaaaaccgggcagtttgacatcattcgctcgtctattctttcgataacccctgaccagcgtctgcaaatgctgatcgtcggtttctgtttcggcgctttccttgaaggagccgccggctttggcgcaccggtagcaattaccgccgcattgctggtcggcctgggttttaaaccgctgtacgccgccggactgtgcctgattgttaacaccgcgccagtggcatttggcgcgatgggcattccaatcctggttgccggacaagtaacaggcatcgacagttttgagattggccagatggtggggcgtcagctaccgtttatgaccattatcgtgctgttctggatcatggcgattatggacggctggcgcggtatcaaagagacgtggcctgcggtcgtggttgcgggcggctcgtttgccatcgctcagtaccttagctccaacttcattgggccggagctgccggacattatctcttcgctggtatcactgctctgcctgacgctgttcctcaaacgctggcaaccagttcgcgtattccgcttcggtgacttgggggcgtcacaggttgatatgacgctggcccacaccggttacaccgcgggtcaggtgttacgtgcctggacaccgttcctgttcctgaccgctaccgtaacactgtggagcatcccgccgtttaaagccctgttcgcatcgggtggtgcgctgtatgagtgggtgatcaacattccggtgccgtacctcgataaactggttgcccgtatgccaccagtggtcagcgaggctacagcctatgccgccgtgtttaagtttgactggttctctgccaccggcaccgccattctgtttgctgcactgctctcgattgtctggctgaagatgaaaccgtctgacgctatcagcaccttcggcagcacgctgaaagaactggctctacccatctactccatcggcatggtgctggcgttcgcctttatctcgaactattccggactgtcatcaacactggcactggcactggcgcacaccggtcatgcattcaccttcttctcgccgttcctcggctggctgggggtattccgtgaccgggtcggatacctcatctaacgccctgttcgccgcgctgcaagccaccgcagcacaacaaattggcgtctctgatctgttgctggttgccgccaataccaccggtggcgtcaccggtaagatgatctccccgcaatctatcgctatcgcctgtgcggcggtaggcctggtgggcaaagagtctgatttgttccgctttactgtcaaacacagcctgatcttcacctgtatggtgggcgtgatcaccacgcttcaggcttatgtcttaacgtggatgattccttaatgattgttttacccagacgcctgtcagacgaggttgccgatcgtgtgcgggcgctgattgatgaaaaaaacctggaagcgggcatgaagttgcccgctgagcgccaactggcgatgcaactcggcgtatcacgtaattcactacgcgaggcgctggcaaaactggtgagcgaaggcgtgctgctcagtcgacgcggcggcgggacgtttattcgctggcgtcatgacacatggtcggagcaaaacatcgtccagccgctaaaaacgctgatggccgatgatccggattacagtttcgatattctggaagcccgctacgccattgaagccagcaccgcatggcatgcggcaatgcgcgccacacctggcgacaaagaaaagattcagctttgctttgaagcaacgctaagtgaagacccggatatcgcctcacaagcggacgttcgttttcatctggcgattgccgaagcctcacataacatcgtgctgctgcaaaccatgcgcggtttcttcgatgtcctgcaatcctcagtgaagcatagccgtcagcggatgtatctggtgccaccggttttttcacaactgaccgaacaacatcaggctgtcattgacgccatttttgctggtgatgccgacggggcgcgtaaagcaatgatggcgcaccttagttttgttcacaccaccatgaaacgattcgatgaagatcaggctcgccacgcacggattacccgcctgcccggtgagcattatgagcattcgagggagaaaaacgcatgattatttccgcagccagcgattatcgcgccgcagcgcaacgcattctgccgccgttcctgttccactatatggatggtggtgcatattctgaatacacgctgcgccgcaacgtggaagatttgtcagaagtggcactgcgccagcgtattctgaaaaacatgtctgacttaagcctggaaacgacgctgtttaatgagaaattgtcgatgccggtagcactggcaccggtgggtttgtgtggcatgtatgcgcgtcgtggcgaagttcaggcagccaaagcggcggacgcgcatggcattccgtttactctctcgacggtttccgtttgcccgattgaagaagtcgcgccagccatcaagcgcccaatgtggttccagctttatgtactgcgcgatcgcggctttatgcgtaacgcgctggagcgagcaaaagcagcgggttgttcgacgctggttttcaccgtggatatgccgacaccgggcgcacgctaccgtgatgcgcattcaggtatgagcggcccaaatgcggcaatgcgccgctacttgcaggcggtgacgcatccgcaatgggcgtgggatgtgggcctgaacggtcgtccacatgatttaggtaatatctcagcttatctcggcaaaccgaccggactggaagattacatcggctggctggggaataacttcgatccgtccatctcatggaaagaccttgagtggatccgcgatttctgggatggcccgatggtgatcaaagggatcctcgatccggaagatgcgcgcgatgcagtacgttttggtgctgatggaattgtggtttctaaccacggtggccgccagctggacggtgtactctcttccgctcgtgcgttgcccgctattgcagatgcggtgaaaggtgatatcgccattctggcggatagtggaattcgtaacgggcttgatgtcgtgcgtatgattgcgctcggtgccgacaccgtactgctgggtcgtgctttcctgtatgcgctggcaacagcgggccaggcgggtgtagctaacctgctaaatctgatcgagaaagagatgaaagtggcaatgacgctgactggcgcgaaatcgatcagtgaaattacgcaagattcgctggtgcaggggctgggtaaagagttgcctacggcactggctccgatggcgaaagggaatgcggcatagtcgtttgagccccctcaccctaaccctctccctcagggagtggggaccgttcggcgctgtatgtactccctcactctgaaacgacaccgcactctttttttctccctcgcccctccggggtgaggggaaaaggccgcactgctcaccaattttctgctatcctgcccccgcactaagggggcagtatgctaaacatcgtactttacgaaccagaaattccgccaaatactggcaatatcatccgtctttgcgctaataccggctttcgtctgcatatcatcgaaccgatgggatttgcctgggacgataagcgcctgcgccgcgcggggctggactatcacgagtttaccgccgttacgcgtcatcatgactttcgcgcgttcctcgaagcagaaaatccccagcgcctgtttgccctcaccacgaaaggtacgcctgctcacagcgccgtaaactatcaggatggcgattatctgatgttcggcccggaaacacgcggcctgccagcgagcattcttgatgccctgcccgctgaacaaaaaattcgcattccgatggtgccggacagccgcagcatgaacctgtccaatgcggtgtcagttgtggtgtatgaagcctggaggcagctgggatatccgggagcgttgttgagagattagttactgtatgccggatagatgattacatcgcatccggcacgatcacaggacatcagatcccatccccatactcaaatgtatggttaataccgttgaaatgctggtccatatccattgatggcttatcgctgtctggtttaccgacaatacgagccggaacgccagcggcggttgtatgcggcggcaccggttgcagcaccacggaacctgcgccaatcttcgcgccgcgaccaacttcaatattgccgaggattttcgcgcccgcgccaatcatcacaccttcacgaattttcgggtgacggtcaccaccagatttacccgtaccgccaagcgtcacagattgcagaatcgatacgtcgttttcaattaccgccgtttcacccacaacgatgcccgtggcgtggtcgagcataatgccacggccaatttttgctgccgggtgaatatcgacctggaacgtcacagaaacctggttttgcagaaagattgccaatgcgcgacgcccctgattccacaaccagtgaccgatgcgataggcctgcaaggcatgaaaacccttcaggtataacaacggggttgagtatttatcgactgccgggtcgcgggtacgcaccgcctgaatatcacaggccgcagaggcgatcatttccgggtcagcggcgtaggcttcttccaccacttcacggatagcaatagcaggcataattggcgatgacagcttgttcgccagcatgtagctcagtgcactaccaaggttttcgtgcttgagtagcgtcgcgtggtaaaaactggccagcattggctcacagtccgccagcgttctggcttcggctttaatattgttccagacaatttccagttcttcacacgacattgcttactccacacgatgagataatgaccggcccgttctgcgcgggccgggtcatagcggtaacaaaggttccctggggttagtggctgctgcgctcgtccttgcgtgcacgacctaataacgtcaatgctgcctcgcgcgcgttttttccgcaatataatacttgataaatttcctcggttattggcatttcaacgccgaagcgatgcgccagttcgcggacttctttcgtattgcggtagccttccaccacctgaccaatcttctcctgcgcgctttgtacatccatgccctgaccgagcatcatgccaaaacggcggttacgcgactggttgtcggtacaggtaagcaccagatcgccaagccccgccatgcccataaaggtggcaggatcggcacccagcgccgcaccaagacgcgacatttcagccagcccacgggtgatcagcgccgtacgcgcattcgcaccaaaaccgataccgtcggacatccccgcgccaatggcaatgacgtttttcaccgcaccgccaagctgcacaccgatgaaatccgggttgctgtaaacgcggaaacttttgccacagtgcagcaattgttggagatcatcggcaaaggtctggtcggtagaggccaacgaaatagccgtcggtaaacctgccgccagttctttcgcaaacgttgggccagagataaccgccagcggaatttgatcgcctaaggcctcacgcgccacgtcctgtaacagacgtccggtttccgcttccagccctttggtcgcccacaccagacgcgcatcaggacgcatcagcggtttaatctggcgcagcacttcaccaaagacatggctgggtacgacgacgagaatattacggctggctgccagcgcagtggcgagatcgctttcaagatggagcgtatcgggaaaaggcacatcggggagaaacgcggcgttacagcggtcgcgttcaagcgttgcgatatgttcagggtcatggccccagaggacaacctcgtggccatttcttgccagggtaatggcaagagcggtgccgtacgagccggcaccgatcacagtcattgaagcattacgttggttcatcaggcatcctgatgttcttcagtaccttcgccagcctgctgctgcaaatagttcatgaacagcgcatcgaagttaaccggcgcaaggttcagttgcgggaatgtaccgcgggataccatgctggtgatgcactcacgagcatacgggaacagaatgttcgggcagtatgcgcccaggcaatgtgccatctgggtgccttcgatacccgcgatggagaaaataccgccctgctgaacttcacacaggaacgcggtttcttcgcccagggaggccgttacggtaacacgcagtaccacttcgtatacgtcatctgccagttgggaagatgccgtatccagatcaagtttaacttctggttgccaatctttctggaaaacgtgcggcgcgttcggcgcttcgaaagagatatccttggtataaatacgttggatctggaaagtcatttcagtgttgttttgttctgacatgtgtagaaaacccttaagtgttgtccttaaatactgcgcaatgtaatgccaacgttcacacgttatttcagcaggggatccagtccaccacgtgcatccaatgcatacaagtcatcacagccgccaatgtgctgtgcgtcaataaaaatctggggaaccgtggtgcgaccgctgcgtttgatcatctcttcacgcttggcggcattgccatcgatcggcagctcctggaaactcacgcccttgctgctcagcagtgcttttgcacgatggcaatacgggcaggtttctttggtatagatttcaacattggccataaattagctcctgtttttttaccctgaaatttcatgttgcagggcggcagcaaaatggagtgtccccagaagcttataacaataagtcgctgggggcctaattgcagctaacggcctgcatcatgaaagacgacaggtaaattatttgccgcgcaccagaggcaagttttcgccagcccagccagcaacgccctctttcagcacgaatacttgcgcaaaaccagctttcgtcagcgcgtttgcaggctcctggcactgcatgccagaaccgtctaccacgataaccggtttgtctttgtgcttctcaagctcaccaacattgttggctttgatttcactcggcaacagattgatagaacctgcgatatggcctttacggaagtcatcacgctgacgtaaatccacaaccacagcgtcttctttgttgatcagacgcgtagcttcaccacgagtaatcaccttcactttcgaggtcaggctcttaaacgtagtcacaagaaccgccaccagtaacgcgatccaggcgatactcagtatgggatgacggccaacaaattgcataatttcttgcatggggggtaacaactcccgacgtagtgattaaaaaaaccaggaaaggagtatacctgcgcggtgcggcaaatacagccagcgcgttaactggaatgcaattttgcggggcacgacgaaaaaaaagcgcaaatctggcatcggcttgccgcgagcggtcgtatattttgatcttcagaggctattttatcgattcagctgtagtaaaattacgcaaattttgactcttgagtatgaggttgtcgcaatgtcggtttctaaaaaacctatggtactggtgattctggatggctatggctatcgtgaagaacagcaggataacgccatttttagtgctaaaaccccggtaatggatgcactgtgggccaatcgtccgcataccctgatcgacgcttccggtctggaagtcggtctgcctgaccgtcagatgggtaactccgaagtaggccacgttaacctgggtgccggccgcatcgtgtatcaggacctgactcgtctggacgttgaaatcaaagatcgcgctttctttgctaatccagtgctgactggcgcggtagataaagcgaaaaacgcaggtaaagcagtacacattatgggtctgctctccgtaggcggcgtacacagccacgaagatcacatcatggcgatggtagaactggcagctgaacgcggcgcagaaaaaatctacctgcacgcattccttgacggtcgcgacaccccgccgcgcagtgctgaatcctcgctgaaaaaatttgaagagaaatttgctgcgctgggtaaaggccgcgtagcgtccatcattggtcgttactacgcgatggaccgcgataaccgttgggatcgcgttgaaaaagcctatgacctgctgactctggcgcagggtgagttccaggccgatactgccgttgctggtttgcaggcagcttatgctcgcgacgaaaacgacgagttcgtgaaagcgaccgttattcgtgcagaaggtcagccagatgcggcaatggaagacggcgatgcgctgattttcatgaacttccgtgctgaccgcgcgcgtgaaatcactcgtgcattcgtgaacgctgatttcgatggcttcgcgcgtaagaaagtggttaacgtcgatttcgtgatgctgaccgaatacgccgctgacatcaaaactgcggttgcttacccacccgcttccctggttaacaccttcggcgagtggatggcgaaaaacgacaaaactcagttgcgtatttccgaaaccgaaaaatatgcccacgttactttcttcttcaacggtggcgtagaagagtcgttcaaaggcgaagatcgcattctgatcaactcaccgaaagtggctacctacgatctgcaaccggaaatgagctccgcagagctgaccgaaaaactggttgcggccatcaagagcggcaaatacgacaccattatctgtaactatccgaacggcgacatggtaggtcacaccggggtgatggaagcggcggttaaagcggttgaagcactggatcactgcgtggaagaagtcgcgaaagcggttgagtccgtgggtggacaactgctgatcaccgctgaccacggtaacgctgaacagatgcgcgatccggcaacgggtcaggcacacacggcacacaccaacctgccagttccgctgatttatgttggtgataagaacgtgaaagcggttgaaggcggcaaactttctgacatcgcgccgaccatgttgtcgctgatgggtatggaaatcccgcaagagatgactggtaagccgctgttcatcgtggaataatccctccccatgaggggaaaggcgattaataccatgacacgggccgtgaaaccgcgcaggtttgcaatcaggcccatcatctacgccagcgttcttagcgctggcgtattgttgtgcgccttttccgcccacgcggatgagcgtgaccaactcaaatctattcaggccgatatcgccgcaaaagagcgcgcggtacgccaaaagcaacaacaacgcgcaagcctgctcgcacaattgaaaaagcaggaagaagcgatctctgaagccacccgtaagctgcgcgaaacgcaaaacacgctcaatcaactcaataaacagattgatgagatgaacgcgtcgattgccaaactggagcagcaaaaagccgcccaggagcgcagcctcgccgcgcaactggatgccgcattccgtcagggcgagcataccggtattcagctaattctcagcggtgaagaaagccagcgtggacagcgtttacaggcttatttcggctatctcaaccaggcgcgacaagaaaccattgcccagttgaagcaaacgcgtgaagaagtcgccatgcagcgtgctgaactggaagagaaacaaagcgagcaacaaacgctgttatatgaacagcgcgcccaacaggcgaaactgactcaggctctgaacgagcgtaaaaagacgctggcggggctggaatcttccatccagcaaggtcagcagcagctaagtgaactgcgtgccaacgaatcccgtctgcgtaacagcattgcccgtgcggaagccgcggcgaaagcgcgtgctgaacgagaagcgcgtgaggcccaggcggttcgcgaccgccagaaagaagcgacgcgcaaaggcaccacctataaaccgaccgaaagcgaaaaatcgctgatgtcccgaactggtggcctgggtgcgccgcgtggtcaggcattctggccggttcgcgggccgacgcttcatcgctatggtgaacagctacagggcgaactacgctggaaaggaatggttatcggtgcctctgaaggtactgaagttaaagcgattgccgacggtcgggtgattctggctgactggctgcaaggttacggtctggtggtggtggttgagcacggtaaaggcgacatgagtctttacggctataatcagagcgcactggtgagcgttggttcgcaggttcgcgcgggccagccaattgcactggtgggcagcagtggcggtcagggtcggccttcactctatttcgaaattcgccgccagggtcaggcggtcaatccacagccgtggttgggaagataagttttgtttccatttcgtcgtaacgttcttgcatttgccgctctgttggcgctctcctcccccgtacttgctggcaaacttgccatcgtcattgatgattttgggtatcgcccgcacaacgaaaaccaggtgctggcgatgccctccgctatctccgtcgctgtattacccgattcaccgcacgccagagagatggcgaccaaagcgcataacagcgggcacgaagtgttgattcatctcccgatggcaccactgagtaaacagccgctggagaaaaatacgctgcgcccggagatgagcagcgacgaaattgagcgcattattcgtagtgcggtcaataacgtgccctatgccgtggggatcaacaaccacatgggtagcaagatgacctctaacctgtttggtatgcagaaagtgatgcaggcgctggagcgttacaatctttacttcctcgacagcgtaaccatcggtaatacccaggcgatgcgcgccgcgcaaggcactggcgtgaaggtgatcaaacggaaggtattcctcgacgattcgcaaaatgaagcggacatccgtgtgcaatttaatcgcgcaattgatctggcgcgtcgcaacggttcaaccattgccattgggcatcctcacccttcaacggtacgcgtgctacaacagatggtttataacctgccgccagacattacgctggtgaaagccagcagcttgctgaatgaaccgcaggttgatacgtctacaccgccgaaaaacactgtgcccgacacaccgcgtaatccgttccgtggcgtgaagctgtgcaaaccgaagaaaccgatagaacctgtttatgctaatcgcttctttgaagtattaagcgaaagcatcagccagagcacgctgatcgtttacttccagcatcagtggcaaggctggggcaaacagcccgaagcggcaaaacttaacgctagcgcaaattaaaggcgctacgcgtaatgcgatggtgcgaccgcgttttgtcgcgccattgccataagcggaaagaccacagtaacgcctggtaacccaccttcacgctgcgcacattggtaatcaggcgtttatacataccggaagtaaatatctcggcaatcatccgttggcgggtaagaatatccggctctttgcgcaccgcatggcaaacacgcaatgcttcgtaagttatttgctgatgaaattccggataaatcgtaattttgtcggcataatttcgatttaatttctccagcaggcgggtaatcttaatatagtgacgttgataattaaggtttttattcccttgtctatgcaaccgactcactgacgtattatgcagataatatttatataatgattgctcggtatatcgcgcacgcagcgcattaaacatgaattctgttgtccagacaatatcctgatgatgtaatccggcaataaatttaatgttatttttaacaataacatcgcggcgataaacccccatccagacaacgtgagtccaacggcgcgaagaaagccccatccgcagccagtccgggccggttaatacaccggttgagcgaaggcgatcgctggggatggattgccaggtttctcccgtttcacgaaaagaccagtcagcgttgcactgcgccacgtcgaggtcgtcctctaacgctatggtcatcagcgtttcgtacatggtgggatagacttcatcgtcagcatcgacaaaagcgacatatttgcccgttgccacttcaatcccacgattacgcgccaccgatgcgccagcattcgcctgatgcaacaaacgaacgtgcggatagttttctgcgtaatgctttgctatttcaacagaattatccgttgaaccatcgttaataataatgatttccagagcagtccaggtttgcgtaattaaagattccatacaagtgcggaaatcatcgcccgcattatataacggaataataacactaagtttattggtgctgttcatcataaattaccgacgacctctgaagttatcctgacgttttacaggctttgtattaagaaactattaagcctgtgagatattatttttacaggtgagagagtcacttcagggtagagagataatgagagcagctatataagagatcagcgcaattacgatatctttattacactgacaggattttacatatttaacggattatcctcaggcaaaagggctggaataccagcccttgttcgtgttaatcccaactcagaattactttcccggactggcccgaacgcatagcgtcaaagcccttctggaaatcatcgatagagaaacgatgggtaatgatcggcgagagatccagacctgactgaatcagcgccgccatcttgtaccaggtttcaaacatctcacgaccgtaaatacctttaatgaacaagcctttaaagattactttggtccagtcgatagacatatcggacggtggaatacccagcatcgcaatacgaccgccgtggttcatggtatcgagcatggtacgaaacgctggcggcgcgccggacatttccagaccgacatcaaagccttcggtcatgcccagttcagccatcacatcattaaggttttctttcgcgacgttaaccgcacgggtgatacccattttgcgcgccagctcaaggcggtattcgttaacatcggtgatcaccacattgcgtgcaccaacgtgtttcgccaccgccgcagccataatacctatcggacctgcaccagaaaccagcacatcttcgcccaccagatcgaacgacagcgcggtatgcacggcgttaccgaagggatcaaaaatggaagccaggtcgtcggagatattgtctgggattttgaaggcgttgaacgccgggatcaccagatattcggcgaagcagcccggacggttaacgccgacgccgatcgtgttgcggcacagatgggtacgaccgccacgacagttgcgacagtgaccgcaggtgatatggccttcgccagaaacgcgatcgccgattttgaagcctttcacttcctgaccaatacctaccacttcaccgacatattcatggcctacgaccatcggcaccgggatggttttttgcgaccactcatcccagttatagatgtgaacgtcagtcccgcagatggctgttttacggattttaatcagcagatcgttatgcccgagttccggtacaggaacgtcggtcatccagatgccctcttccgctttcagtttggataacgctttcatctcacatcctcaggcgataacgcccagttgtttaccaatacgcgtgaatgcttctactgcacgcgtaatttgctcaggggtatgcgccgcagacatctgggtacgaatacgcgcctgacctttcggaacgaccggatagaagaaaccggtgacgtaaatgccctctttttgcagctcacgggcaaatttctgcgccactactgcatcgccaagcatgaccggaataatggcatgatcggctcccgccagggtaaagcccgccgccgacatttgctcacggaactggcgcgcgttcgcccacagacggtcacgcagttcgctgcccgcttcgaccatctccagtactttgatggacgcggcaacaatggccggtgccagcgagttggagaacaggtacggacgagaacgctggcgcagccactcaaccacctctttgcgcgccgcggtataaccaccagaagccccgcccagcgctttaccaagtgtgccggtgataatatcgacccggcccatcacatcgcagtattcatgggaaccacgaccgttttcaccgacaaaaccgaccgcgtgggagtcgtctaccatcaccagggcatcgtatttatctgccagatcgcaaacgcccttcaggttggcaatcacgccgtccatcgagaacacaccatcggtggcaatcagcacatgacgcgcaccggcttcacgcgcttctttcagacgagcttcaagctcctgcatatcgttgttggcatagcgatagcgtttagctttacacagacgcacaccatcaataatagacgcgtggttcagtgcgtcggagataatggcgtcttccgcgcccagcagcgtttcaaacaggccaccgttagcatcaaagcaggaagagtagagaatcgcatcttccatccccaggaatgccgccagtttttgttcaagctctttatggctgtcctgagtgccgcaaataaaacgcaccgaagccatgccgaaaccgtgagaatccattcccgcctttgccgccgcaatcagatacggatgattcgccagcccgagatagttattggcacaaaagttaatgacgtggcttccatcagccacagtgatatctgcttgctgcgcagacgtaataatgcgctcttctttaaacaacccttccgcccgtgcggtttccagatcgttggttaactgctgataaaattctccacgcattgcgattctccagacagggcaaattccagcacatattacccaaacttataggtcgcgacgagatgacgcgttaacacttctgcaaaattcaggataaataacgtgtaacttgatgtctctcaacacctacagatagtagaaaaactgtacagttttggctgggcataatgatgattgattttactgcattgatataaaaagaaaaaatgatgccaaagcatcatttttcctatctcagttggtatcaaaacgctacccactaatggagggaaacctattttcttgaaaggaaaattctcagcgcctgcatttttgcccctaaagtgttactcctgaagcagcgaaacaaatcgaaccattttcctctccccagatagtttaggttgaagagatcggggcgtttgtaatagcacatgacaaaaatgccctggtcatcatccacaatgttattatttagtgttattttttgactttccagaactaatttatagaattctttccatttatgctgtgaaccaacaattgcgcccccaataatatatacatgattgccaatcatgaaatcaaaaacctgttgttgagatgtgacagtaagccctttttttatagtaaaaagatgcatcttactttcatcaaatgggaaatcccaaattttcaatcctcgagttacatttggcttacggcaatagccaaaatctatccacgcaacaagaggcgttttcactaagcccatgttgatagctttatttacaaaataggccttaaggttacataccaaaacatactctggtgaccagtactctgggttttttaattgtcgaggctcaagtctatttgtaaacgactcatctttttgaattttttcgatacgacttctgatatatctaaatttcttttttatatcgataacgataaccgttgttggttttccgttgcgaatcgcttcaacccttggtttcaaatcgggagaagtgaaaataatcatctcattttcaagtgcggccagacgctcaaagtaactaaaataaacatcaactgaacgagctagtttttcacggaaccctttattagcagtccaatcccctctaccaatgtcaaaatatgcagtgataattgtggtggatgatttcattactaataagaccattaatataaaaaaagaattatatcataaatattaacagaatgtatactgtatattatccattcaaatgcttccgttatttatcatacatcggaatattgatactaaagcactattcacatgcaaaaccaacatccgccatgaaggactagctaaaagccaaactagtttgttgcaattagcatccttgcacctctatgtaaagggctgaagggattcggatgtgatggtatgattacagacattcgtgtctgagattgtctctgactccataattcgaaggttacagttatgatcatcgttaccggcggcgcgggctttatcggcagcaacatcgttaaagccctgaatgataaaggcatcaccgatattctggtggtggacaacctgaaagacggcaccaagtttgtgaacctggtggatctgaatatcgcagactatatggataaggaagacttcctgatccagattatggctggcgaagagttcggcgatgtcgaagcgattttccacgaaggcgcgtgctcttccaccaccgagtgggacggcaagtatatgatggataacaactatcaatactccaaggagctgctgcactactgcctggagcgtgaaatcccgttcctgtacgcttcttccgcagccacctacggcggacgcacctccgactttattgaatcccgcgagtacgaaaaaccgttgaacgtctacggttactcaaaattcctgtttgatgaatatgttcgccaaatcctgccggaagcgaactcgcagattgttggcttccgctatttcaacgtttatggaccgcgtgaaggccataaaggcagcatggcgagcgtcgctttccatctcaacacccagcttaataacggtgaatcaccgaagctgttcgaaggtagcgagaactttaaacgcgacttcgtctatgttggcgatgtggcagatgtaaacctgtggttcctggaaaatggcgtttccggcatcttcaacctcggcaccggtcgtgcggaatccttccaggctgtagctgatgctacgctggcttatcacaagaaaggccagatcgaatacattccgttcccggataagctgaaaggccgctaccaggcgttcactcaggcagatctgacaaatctgcgcgcggcgggttacgacaaaccgttcaaaaccgttgctgaaggtgtaacggaatacatggcctggctgaatcgcgacgcataagagctctgcatgaaaatactggtgatcggcccgtcttgggttggcgacatgatgatgtcgcaaagtctctatcgcacgctccaggcgcgcttatccccaggcgataatcgatgtgatggcaccggcatggtgccgtccattattatcgcggatgccggaagttaacgaagctatccctatgcctctcggtcacggagcgctggaaatcggcgaacgccgcaaactgggtcatagcctgcgtgaaaagcgctacgaccgcgcctacgtcttacctaactccttcaaatccgcattagtgcctttcttcgcgggtattcctcatcgcaccggctggcgcggcgagatgcgctacggtttactcaacgatgtacgcgtgctcgataaagaagcctggccgctaatggtggaacgctatatagcgctggcctatgacaaaggcattatgcgcacagcacaagatctgccgcagccattgttatggccgcagttgcaggtgagcgaaggtgaaaaatcatatacctgtaatcaattttcgctttcatcagaacgtccgatgattggtttttgcccgggtgcggagtttggtccggcaaaacgctggccacactaccactatgcggagctggcaaagcagctgattgatgaaggttatcaggtggttctgtttggctcggcgaaagatcatgaagcaggcaatgagattcttgccgctttaaataccgagcagcaggcatggtgtcggaacctggcgggggaaacacagcttgatcaagcggttatcctgattgcagcctgtaaagccattgtcactaacgattctggcctgatgcacgttgcggcggcgctcaatcgtccgctggttgccctgtatggtccaagtagcccggacttcacaccgccgctatcccataaagcgcgcgtgatccgtctgattaccggctatcacaaagtgcgtaaaggtgacgctgcggagggttatcaccagagcttgatcgacattactccccagcgcgtactggaagaactcaacgcgctattgttacaagaggaagcctgacggatgcgggttttgatcgttaaaacatcgtcgatgggcgatgttctccatacgttgcccgcactcactgatgcccagcaggcaatcccagggattaagtttgactgggtggtggaagaagggttcgcacagattccttcctggcacgctgccgttgagcgagttattcctgtggcaatacgtcgctggcgtaaagcctggttctcggcccccataaaagctgaacgcaaagcgtttcgtgaagcgctacaagcagagaactatgacgcagttatcgacgctcaggggctggtaaaaagcgcggcactggtgacacgtctggcgcatggcgtaaagcatggattggactggcaaaccgctcgcgaacctttagccagcctgttttacaattgtaagcatcatattgcaaaacagcagcacgccgtagaacgcacccgcgaactgtttgccaaaagtttgggctatagcaaaccgcaaacccagggcgattatgctatcgcacagcattttctgacgaacctgcctacagatgctggcgaatatgccgtatttcttcatgcgacgacccgtgatgataaacactggccggaagaacactggcgagaattgattggtttactggctgattcaggaatacggattaaacttccgtggggcgcgccgcatgaggaagaacgggcgaaacgactggcggaaggatttgcttatgttgaagtattgccgaagatgagtctggaaggcgttgcccgcgtgctggccggggctaaatttgtagtgtcggtggatacggggttaagccatttaacggcggcactggatagacccaatatcacggtttatggaccaaccgatccgggattaattggtgggtatgggaagaatcaagtagagtgtcgttctacaagtatgtctcttgcagatttgccagctcaaaccgtttttcaaaatttaaatcttgaaataataaccaataagttgacatcggagataagatgacctcaacattatttttctctctcgagaaaaaaactggatagcgtactggaacagagctctcgtattcttattcattaccacctattttttgggtgggattacaaggtataaacatcttattgttattcttatgacaataacgacaatcgtctatctctgcaaacggccaaaacactatctctcactatttaaaacatttctttttggtagtgttgccatattaactattgctgcattgctgtcacttcttcaatcccctgatgcaggtgctagcatgaaggaaattttcaaagctattattgagaatactttactatgcacaatagcaataccgatcatattgagagacgagaaaagagaagatgtcgaaaaaatcgttttcttctcatttattagtgcgttgggcttacgctgtttttctgaattgattacctattataaggactatcaacaagggataatgccattcgcagattatagacaccgtagcatttctgactcgatggtctttttattccctgcattgttaaatctctggcttatcaaatcagcaaaataccgcatttcttttgtggttctaagcgttatttttatttttctgatattaggaactttatccagaggggcctggctttccgtgttagtcattggattaatatggattctgatgtttaaacaatggaagttactattagtaggagtaatggttgccatcattgcattgtcggttattttcacacataaggagatgaccgcaaagctaacgtataaacttcaacaaactaatagttcttatcgctatgcaaatggtactcaaggcagcgcactcgatctaatattagaaaatcctgttattggttatggttacggtaacgttgcatataaagatgtctataataaacgtgtcattgattatccagaatggacctttagacaatcaatagggccacataattttgcgctattcatctggtttggcactggtttattagggctggtaagtcttatgatgctatactgtgcaatattgaaagagtgtataaaaaatggcgtcaagaataaatatcgctcaccatataatgcatattatataatcttactatcttttataggttattttgttatccgtggaaacgtagaacaaattgaaccaaatttattaggcgtttacgccggcttattattagcgatgaaaaacaagtaaaaaataaaaaaggctgcataatgcggcctttttatttattcaaaccaattatgaataacctcttcgaatctttgagttacgccatcccaactgtagtgttcaaacacaaagtcctgaccttgctttgcaactgctgttaattcaggattcgctaacgtttttaaaatatcgctgcttatggagtctgcagtcataggttcttttaaatggaatcccgtagtattttctttgacaaattccgtcatccccccacgcgtactcactaaaacaggcttaccagcacccatagcttcaattgccaccatgcaaaatggttcctggaactgggaaggaatgacgactaaatctgccagtgggtaataacaatgcatcttttcaggcggtatgcttcctaacataatgcaacgatccttcaaacgttttgcaatttccctgacattgcgttgatatgcacctttgtcacttttactcatttctgtataatcaccaatcacaactaattttaaatttttgtgagcagcggccaatttttcgaatgattgcatcaacagcaatatgcctttgtcagggacgatacgcccagcataaaaaataattttctcttcaggggagatattaagttcgcttctagtgatcggctgaaaattagattgataggtttctaaatcaattccatttggtacaatctcaatatctgcatttgctaaataagattggtaatactttttcaagtataaactaggcactatcattttaacattttgctcaagcaattttggttcaaatgcattatgcatatgtataaccactcttgcctgaggagctcgcttacgaatttgagtgtatagcttcatgctattatgaactacaataacactttctttcgttataggaaaatcatgtgcaatattcaatattctctgtgaatatggaagaggatcaagtcttgtccatttttgaaataaccgcttatatatgcgactgaatccaaccctatgaatactacaattatcattaacaaaggtgtaatttgagtatcctggatttttgatacaaacaatacgatttggaaaattggtacgctgagcaacctgatacatccacgtttcaacagcagccgctccgcgaggaggaattgaaaaaataggagtaaccgtaaatattattttatcaaccatctcgtatattaacctttcataacattatatttaattgctgtaaaaacaccatcgagaaattttttctggtaaagcaagtgtttatatttttctttgtactcatgttttttaacagcttttttataaggtatatttctccatggtgatatattataaatattacgaaaataatctgcagaggcgtagttcgcccaatcatgccatggcttagttataccagtataatgtatgaaaacagtgtcatcattaataaaccgggtgtaatattcactatttttttcttcaaattctgactttatagtataaatacaattatattttctcggtaatattttagcatgatgtagaaacattaagtttaaaatatcttgatccgggtactttaatttttttataattgactcatctgataatagatcaaagaatttttccgttagtctttgttttaaccattcccgtaaattaatatacattacaccagagttaaaatagctaccgttaaaatcctcattacacaaacgctcagcgcttttactttgcatagcatctacatcaattaccactgccccatattcatctttaaactctaatgctattaactcgttcaatgaacccttacagacgatatcagcatcaagatataataatgaatccaatcgcgcagaaaaataatcaaatgaaagcaaacgataataaatagatactggccagatatttgattgaggtagcgccttcaatggctcagaatcaatatgatataatttaattactgtttgatacttcgttgctaattgtgataataattcaatatactctttgtctaagtaatcagcgattatgtgaaaggtaaatttgttttgtttattattttcaagaattgaagcaattgaaatcgcagccccaacctggtagttctcatcaataccccatgagacattaaacgtttcccgttcatcaagtttaacggggcgcttgtccagttcaattatatctttaaattgagtaagatgtttaaaatccaatttaattacccttcatcataatcattatttgctctttaatcctagtttgacttttacatccctgattacttttttaattttctttttgaatataagatatgtatagccaaagtctttcaattcattttttatattatagtgccgttcaagatcaatgcgatcttttgcttttaaaacagcggttgtttttttacctgaaaggtcaattagtcttaaacctttttcggatactataaaatttcctttatgaggatcgccagacaccattccatgctgatgcaactcttttatcgattctgataattgatccttcagatcttcagaaatttccaaatactcatttaacccgacaccttcaatatactcaatgagcataatataataatgagcgaaatttaatgttttacgttcagctagcaaaaaatagtcattaattgattggatgccttcaccacgtacccgatcggtttgataaattaaattttcataataatctttttttatgcaagattttaagaaacgttcggtcattttatgctttggcgcataaactttaagtacaagaggtccacgagcagtgtcaataagaatgactttagtatcatcaatcgaacgaaaaacttttaatgttttaaccctgcaagttaaaaagtcatttagaacttgctcataaaagggatcattatcttttatgaaaactttcaacccatttatcgntttattatatatcataatgaattantttaaccttaaatctttagaagcatttttcttnataatactttaaataattaaaaatgcctgccatataatgcttttgtttaaatttatgttttgcacaataccgatactgattgctatttacaggtttaagtaaatcttctttactccacggagaagctgctttggcgatcaaaaaactacgtgacaccggatagtcagcccactcatgccagggttttgtaggtcccacatagtgtataaacacggtgtcatcattgactggattatcaactttgtcttttaattcatagttaatactatatcgggtattatatttctccgaaataaacttcactttaccattcaataatacattcagtacatcttgatcaaggtgggtgattttacttacccaatctgggtcacgcaacatttcaatagcttttgacgaaatgttatttagattccactcatcaatatttatcagtaaaaaaccagcattgaaatatccagaagctaactgtggtgtagttaataccgaggctcgattttgccaccattcaacatctctttcagctacaactgcggcaatttcattagtagaaaattgataatctaagagttctttaatactacccttgcaagcaatatctgcatcaagatatagtattttttcatgtttatgatagaaataatctgcaattataaatcgaaaatatgttgcgtaagtccagtttttcgtgcttggtaatgacttcagcttatcacaattgataacataaatattaattcttgaattatattgttttgctaaatcagaaaaatataatttgtctttatcactgatataatctgtgaaaacatgaaattcacaagagatttctctattgtttaatagaatagatgcgatggctacaccacatccaaaaagaaaatttctgtcaataccaaatgctatatcaagagtatttttagatcttatattttgataatgaaaattatactcaaaaaggatgatgtcactatcattgagttgagacatatttattctgtatccaaaattttggcaaaaataagttacgggttacaacgattttcgaatcgttctttccctgatttttgtggcttttgcttctgcttgcgacagcagtccttgttcctgcttgagaatgtctttaagcggggcggcaaaatacactttcataaaccgccagatatcccgctgagtcaggccgatattcatcgaagaaaaataaagcccaataagatctttatcccgccaacgacgtggaacgcgcgtgcgaagctgcgcccggtgcaggtcaattaccgaaatttttaactcctcttccttaccggaaaaaggcaagtgcagcaggaaatgacagatataacagtcacggtggttaatgcccgcagcatgcatatcgcgcaccatcgtcgcgacacgcttaataagcatacgctttacgcgaacatctggagggttagtcgcccagtcagcactgtaatcttcaagacttatggttggtgtcagatcttcggtaataataaatgaagttctggtcagcggattcatgcctttttcgccaaatgccaccccatacatagtatcaacgccgacatcccgcagtcgatgaatcgcattccattcgcggtcagcgcctaatactggcatccgcaatgagagtaaatttttgattatctctttcagggtcgtgccgcgatgccatttgagaaaatagcttttgcccgccatttcaaagcgcagagtacggcgagtttccagttcacgaaatacctcaccctgcaaggttttaacttcctcaaaaggatctttgccgcgccataacgtggcaaacggctctttaagttcaaccatccagaccacccgttatgatatccgccgctttctctggcagactgtataaatcttgtgtatcagcataatgtcgcgcattttccgcccaggcctggcgcaatgaagattgcgttaacgctttgcgtaaaatctcattcaatgtttcctggcggaatggctcagcaatagcctcgccgcaattagcgtcgacaatataatgcgcatagccacaaacggctgttgttagtaccggtaatcctgcagtaatcgcttccagcagcacaattcccgccgcttcctggtaggcaggatgcagtaataaatccgccgccgccattaattccgagacatcattgcgccccgagaaaaagtgaacattactgcgcacgccgcgtttttctgccagcgcctcaaattttcgcggtttatcctgcccaacaacatatagcaatgtgttgtggcgcagcgaatccggtaacgaagcaagtgcttcaatggaacgatcgacacctttacgcgtgaagtctgaaccgacctgcaacaataaatattgttgttcggttattccattcttcttacggaagatttcacggctattggctggctgctggctatatttacgatcaggataaatccccggtggcagaatatgaaaacgctccgcttcagtctgataatgtttctggaaatcggcgatttgcttatctgtcagcatcagcagctgtgtcggcttgccctgttcgaaggttgcccgctcaaaggcggcataatggcgataacgtgacgtcaggcgatagaaaaagcctttttcctgcgctactttctcggcataacaaacatcagcggcataataaacgtccagccccggcattttgttgaatccaacgactttatcgacgggatgttcgcgtaaatgtttttgcacccaggcaaaatactccgcattgcgcccgtgattggtatgcgatttaaccggcactttgatcagttcaaatacatcagggcattcgccttcccacgactgggtataaacccgaacatgatgacctcgggcggcgactgtctgagcaatacgcataaaatcacgctgcaaaccgccaaagggaaaatatttatataaacaaaaagcaacgatcataacgacgtacctgtcgtggaggagggcagtaatttatcgacagcagcaatgacatctgccgccggaataaccgaaagatacatctcatttcggtcacgctgatcgcgcgttggcatttcccggtaatctcccgcccagaattgaatcatgttatttgaccagggacgccagaaaatatgatctgtcgcaccaaacagcgatatcagcggcgtattaactgcagcggcaatatgcgccggtgcggaatcaacgccaataaacagctgcgcatgatcgattaacgcaccaagttccgggaaggtcacctttccagccagcgccgttactggtggcgtctggcatccctgcgcaatttcattgacgcaggccagatcgtctttatctgggccggacgtcagaacgacttcataaccacgagcatgtaaggcatcaatcacagcggaaaacttggcgttgtcccagcatttgaagatttgccgcgccgtaggttggataaccacataattttgtccaacaccagcgtgatcaagttcgcgacgcatacgtttccagcttgcaggcgggtaactcatggttgtctgcttcaccaacgaatcaagtcccaatggtgtcagcacggataagttactttccaccacatttccaccctgcaacggcaccaaatgggtgaaacttttacgccaaaaagcagactgccgatgatgataatcctgggaaattttcacacgagcatttaataagcgaaccagtatagcaaccatccattgatcggtaagattgacgataaggtcatacttattggcacgtaataccttgatgagatgaaaaaagttggcaattttttctgaggcttttgcttttttattttttatgccgtagagcgcgttaatctctggattttcagacaggatcgggatggtgtcctgataaagcagcacatcgatttttgcgtcagggtaattttttttcagcgaactaatgacgggagtagttaataacatatccccatgaaaacgcatcttaatgagcaaaattcttcgaaatggcttatccacaagtaactctttttgttgagattatccgattaaggtgaagcagaaaaagcacgctaccgccccaggctcaacagctacctgaatactgataccgcactgatattgacgcgctagtgtatcacttctttcgcggcaatccgacccgaatgatttttaagcacattgttgattttcaataaagaaatcaatcaaataaaatcattagcaaccatattctttcactgttgctctgcgattccttcctgcacgtacagcagaaatcaatgaatcgcataaaatacaaaaaaagtatagatgttcagcaagaattggcgggtaaattgctatttaagtcaaaaacgggaaaagtaatggtaaagccacagctaaatacatagaatccccagcacatccataagtcagctatttactatgctcgaattgctttacaccgcccttctctaccttattcagccgctgatctggatacggctctgggtgcgcggacgtaaggctccggcctatcgaaaacgctggggtgaacgttacggtttttaccgccatccgctaaaaccaggcggcattatgctgcactccgtctccgtcggtgaaactctggcggcgatcccgttggtgcgcgcgctgcgtcatcgttatcctgatttaccgattaccgttacaaccatgacgccaaccggttcggagcgcgtacaatcggctttcgggaaggatgttcagcacgtttatctgccgtatgacctgcccgatgcactcaaccgtttcctgaataaagtcgaccctaaactggtgttgattatggaaaccgaactatggcctaacctgattgcggcgctacataaacgtaaaattccgctggtgatcgctaacgcgcgactctctgcccgctcggccgcaggttatgccaaactgggtaaattcgtccgccgcttgctgcgtcgtattacgctgattgctgcgcaaaatgaagaagatggtgcacgttttgtggcgctgggcgcaaaaaataaccaggtaaccgttaccggtagcctgaaattcgatatttctgtaacgccgcagttggctgctaaagccgtgacgctacgccgccaatgggcaccacaccgcccggtatgggttgccaccagcactcacgaaggtgaagagagcgtggtcattgccgcacatcaggcattgttacagcaattcccgaatttattgctcatcctggtaccccgtcatccagaacgcttcccggatgcgattaaccttgtccgccaggctggactaagctatatcacacgctcttcaggggaagtcccctccaccagcacgcaggttgtagttggcgatacgatgggcgagttgatgttactgtacggcattgccgatctcgcctttgttggcggttcactggttgaacgtggtgggcataatccgctggaagctgccgcacacgctattccggtattgatggggccgcatacttttaactttaaagacatttgcgcgcggctggagcaggcaagcgggctgattaccgttaccgatgccactacgcttgcaaaagaggtgtcctctttactcaccgacgccgattaccgtagtttctatggccgtcatgccgttgaagtactgtatcaaaaccagggcgcgctacagcgtctgcttcaactgctggaaccttacctgccaccgaaaacgcattgaggttgttatgcaaaaacgggcgatttatccgggtactttcgatcccattaccaatggtcatatcgatatcgtgacgcgcgccacgcaaatgttcgatcacgttattctggcgattgccgccagccccagtaaaaaaccgatgtttaccctggaagagcgtgtggcgctggcacagcaggcaaccgcgcatctggggaacgtggaagtggtcgggtttagtgatttgatggcgaacttcgcccgtaatcaacacgctacggtgctgattcgtggcctgcgtgcggtggcggattttgaatatgaaatgcagctggcgcatatgaatcgccacttaatgccggaactggaaagtgtgtttctgatgccgtcgaaagagtggtcgtttatctcttcatcgttggtgaaagaggtggcgcgccatcagggcgatgtcacccatttcctgccggagaatgtccatcaggcgctgatggcgaagttagcgtagcgtttatgccggatggtatgccatccggcgcgcatgaattacttctggcactgccgacaataaaacgttgcccgctgcgcatgtttagtcgccacaatcggcgtaccgcacacccgacacggctcgccttttcgcccgtaaacctgcaattcctgagcgaaatagcccggtttaccatcactttgcagaaaatctttcagcgttgtaccaccctgctcaatcgaacgcagcaacaccgctttaatcacccgagctaacaattcacactctgccagcgacagtgatgacgccagccgatccggatggatccccgccgcaaacagtgattcgctggcatagatattccctacccctaccaccagcttgttatccatcagccacggtttaatcgccgtttttttcttcgcgcacttctgatgcagatactcaccattgaaatcgtcgctaagcggctccggtccaagatgggtcagcacattatgcccttccagctctttggtccacagccaggcaccaaagcggcgcggatcggtgtagcgcagcactttgccgttgctcatcaccaattccacatggtcatgcttttcagggggaagttcttctggaaggatgcgcaggctgccagacatccctaaatgaatgataatccagccctcaggcagctccagcagcagatatttagcccgccgctgcacgctaagcactggttggtcgcttaaacggtagatctcttctgaaaccggccagcgcaagcgtccgttgcgcaccactgcatgaagaatggttgcaccaacgagatgcggttctatgccgcggcggctggtttcaacttcgggtaattcaggcatagcatctccaggaatgaacagatgcagtcaatatgggggcaagcagataacaaaaaaccccgccggagcgaggttttttgttacatcaaagcgagaattatttgattttcgcttctttgtagatcacgtgctggcgaacaactggatcgaattttttcagttccagtttttccggcttagtacgtttgttcttcgtagtggtatagaagtgaccagtaccagcagaagaaaccagcttgattttctcacgaatacctttagccatgatttatttcctctaagtacttagtacttttcgccacgggcacgcagttcagccagaactgtatcgatgccttttttatcgattacacgcatacctttagcagatacgcgcagggtgacaaaacgcttctcgctctcaacccagaaacggtgagagtgcaggttcggcaggaaacggcgtttagtcgcgttcagtgcgtgggaacggttgttaccggtcaccggacgcttgccagtaacttggcagactcgggacatgtctattctccaaaaatcaaattagctcgagcttcgtatggggtattggcgcctcgtcaggctttacagcccggtcatcgcagttctatgtgaactctcgattgccaggcccaaatgccaaacccgagattctcaaaggtggcgtagtatacgctgactcagcgatgtgctcaagtcccgaacagacaaagatcccgaaggatcgcgcatagcgggttaaatccagccgcgttcggcaaaagaaacatactctccacgcccaatcacgatatggtcgagcacgcgtaaatccatgaactgacaactctttattatccgttcagtaatgagtttatccgctttactgggttcagcacaacccgaagggtgattatgtgcaaggatcagcgccgaggcgtttatttttatcgcttcgcggataatttcccgaggatggacttcaacatggtttagcgtgccggaaaaaagacggctatgcgttataacccggtgttgggagtcgagaaagatcaccataaagatctcccgctcctcacccgtgagctggctttgtaaaaattccctcgtcatctccgggctgagtaaagggctttcttcacgcatccgcacgttgtagtaacgccgcgccagttcagcaatcccctttaactgggcaaatttcgccacgccaattccatgaacgccactaaattgttcatattcagaggttaacaagccataaagagagccgaaattctccagcatctcttttgccagggttaatacatctttaccgcgcgttccggtacgcagaaatagcgccagcagctcgacatccgttaaggcgctaataccaaacttcagcattttttcgcgcggcatcaacagctgtgaattgtttttcaccttcacctcctttgtggtgctcgcatcctgtcatagccgtttcgttaaatcgacggccagttttcaatcctggaaagcgcctcgcaaagtgaatctcaggtgaaggcacgacaacaaaagtattgtgataaaatcgccaacttctggtgtcaccctacaggaaaaatcatcatgagcctggccggtaaaaaaatcgttctcggcgttagcggcggtattgctgcctataaaacccctgaactggtgcgtcgtttgcgcgatcgcggggccgacgtccgcgtagccatgaccgaagcggcaaaagcctttatcaccccacttagcttgcaggcggtttctggttatcccgtttccgacagtctgctggacccggcagccgaagccgctatgggccatattgagctgggtaaatgggctgatttagtgattctcgcccctgccacggcagatttgattgcccgtattgctgccggaatggcgaatgacctggtatcgacgatttgtctggctacacctgcgcctgtagccgtgctccccgccatgaaccagcagatgtaccgtgccgctgccacgcagcataatttagaggtgcttgcttcccgtggtatgctcatctgggggccagacagtggcagtcaggcttgtggtgatatcggtcctgggcgaatgctcgatccgttaaccattgtggatatggcggtggcgcatttttcgcccgtcaacgacctgaaacatctgaacattatgattaccgccggcccgacgcgtgaaccgctcgatccggtgcgttatatctctaatcacagctccggcaagatgggttttgctatcgccgccgccgctgcccgtcgtggcgcgaacgtcacgctggtatcaggtccggtttcactaccgacgccaccgtttgttaaacgtgttgatgtgatgactgcgctggaaatggaagccgccgtgaatgcttctgtacagcagcaaaatatttttatcggttgcgccgccgtggcggattatcgcgcagctaccgtggccccagagaaaatcaaaaagcaggccacgcagggtgatgaattaacaataaaaatggttaaaaaccccgatatcgtcgcaggcgttgccgcactaaaagaccatcgaccctacgtcgttggatttgccgccgaaacaaataatgtggaagaatacgcccggcaaaaacgtatccgtaaaaaccttgatctgatctgcgcgaacgatgtttcccagccaactcaaggatttaacagcgacaacaacgcattacaccttttctggcaggacggagataaagtcttaccgcttgagcgcaaagagctccttggccaattattactcgacgagatcgtgacccgttatgatgaaaaaaatcgacgttaagattctggacccgcgcgttgggaaggaatttccgctcccgacttatgccacctctggctctgccggacttgacctgcgtgcctgtctcgacgacgccgtagaactggctccgggtgacactacgctggttccgaccgggctggcgattcatattgccgatccttcactggcggcaatgatgctgccgcgctccggattgggacataagcacggtatcgtgcttggtaacctggtaggattgatcgattccgactatcagggccagttgatgatttccgtgtggaaccgtggtcaggacagcttcaccattcaacctggcgaacgcatcgcccagatgatttttgttccggtagtacaggctgaatttaatctggtggaagatttcgacgccaccgaccgcggtgaaggcggctttggtcactctggtcgtcagtaacacatacgcatccgaataacgtcataacatagccgcaaacatttcgtttgcggtcatagcgtgggtgccgcctggcaagtgcttattttcaggggtattttgtaacatggcagaaaaacaaactgcgaaaaggaaccgtcgcgaggaaatacttcagtctctggcgctgatgctggaatccagcgatggaagccaacgtatcacgacggcaaaactggccgcctctgtcggcgtttccgaagcggcactgtatcgccacttccccagtaagacccgcatgttcgatagcctgattgagtttatcgaagatagcctgattactcgcatcaacctgattctgaaagatgagaaagacaccacagcgcgcctgcgtctgattgtgttgctgcttctcggttttggtgagcgtaatcctggcctgacccgcatcctcactggtcatgcgctgatgtttgaacaggatcgcctgcaagggcgtatcaaccagctgttcgagcgtattgaagcgcagctgcgccaggtattgcgtgaaaagagaatgcgtgagggtgaaggttacaccaccgatgaaaccctgctggcaagccagatcctggccttctgtgaaggtatgctgtcacgttttgtccgcagcgaatttaaataccgcccgacggatgattttgacgcccgctggccgctaattgccgcgcagttgcagtaatatgacgccggatgacttttcatccggcgagtttctttaaacgccaaactcttcgcgataggccttaaccgccgccagatgttccgccatttccggcttctcttccagataggcaatcagatctttcagggtgatgatagagatcactttgcagttgtaatcacgctcaacttcctgaatcgccgaaatctcgccgcgcccccgttcctgacgatcaagcgaaatcaatacgccagcaagcgtcgcgccattagcctgaataatctccatcgattcgcgaatcgccgttccggcggtgatcacatcatctaccagcattacgcgtccttgtaacgcgctaccaaccagattgccgccttcaccgtggtcttttgcctctttgcggttaaagcagtacggcaggtcaaggtcatgatgctccgccagcgccacggcggtagtggtcgcaatcgggatccctttgtaagcagggccaaacagcagatcgaactcaatgccagaatccaccaatgcttcagcgtaaaaacggcctaacagtgccaggtcgcgcccggtattaaacagcccggcgttgaagaaataggggcttttgcgcccggatttcagcgtaaactcgccaaactttaacacctgcttgctaagcgcaaattcaataaactggcgctgatatggtttcatgccttcgctcctcatcttacttttctacagacaaaaaaaaggcgactcatcagtcgccttaaaaatcagtttgccagcgccgccttctgcgtcgctacaatggattcgattccccctcgggccagcgccaacaaggtgagtagctcttcatgggtgaacggctcgccttctgccgtcccctgcacttcaatgatgcgcccgtcttcggtcatcactacgttcatgtcggtctctgcggctgagtcttcaacgtattccagatcgcaaattgcttcaccgtttacaataccgacagaaactgcggctaccatcctttcatcgggttggttttcagcttgccgttttccaccagcttctgtagcgcatctgccagcgccacgcaggcacccgtaatcgacgcggtacgcgtgccaccatcagcctgaagcacgtcgcagtccagcgtaatggtgaactcacccagcgctttcaaatctactgccgcgcgaagagcacgggcgatcagacgctggatttccattgtgcgtccaccctgcttacctttcgccgcttcacgagcgttacgggtgtgggtagaacgtggcagcatgccgtactctgcggtgatccagccctggccctgacctttcaggaagcgcggcacgccttcttcaatagaggcggtacacaacactttggtatcgccaaattcgaccagcaccgagccttctgcatgttttgtatagttacgagtcagggtaacgggacgcacctgattattgctacggcctgctggacgcatattgaaatctccggcttgaaacaaatgtggctgcgcattatacggacttccggcggttattcctatcctgacaaggcatcgatggctataatccttccacctctccttttataaacaggaacgtctatgatccgcagtatgaccgcctacgcccggcgtgaaatcaagggtgaatgggggagcgcaacctgggaaatgcgctcggtaaaccagcgttatctggaaacttactttcgtctgccggagcagttccgtagccttgaacctgtcgttcgcgagcgtattcgttctcgcctgacgcgcggtaaagtggaatgtaccctgcgctatgagccagatgttagcgcgcaaggtgagctgatcctcaacgaaaaactggctaaacagctggtaactgccgcgaactgggtaaaaatgcagagtgacgaaggggaaatcaacccggttgatattctacgctggccgggcgtgatggcagcccaggagcaggatctcgacgcgattgccgctgaaattctcgcggcgttggatggtacgctggacgactttatcgtcgcgcgcgaaaccgaaggtcaggcgctgaaagcattgatcgagcagcgtctggaaggcgtcaccgccgaagtggtcaaagtccgcgcccatatgccggaaatcctgcaatggcagcgtgagcgtctggtcgcgaagctggaagatgctcaggttcagttggaaaacaaccgtctggagcaggagctggttctgctggcacaacgaattgacgttgccgaagaactggaccgcctggaagcgcatgtcaaagagacctacaacattctgaagaaaaaagaagccgttggtcgtcgtctggactttatgatgcaggaattcaaccgcgagtcgaacactcttgcgtcgaagtctatcaatgccgaagtgacaaactccgcgattgagctgaaagtgttgattgagcagatgcgcgagcagattcagaacattgaataactcgtaacgccaattcttacttttcagccttcacaaatgccgcccactcaaacagagcggcatttttcttccccgcaacttcaattctgttttgcgtgcctgctccagattttgcgatgtttttttgcccagcacactgagaacgtgagatactcacaactgtatataaatacagttacagatttactttctttgcaatcgatatcacatggagtgggcaatgaacgaacatcatcaaccttttgaagaaatacggcattatggcactgaagggcaagaattttggtcagctagagaattggcaccgttactggattatcgggactggcgcaattttcaaaaggtactggcccgcgcgactcaagcgtgcgaagccagcaatcaagctgcatctgaccatttcgttgaaaccaccaaaatggttgtattaggttcaggggctcaacgagaacttgaagatgttcatctctcccgctatgcctgttacctggtagtacaaaacggcgaccctgcgaaaccggttattgcggcagggcaaacttattttgctatccagacccgacggcaggagctggctgacgatgaagctttcaggcaacttcgtgaagacgaaaagcgtctttttctgagaaatgaattgaaagaacataacaaacaattggttgaggcagcgcagcaagctggggtagcgacagctatcgatttcgccatatttcagaatcatggttaccgggggctgtatggtggattagatcagaaagccatccatcagcggaaggggctgaaaaagagtcagaagatcctggatcatatgggttcaacagaactggcggctaatctctttcgagctacccaaacagaagaaaaactcaagcgggatggcgtgaattcaaaacagcaagctaataccacacactttgacgtgggtagcaaggtgaggcaaaccattcaggaacttggcggaaccatgcctgaggagttgccgaccccgcaggtcagcatcaagcagttggaaaacagtgtaaaaattacagagaagaaatagcagaaactaaaaactctttttgttgattgagatacccgatgcgtaagccaaagtccaggtgcggtgaacacaatggctaaacattgcacctttcttttccacccctcaattttaacctattttttcttatgcattttctcagacaagaagtcagaagaatgcatctacgctacagaaaatagcgatttcacataactacaagttatcaatttcccctcaccttaaaaaatctcaatcgtgacaatgcgcacaaatcgctaccctgccagacagatttttagggagagaaccatgctgttacacattttgtatttggttggcattactgccgaagccatgacgggggcgctggcggccggacgacggcgcatggatacatttggcgtaattattattgcgaccgccaccgcaattggcggagggtcagtgcgcgatattctgctgggccactatccgctcggctgggtcaaacacccggaatatgtgattatcgtcgctaccgccgcagtactcaccactatcgttgctcctgtaatgccttacctgcgcaaagtgtttctggtgctcgatgcgctcggactggtggtcttttctatcatcggggcacaggttgcactggatatggggcacggcccaattattgccgttgtcgcggcggtaaccaccggcgtgtttggcggcgttttgcgcgatatgttctgtaaacgtatcccactggtattccagaaagagttgtatgccggtgtctcatttgcctccgccgtgctgtacatcgcgctgcaacactatgtttctaaccatgatgtggtaattatctccaccctggtattcggcttttttgcccgcttactggcgctacgccttaagctgggattaccggtcttttactacagccacgaaggacactaaggttcaaaacctgtgatctgctgggcagccagccaactgcccagcttcttgatttgcgcattttccttccattcaataacctgtctggcgcgccccgatccagtccccggcagctgctgccagaactgctccgtgctaaataaaagttgcgaccaggaccgttcatcactggcattaagcgccgcccgggttagcggtattcccattgccatcacccagcgagtaaaaggctgcttacgagccagattaaactgatgccatagctgcgcacttttacttttcgcgatccccggcgtgttctgtaattgctctggcgttaataaaagccaggaaaagatatgctcaaagcgatgagtctgatgcagcgcgcgccagccggcctcaccaatgccatccagccccagaacctgttttgaccccagccagactaagcgtgaaatgaactgttcctgacaaacatcagaagcaaagtagcaggtcaacgagttaaagcggttttctggtggtgtcggttttgtacgttctgcaccgcgccagaccacatcatcaatgcgaggaataccctgaccggcaaggctgacgaggatctgatcaccaggcgcaatatcccactcctgccagcgcctgacggaaccaatattcacccgctggacttttttatcatccagcatgacaggtgcgagtgacgcaaccaccgatattttaccgctcttacccaccgcaaactgaatcgccttcacttcggcaacctgagctacaggttgatatttccaggccaccagccattctgcctggcctggtagccaatggcgggattcgggttctttcgcccctcgcacaaccacgccatcggtgacgaagggtaatttcgctttccaccactcattgcgtacgcgcgcaacctcatcagcatttttaaccgcacgggtatacctctgcgttagagtaaaacctgcggtagccagctcctttaaacgatcggtcattaactgcggtccatccggccatgcccagacaaaaacgcccagagaattcagcgtgtcgctatcgtcctggcgcatcatcaggccagcaacttttgcgcgggcatttattccccccatttgttgttggatatgcccctcgcgctggagaaatatttccccctgaagcgtactgttggctaaaggcccgctaacggtttgcggcacagcggaaattaagctaactttctgcgtccagtcctcgcctttcaggccattaccgcgactgattgctttgttcagtttcccgtcccgataaaccagggttaccgcaacgccatcaacttttggctgcacccaaagatcgctacgttctcgcatccacagacttaatgcgtttttatccaccattttgcgtacacccgtatgggcaaccggatgcataaccgcaccatttaaaggcggcatcatcacgtcgcggggctcgctcccaaagcagcgttgccactgcgtaagacgggcgcttaactgatcgtaaacaccgtcttccacctcactttttccttccttccagtagtcatcgtcccactgttttatttgctgttgcaggcgggaaatttcttcctgtgctctggctggcgaccaggccggacagaccgcccacacagatgattgccagcacaagatacttattaatatcgccatccatactttcatcttcacctccgctgtagtcaggctggcagatatacaacgtggtgaaggcaaagccgagtggcaaaaacggagtctgcgaggacgcttcctgagaatcgtctttattgcagtaaatcacaggcaaatgcggaaacagctacgcaaaacgcaacaactttgcgcaaaaagtgtgagcaagggctacgtcacatggccgcgccgtgtataataagctcgtatgtaggctttatttcgctaatcacatacgaaagatactcatggctcaaggcacgctttatattgtttctgcccccagtggcgcgggtaaatccagcctgattcaggctttattaaaaacccaaccgttgtatgacacccaggtttctgtttcacacaccacacgccaaccgcgtcctggtgaagtccacggtgaacattatttctttgttaatcatgatgaatttaaagaaatgattagcagagatgcgttcctcgaacacgcagaagtttttggtaattactatggcacttcgcgtgaggccattgagcaagtactggcgaccggtgtcgatgtttttctcgatatcgactggcagggcgcgcagcaaattcgccagaaaatgccgcacgcgcggagtatctttattttaccgccgtccaaaattgaactggaccgccgtctacgcggtcgcggtcaggacagcgaagaggtcattgcaaagcgtatggcgcaagctgttgcagaaatgagccattacgccgaatatgattatctgattgtgaatgatgacttcgataccgcgttgaccgatttgaagaccattattcgcgccgaacgtctgcgcatgagccgccaaaagcagcgtcatgacgctttaatcagcaaattgttggcagactgaacctgatttcagtatcatgcccagtcatttcttcacctgtggagctttttaagtatggcacgcgtaactgttcaggacgctgtagagaaaattggtaaccgttttgacctggtactggtcgccgcgcgtcgcgctcgtcagatgcaggtaggcggaaaggatccgctggtaccggaagaaaacgataaaaccactgtaatcgcgctgcgcgaaatcgaagaaggtctgatcaacaaccagatcctcgacgttcgcgaacgccaggaacagcaagagcaggaagccgctgaattacaagccgttaccgctattgctgaaggtcgtcgttaatcacaaagcgggtcgcccttgtatctgtttgaaagcctgaatcaactgattcaaacctacctgccggaagaccaaatcaagcgtctgcggcaggcgtatctcgttgcacgtgatgctcacgaggggcaaacacgttcaagcggtgaaccctatatcacgcacccggtagcggttgcctgcattctggccgagatgaaactcgactatgaaacgctgatggcggcgctgctgcatgacgtgattgaagatactcccgccacctaccaggatatggaacagctttttggtaaaagcgtcgccgagctggtagagggggtgtcgaaacttgataaactcaagttccgcgataagaaagaggcgcaggccgaaaactttcgcaagatgattatggcgatggtgcaggatatccgcgtcatcctcatcaaacttgccgaccgtacccacaacatgcgcacgctgggctcacttcgcccggacaaacgtcgccgcatcgcccgtgaaactctcgaaatttatagcccgctggcgcaccgtttaggtatccaccacattaaaaccgaactcgaagagctgggttttgaggcgctgtatcccaatcgttaccgcgtaattaaagaagtggtgaaagccgcgcgcggcaaccgtaaagagatgatccaaaaaatcctctctgaaatcgaagggcgtttgcaggaagcgggaataccgtgccgcgtcagtggtcgcgaaaagcatctttattcgatttactgcaaaatggtgctcaaagagcagcgttttcactcaatcatggacatctacgctttccgcgtgatcgtcaatgattctgacacctgttatcgcgtgctcgggcaaatgcatagcctgtacaagccgcgtccgggtcgcgtgaaagactacatcgccattccaaaagcgaacggctatcagtctttgcacacctcgatgatcggcccgcacggtgtgccggttgaggtccagatccgtaccgaagatatggatcagatggcggagatgggtgttgccgcgcactgggcttataaagagcacggcgaaaccagcaccaccgcgcaaatccgcgcccagcgctggatgcaaagcctgctggagctgcaacagagcgccggtagttcgtttgaatttatcgagagcgttaaatccgatctcttcccggatgagatttacgttttcacaccggaagggcgaattgtcgagctgcctgccggtgcaacgcccgtcgacttcgcttatgcagtgcataccgatatcggtcatgcctgcgtgggcgcacgcgttgaccgccagccttacccgctgtcgcagccgcttaccagcggtcaaaccgttgaaatcattaccgcaccgggcgctcgcccgaatgccgcgtggctgaactttgtcgttagctcaaaagcgcgcgccaaaattcgtcagttgctgaaaaacctcaagcgtgatgattctgtaagcctgggccgtcgtctgctcaaccatgctttgggtggtagccgtaagctgaatgaaatcccgcaggaaaatattcagcgcgagctggatcgcatgaagctggcaacgcttgacgatctgctggcagaaatcggacttggtaacgcaatgagcgtggtggtcgcgaaaaatctgcaacatggggacgcctccattccaccggcaacccaaagccacggacatctgcccattaaaggtgccgatggcgtgctgatcacctttgcgaaatgctgccgccctattcctggcgacccgattatcgcccacgtcagccccggtaaaggtctggtgatccaccatgaatcctgccgtaatatccgtggctaccagaaagagccagagaagtttatggctgtggaatgggataaagagacggcgcaggagttcatcaccgaaatcaaggtggagatgttcaatcatcagggcgcgctggcaaacctgacggcggcaattaacaccacgacttcgaatattcaaagtttgaatacggaagagaaagatggtcgcgtctacagcgcctttattcgtctgaccgcccgtgaccgtgtgcatctggcgaatatcatgcgcaaaatccgcgtgatgccagacgtgattaaagtcacccgaaaccgaaattaatgttttatgaacccaacacgttatgcacgcatctgcgaaatgctcgccaggcggcagcctgatctgaccgtctgcatggagcaggtccacaaacctcataacgtttctgcgattattcgtaccgcagatgccgttggcgtacatgaagttcacgccgtctggcctggtagccgcatgcgcaccatggcttcggcagcggcgggtagtaacagctgggtacaggtgaaaacacaccgcaccattggcgatgccgtcgctcatctcaaaggccggggcatgcagattctggcaacccatctttctgataacgctgtcgatttccgcgaaattgattacactcgcccgacctgcattttgatgggacaggagaaaacgggcatcacgcaggaagcattggccctggcggatcaggacatcatcattccgatgatcggcatggtgcagtcgctgaatgtttccgttgcctcagccctcattctttacgaagcccagcgtcagcggcaaaatgcaggcatgtacctgcgtgaaaacagcatgttgccggaagcagagcaacaacgcctgttgtttgaaggcggctatccggtgctggcgaaagtcgcaaaacgcaaaggcctgccttatccccacgtcaatcagcaaggcgagatcgaagctgatgccgactggtgggctactatgcaggctgcagggtaagtgccatgaaaggtcgcctgttagatgctgtcccactcagttccctaacgggcgttggcgcagcacttagtaacaaactggcgaaaatcaacctgcataccgtgcaggatctactcttacaccttcccctgcgctacgaagatcgcacccatctctaccccatcggagaactactgccgggcgtttatgccacggtggaaggcgaagtgctgaactgcaatatctccttcggcggtcggcggatgatgacctgccagatcagcgacggttccggcatcctcaccatgcgctttttcaatttcagcgcggcaatgaaaaatagcctggcgacgggccgccgtgtactggcttatggcgaagcaaagcgcggtaaatatggtgcggagatgatccacccggaataccgcgtgcagggcgatctcagcacgccagaattacaggaaacgctcacgccggtttatccaacaacggaaggcgtaaagcaggccacgctgcgtaaattaaccgaccaggcgctggatctgctcgacacctgcgccattgaagaactcctgccgccggaactgtcacaaggaatgatgacgctaccggaagcgttgcgcactttgcaccgcccgccaccgacgctacagcttagcgatctggaaaccgggcagcatccggcgcaacgtcgtctgattctggaagaactgctggcgcacaacctcagcatgttagccttacgtgccggagcacagcgttttcatgcccagccgctgagcgccaatgacacgctgaaaaataaactcctcgccgccttaccgttcaagccaacgggcgcacaggcacgcgtagtggcggagatcgagcatgatatggcgctggatgtgccgatgatgcgcctggtacagggcgatgtaggttccggtaaaacgctggtcgccgccctcgccgcgctgcgtgcgattgcccacggcaaacaggtggcactgatggcaccaaccgaattactcgccgagcagcacgccaataacttccgcaactggtttgcaccgctcggtatcaaagtgggctggctcgccggtaagcagaaaggcaaagcgcgactgtctcagcaggaagccatcgccagcggtcaggtgcagatgattgtcggtacacacgccatcttccaggaacaggtgcagtttaacggcctggcgctggtgattatcgacgaacagcatcgttttggcgtgcatcagcgtctggcattgtgggagaaaggccagcagcagggcttccatccgcatcagttgatcatgaccgccacgccgatcccccgcacgctggcaatgacggcgtatgccgatctcgatacctcggtgatagatgagctgccgccaggccgcacgccagtgactacggtcgctattcctgatacccgccgtaccgacatcattgaccgcgtgcgccacgcctgcataactgaaggtcgtcaggcgtactgggtttgtacgttgattgaagagtcagagttactggaagcgcaggcggcggaagctacctgggaagagttgaaactggcgctaccagaattgaatgttggcctggtacacgggcggatgaaaccagccgagaaacaggcggtgatggcgtcgtttaaacaaggtgagctacatctgctggttgccactaccgttattgaagtcggtgttgatgtgcctaacgccagcctgatgattatcgaaaaccctgagcgtctgggtctggcgcagttacaccagctgcgcgggcgcgtaggtcgtggcgcggtggcttctcactgcgtgctgctctacaaaacgccgctttctaaaacggcgcaaattcgcctgcaagtgctgcgcgacagtaacgacggttttgtgattgcgcaaaaagatctggagattcgcggccctggcgaattgttaggcacgcgtcagacgggtaatgctgaatttaaagtggcggatttactgcgcgatcaggcgatgatcccggaagttcagcgcctggcgcgacatattcacgaacgttacccacaacaggcaaaagccttgatagaacgctggatgccggagacagaacgttactcgaatgcgtaaaaggcggcagtgagaagaccgccatttcaggttaccctaccttcctgccggatgcgattcaccctacaaattcaataaattgtgaatcaatgcgcagccttgataagcgaagcgtatcaggcatttgtctttgttgcggcggcacttctaccgccgcttcatcggttaacccgcaaaaatcggcaacattaaatacagcttaatcaccagcgcattgacgatatcgataaagaacgcaccgaccatcggcaccaccaaaaacgccatgtgcgacgggccaaagcgttcagtgatcgcctgcatgttggcgattgccgttggcgttgcaccgaggccaaaaccacagtgacccgcagccagcactgccgcatcgtagtttttgcccatcatgcgccaggtaacgaagatggcatacaacgccatgaagatggtctgtaccaccagaatcgccagcatcggcagcgccagcgaagccagctcccacagtttcagccccatcagcgccatcgccaggaacaacgacaggcttacgttacccagcacggataccgcacgctcaaagacgcggtaaaagcccatcattgacagaccgttgctcagaatcacgccaacaaacagtacacagacgaaggtcggcagttcaaaagcagtgccagccaaaagttgcgcaacaattttccccaccgtcaggcagatagcaatcagcgcgatagtttcaatcagcaccagcgaggtgatcatgcggcccacatccggcttttcaaacgccgtcgggacttcctggtcatccggaataccgttcggcgtggtggagtgtttcaccagatagcgcgccaccggaccgccaatcaagccgcccagcaccagaccgaacgttgcacaggccatcgccacttccgtcgcattggtgaagccataacgttcaatgaacaatttactccacgcagcgcccgtaccgtgaccgccggaaagcgtaatagaaccggccaacagccccatcagcggatcaagccctaacaggctagccataccaatgccaatggcattttgcatcaccaacagaccaacaaccacaatcaagaagatgccaaccacacgcccaccggcacgcaaactggcaatgttggcgttcaggccaatggtggcgaagaaagccagcattaacggatcgcgcagggacatatcaaagttgacttcccagcccatgcttttttcagtactagtagcgccagcgccaccaacaaaccacccgcaacaggttccggtatggtgtatttcttcaaaaaggagacggaatggaccaacttacgcccgagcagcaacgtcagcgttgcggcaacaagcgttgctaaagtatcgagatgaaacatagttactcctttgtatccgcatcactctttcatactcgtcatacttcatcgcgcagtggcaacttcatgaactatgacgggtatcgagttatgctttcctgggtcaaattctcagctgttaatgaacaaatggcatggattttaagcagaaaaataccaaaagttatataaaaaagtgcatttatctcatttaaatatttagatgaggatgtggcaaacgtttgcttttctctttcggtcagctaaaatgcccgctttgctaccacgggattgttttcgatgtctgtttccaccctcgagtcagaaaatgcgcaaccggttgcgcagactcaaaacagcgaactgatttaccgtcttgaagatcgtccgccgcttcctcaaaccctgtttgccgcctgtcagcatctgctggcgatgttcgttgcggtgatcacgccagcgctattaatctgccaggcgctgggtttaccggcacaagacacgcaacacattattagtatgtcgctgtttgcctccggtgtggcatcgattattcaaattaaggcctggggtccggttggctccgggctgttgtctattcagggcaccagcttcaactttgttgccccgctgattatgggcggtaccgcgctgaaaaccggtggtgctgatgttcctaccatgatggcggctttgttcggcacgttgatgctggcaagttgcaccgagatggtgatctcccgcgttctgcatctggcgcgccgcattattacgccgctggtttctggcgttgtggtgatgattatcggcctgtcgctaattcaggttgggttaacgtccattggcggcggttacgcagccatgagcgataacaccttcggcgcaccgaaaaatctgctgctggcaggcgtggtcttagccttaattatcctgcttaaccgtcaacgtaacccttacttacgcgtggcctcactggtgattgcgatggcggccggatatgcgctggcgtggtttatgggcatgttgccagaaagcaacgaaccgatgacgcaagaactgattatggtgccaacgccgctctattacggtcttggcattgaatggagtctgctgctgccgctgatgctggtctttatgatcacttcgctggaaaccattggcgatatcacggcgacctctgacgtttccgaacagccagtgtccggtccgctgtacatgaaacgcctgaaaggtggcgtgctggcaaacggcctgaactcgtttgtttcggcggtgtttaacaccttcccgaactcctgcttcgggcaaaacaacggagtgatccagttgactggtgttgccagccgctatgtcggttttgtcgtcgcgctgatgttgatcgtgctgggtctgttcccggcagtgagcggttttgtacaacacattccagaaccggttctgggcggcgcaacgcttgtaatgtttggcaccatcgccgcctccggtgtgcgtatcgtttctcgtgagccgctgaaccgtcgggcgattctgattatcgcgctgtcgctggcggttggtctgggcgtgtctcagcagccgctgattttgcagtttgcccctgaatggctgaaaaacctgctctcctccgggatcgccgcgggcggtattactgccatcgtgctgaatctgattttcccaccagaaaaacagtaattcactggcggcggtaagataattaccgccgcagtctcacctctttcaccattcccgccttgaggattgcgcgtaaatcgtgcataactcccttatgtgcatttcacgggatggaagaccatgaaatttattgggaagctgcttctctacattctcatcgctctgttagtggtgatcgctggcctctattttcttctgcaaacccgctggggagcagaacatatcagcgcatgggtttccgagaatagcgactatcatctggccttcggggcgatggatcaccgtttttccgcgccatctcatatcgtgctggagaacgtcacgtttggccgtgatggccagcccgcgaccctggtggcaaaaagtgtcgacattgcgctaagcagtcggcaactgaccgaaccacgccatgtcgataccatcctgctggaaaacgggacgctgaatctcaccgaccagaccgcgccgctaccgttcaaagccgatcgtctgcaactgcgtgatatggcgtttaatagcccgaatagcgaatggaaactgagcgcgcagcgggtaaatggcggcgtagttccgtggtcaccaaaagccggtaaagtgctgggtacgaaggcgcagattcagtttagtgccggatcgctttcgctcaatgatgttcctgccaccaatgtactgattgaaggcagtattgataacgatcgcgttacgctgactaacctgggtgccgacatcgcccgcgggacattaaccggaaacgcgcagcgtaacgccgacggcagctggcaagtggaaaacctgcgcatggcggatatacgtctacaaagcgaaaaatcgctaaccgacttctttgcgccattacgctctgtcccgtcgttgcagattggtcgcctggaagtgatcgatgctcgtttgcaaggtccggactgggcggtgaccgacctcgatctcagcttgcgcaacatgaccttcagtaaagatgactggcagacacaggaaggcaaactgtcgatgaacgctagcgagttcatttatggttcgctgcatttatttgacccgattataaacgcggaattttccccgcagggcgtagcgctgcgccagttcaccagccgctgggaagggggtatggtcagaacgtcagggaactggctgcgtgacgggaaaacgttgatccttgatgatgtggcaattgccgggctggaatataccttgccgaaaaactggcaacagttgtggatggaaacgacacccggttggttaaacagcctgcaactgaagagatttagcgccagccgcaatctgatcattgatatcgaccctgacttcccgtggcagctcaccgcgctcgatggttacggtgccaacctgacgctggttaccgatcataaatggggcgtctggagtggctcggcgaatctgaatgccgccgccgcgacattcaatcgtgttgatgttcgtcgcccgtcgctggcgctgaccgccaacagcagcacggtgaatatcagcgaactgagtgcatttactgaaaaaggcattctggaagccaccgccagtgtttcacaaacgccacaacgtcagacacatatcagcctgaatggacgcggtgtgccggtgaatattttgcaacagtggggatggcctaaattaccgttgactggcgacggcaatattcagcttaccgccagtggcgatattcaggccaatgtcccgttgaaacctacggttagcgggcaattgcatgccgtgaacgccgcaaagcagcaagtgactcaaaccatgaatgctggcatcgtttccagcggtgaagttacatcgacggagccggtgcggtaaacatcaatctcgccgggtacgactcagacgtacccggcattccatcaatagattacaacgtaattgtcagcgcattcccttgaggcttcaccaccagcccctgctcactttcagcctgcgaaccgtcttgcagaccatttactttcacaacattgcgcaggcacagcgtccagttcttcgcctcgcccgcaccagtcacagtaatcgtgttgccagtacgtgctgcttttaaagtaaagatcaccgatccgtcagtagcgggcacttcacagacggcttcatgcccgtcttgcagattaaagaggtggaatgccgtgccttcgtgccacacgtaatcgggacgttgatcgttgttgcccagcgccagtagggtgttatcacgcacataaatgggcagactcaggaagctgtgctgctgtttatgccagcgactaccgtcgagctcatcgttgtgccacaggtgtgtccagcgaccttccggcaggtagaactgcacatcgcccgcttcagtgaacaccggcgcaaccatcacgttgtcgcctaacatgtattgacggtcaaggtaatcacaagccggatcgtccgggaactccatcatcatggcccgcatcatcggcgtaccccgcgcgttcgcacgcgcagcttcacgatacagatacggcatcatgcggcatttcagttgcgtgaagaagcgcaccacatcacaggactcatcatcgtaggcccacggcacacgataagatttgctaccgtgtaaacggctatggctggagagcaaaccaaacgcgcaccagcgtttgtaaacgtgcgccggagcggtattttcaaagccgccgatatcgtggctccagaagccaaaacctgaaaggccaatagacaaaccaccgcgcaggctttccgccattgattcgtagttagcgtaacaatcgccaccccagtgtaccgggaatttctgcgcaccgacggaggccgagcgggcaaacaagacagcttcttcctcaccaacggtgtccttgagcacgttccacaccagttcgttgtagatgtacgcataatggttatgcattttctgcggatcggaaccgtcaaaccactgaacatcagttgggatacgttcgccaaagtcggtcttaaagcaatcaacgcccatcgcgaccagacctttcagtttgtcggcgtaccatttgcaggcatccggattggtaaagtcataaatcgccagacctggctgccatttatcccactgccatagcgaaccgtccgggcgtttgagtaaatagcctttctcttgtaactctttaaagacgggggatttttgaccgatataggggttaatccagacgcagattttcagtcctttcgctttcaggcggcggatcatcccttccgggtcagggaaagtcagcgggtcccactcaaaatcgcaccactggaaggctttcatccagaaacagtcaaagtggaaaacatgcagcggcagattgcgttccgccataccatcgataaagctgtttaccgtcgcttcgtcgtagttggtggtaaatgaagtggttagccacaggccgaaggaccacgcgggcggcagcgccggacgaccagtaaagcgggtataacgatcaagtaccgctttcggcgtcgggccgtcgataacaaagtattcgagatattcactctcaacgctgaactgcactttggagactttctccgatcccacttcaaaagagacacactggggatgattgaccagtaccccataaccacggttagtcatgtagaacgggatatttttatacgcctgttcagtacttgtgccgccgtcccggttccaggtctctaccgtctggccattgcgcaccagggcagtaaagcgctctcccagaccgtaaactgtttcgccaacgccaagatcaagccgctcaaacatataattgcgttgattattcgtgtcctgcacgtagccattatttttcacctgactaccggtaatacgttcgccgttgcgcagaaaatccagtgaccagaactcacctttgctgacacgcgcgcttaagttgccacttttaaactcagcataacgttctgtgttttcgattgtgaccttcacgtcctgcaaaatattgagcggataatgaggaccgttattcagcgccccctgaaaatgctcaatccgcacaccgacaataccttcctgtggggagaaaaagcgcaacgtaaataaaggagtatcaagctgccaggtacgttcacgcacatcacggggggcagcatagaccaccatttcattatcctgctgttcaacctcgaacacctgaagcgggtgaatcaaattgaggccaggttgaatcaaccagtttccatcgctaattttcattgccgttccttagttctgcacttcttgagaggtgaattgttgctggcaacggcgtttaccctgagccagctgttccataacggttttcagattgtgcgtcgtgagtgagtagtagcgtttagcgataatcgcgctcagcaaataacagatcgccggaacaatcgtgaatagcgcaataatgatgctaatcgtggcgctgttctgcgctttttctgccgcatcatatccgccataagccagcatccagccgataagagcgccgccgaaggccaaccccagtttgagcacaaacagcgtgccagcaaaactgatcccggtcaggcgtttaccattgcaccactcgccgtagtcgacggtatcggacatcattacccactggataggtgtcaccagttgatgcaacacaccaatcacgaagatgaagacaaacatagtgatgctggcctgcatgggaacaaagaacatcgcgaggctaatcactgccagcagggcgttcgtccaccagaagatagtgactttacatttccagtcggtcagaggttttgccagtgcggaaccaatcaggttacccacgcaataagtggtgagaaaagcgacaaacacttccggcgtgcccaaaatccatgtgacgtaatacatcatcgccccaccgcgtacgcacaccgccaggatattgaaaatggttagtaaaccgacaatccgccactggtcgttttgccagatatcacgtaaatcttcccgcatagacgttgttgtaggtggtgcttcaacgcgttctttagtggtgaagaaacaaaatgccagcatcatgaatgccaccacggaaaggaccgcgataccgccctggaaaccgagtggtttattatcaccgccaattaaattaaccagtggcatcatcagaacagtagaaagcatgcctcccgcggtcgccagcacaaaacgccaggattgcagcgagatacgctgagtcgggtcattggtgattacaccacccaatgcgcagtaagggatattgacgacggtataaagtaaggtaagtagggtgtaagtaattgctgcatagatcattttgccgttcatactgagatctggcgtgctataggccagtacacagacgatcccgaatggcagtgcgccaaacagtacccacggacgaaatttaccccagcgagagcgcgttcgatcggccaacaaccccatgcaaggatcggaaatcgcatccagtgcacgagcgaccaaaaacatggttccgacaaatccggcaggaatgccaaaaatatcggtataaaagaacatcatatataacattacgttatcgaaaataatgtggctggcggcgtctcccatgccataaccaattttctctttaacggacaacacttcactcttcatctgcttttccttgatgctataggggtgctgagaccgataacgcattttgtaaaccatccctgtgagagcgaatattccgatatctggttattaatttatgattcttgttttatgtgatcgtggtagcgttaattccgctcatatatcattgtaaaatatgggttttatatgaactataatgctttcgtgataatacgctgcgtgtattaggcggaaaaaactgatctgggggatgtagaaactcaaggaagtagctataatgcgccccgcctccatgtagcaatcgaggcgcggaagatcgtcgtctccggtgaggcggctggacttcaaatccagttggggccgccagcggtcccgggcatattcgactcctgtgatcttccgccaaaatgcctctcctgacgttctccaaccccttgtaatactgtcaatccagatattttctactgctcaatattcaatcggcttcaggaatacctggtctaaggttttgtgatggacgatgagcggctgaagaatccgcctgtcggttcttctgtcctcgaacgcatccgcgatattcacgccagtatgcgccgtgtttatttgcaggtgatttgcccccctgctgactctcagccaactgtatcgccattaaggtgaagatgttgttttactcgccccagaacacccttttttatacgactattctatttctttaaccgctggcgaaaaaaactgactataaacttcaccaataatcagactgccatcaagattaatttgttcatttaatatatcaaatcaacttgttttatttttactatcaaaaatagctcattgccttactataattaatatataaattcggtaattaattcttaacatgcttttactaataatctcaattgctggccctataatattgcgctagcattgctttctggttgtatcagcgatactcaaaaattcttaatacaatactcattcgactggtacttatttgtaactcagttatattttttcgcccggtgattcagaagaatgcaaaaaacggctaccactccatcaaaaatacttgatctcactgccgcggcatttttacttgtcgcctttctgacgggtattgcgggcgctcttcagactcctaccctaagtatattcctcgcagatgaactgaaagcccgtcctataatggtaggttttttcttcaccggtagcgctattatgggaattctggtcagtcaatttctggcaaggcactccgataaacaaggcgaccgtaaattactgattctgctatgttgcttatttggagtgctggcctgcacgctttttgcgtggaatcgcaactacttcattctcctctcaacgggcgtacttctgagtagttttgcttccaccgcaaacccgcaaatgttcgccctcgcccgtgaacacgccgacagaacaggccgtgagacggtcatgttcagtacatttttacgtgctcagatctcgcttgcctgggttatcgggccaccgctcgcttatgaactggcaatgggatttagttttaaagtgatgtatctcaccgcagccatcgcatttgttgtttgcggactgatagtctggttgtttttgccatcaatacaaagaaatattcctgtcgttacccaacccgtagaaattttaccctccacccacaggaagcgggatacgcggctactttttgtggtctgttcaatgatgtgggcggcgaataatctctacatgataaatatgccgctatttattattgatgaactgcatctaaccgataaactggctggagaaatgattggtatcgctgccggtctggaaattccgatgatgttaatcgcaggctattacatgaaacgtattggcaagcgactattaatgctcattgctatcgtgagtggaatgtgtttttacgccagcgtactcatggcgacgactccggcggttgagctggaattgcaaattcttaatgccatcttccttggtattctctgtggtatcggcatgctttattttcaggacttgatgcctgaaaaaataggctctgcgacaacgttatatgcaaatacttcacgcgtcggctggattatcgccggctctgttgacggaattatggttgaaatctggagctaccatgcgttgttctgtctggcgatagggatgttgggtattgcgatgatttgcctgctgtttattaaagatatttagctcaccagtctgggctaagaaaaatcggcgtggcgcaaacagagccatcctcgccatttttgctatcatgcctgcatacataaacgacaaaacagtatgcagagggaaaaatgggttccaccagaaaggggatgctgaacgttctgattgccgccgtgttgtggggaagttcaggggtctgcgcgcaatacatcatggagcaaagccagatgtcgtcgcagtttttgactatgacgcgtttgatattcgccggtttgattctactgacgctgtcatttgttcatggcgataaaatcttttctattattaacaatcataaagatgccattagcctgctgattttttccgtggttggcgcgctaactgtacagctcacttttttgctaaccatcgaaaaatcgaacgcagccacggcaacggtgctgcaattcctctcaccgacgattatcgtcgcctggttctcactggtgcgtaaatcgcgcccgggcattctggttttctgcgctattttgacatcgctggtcgggacttttttattggtgacacacggtaatccgacgtcattatcgatctctcctgccgcgttgttctggggcattgcctcggcatttgctgctgcattctataccacctatccctcaacgctaattgcccgctatggcacgttaccagtcgtcggctggagtatgctgattggcggtctgattctgttgcctttttatgccagacaaggaacaaactttgtcgttaacggcagtttgattctggcgtttttttatttggtggtcattggtacgtccctgacatttagtctgtacctgaaaggagcacaattaattggcggtccaaaagccagcattttgagctgtgcagaaccattaagtagcgcgctactctctttgctgttgctggggatcacgttcacattaccggactggctgggaacgctgctgattctgtcatcggtgattttgatttcaatggattcccgtcgccgcgccagaaaaataaatcgtccggcgcggcatgagtgagaattaccagccaggcaccgcgccaccgttaaaaatggtttctgccgctttagcgacttcgggtgattgataagattgcagaaattccttcacgttttctgcattcttattatcttcccgtgccaccaaaatattcacatacggcgaattcttatcttcaataaatacgctgtcgtgcaccggagaaagccctgtctgctgaatgtaagtggtgctgataatcgctacatcaactttgggatcatccagtacgcgcgggagctgcgccccctcgagttccataatctgcaaatgacgaggattatcggttatatccagcgcggtaggtaataacccttttccctctttcagagtaattagcttctctttttgcaacagtaaaagtgcgcgaccaaggttggtcgggtcgttggggatcgccactgtcgcgccttcttttatttgcgccacggttttgatttttttggaataacccgccatagggaagacaaacgtatttcccaccgctaccagtttataaccatgcgcctgattatcttgttcaagaaagggtcgatgctggaagacattcgcatcaagttcgccatgatttgtcgcatcgttcggtagcaacgaaccgctaaatcctaccagttcaacatcgaggccatatttctcttttgccacctttttagcgacttccgcgacatcttgttctgcgccatttataacgccaactttaatgtgttttgcatcgctgctactctggtcgcaacctgccagcagaattccggccagcaataatgcggcccctgtccgtagatgatgtgttgtcagtttcatttttttatccttttattaatgattacctgactatagcggtaaggtcgctgcggtttaaaaaacgaaacgctatcgataagaataaaaaggaataaaagtggaatataaagtctggcacttcttactgaccacgcaagcgcgtttcgtacagcatgatgagagcgatgaaagcaaactacacttatgcttcattcgatacacatttgtaaaaggttgaatccatgaaaccaacgacactactgcttattttcacttttttcgctatgccaggcatcgtatacgccgagtcgccttttagctcactgcagtccgcaaaagagaaaaccacggtattacaagatttacgtaaaatttgcacgccacaggcgtcattatcagatgaagcgtgggaaaagttaatgttgtcagatgaaaacaataaacaacatatacgcgaggccatcgtggcgatggaacgtaataatcagagcaattattgggaagcgttgggtaaggtagaatgcccggatatgtaagaacagcaacaactactgaccaacgcttctttacctgatatcaggatttcttcattttcacctttgcagtaaccaacaatgcagtcagcaacatcaatgtgccggacaacatcaacggcgaagtcagaccaatattatccagcgcataaccgccgattgccgcgccacaggtattagcaagctgaataaccgccacctgaatagacccggctttttctgcctgatcggccagcgagcgggtgatccacgttgaccagccgacgggaaccaatgcaaaagttagcccccagataatcgccacgccggtagcaacgattttatcgcttccccacaacgtcagcaccaacgcactcacagccagtattaacggcgcgcctgctaaggccagttttaccgaacgtttaagaatgaatgacgaaagcgacgtaccgataaagctggcaatgccaaaactcaacagcaccagcgttaagccatccacgccgaatcccgccaggttcatatacaccgggcgaatatatgtgaagaaagcaaactgcccggcgaaagacatgaagatggcgatcatccctgccatcacacccggacgttgtaataagcggaaagtattttgtttctgatgcgagggttcgcctggcagtgaaggcaatgatttgataatccagaaaatacacagcacgcccatcaccgccgccgcattaaagacattgcgccaaccgataagctcgcctaaaaaactgcccaacggcgcggcaatcaccagcgcaatagaaaccgcgccgaagatcaccgacagcgccttcggcaccgtacgcggcggcaccagacgcatggtcagcgacgccgacatcgcccagaacccgcccagcsccagmcccagacaggcacgaccgattaaaagcaaactgaatgagttagcaaaggaaaccagcaagcaggagagcgtcagcaaaacggcaaacaaaataacaacgtagcggcggtcagtagcctgaattgtctgggtaataaacaaactggcaaacattgccacaaaggcggtcacggtcaccgattgcccggcaaccccttccgaaatgcctaaatcctgggccattggcgtcaacaaactgacgggcaaaaactcaacgataatcagacaggcgacacaaaacgccaccgagaaaacggctgaccagttcggtcgggtgatggcatccgcgccgcggttttcggcaataaattcactcatggtgttacccgtggcatgtttcaggggaaaagccgaccactttaacattgaaatgtgtgacgcatttaacgtttttgcaacttttacggtgttgcttgagctggagttaagatcgaaacggaacagggcaaagattaccggatgcggcgtgaacgtcttatccacccgacaggtcaggcgcggtctgtaggctgataagacgaaacggtttcaatgcaaccagtgaacgccctcggcaggctgaaagaacgcgttatagcgcatctgaaaagcattaatatcctgcatttcaggttcggtttcgcgcagaaaacccagcgccagcctgacctgagcgtcggtaatcggcgcggcgaggcgagctttttgtaaaatccgatgccattgcagcaggttctgttcgctaccatcgacaatgacaatttgccagatgagcaacacctgcgcggcgttttgcaggtgcgactcatccgggcgatgcaaataacgtaaaaattcgtcaccggctgactttcccatttgatcgaccatcgactccacgggtacgacatcgatattcagccgatcactgagacggcgaatcgcttttctggccccggatgtcagcacccgaaaaccaaccacaaacactaccgccagcgtggcgagcattatccagatcatgagttctcctgcgtaatcagaactcatgatatctggaaaccctcgccagttactaatccaccagaataatcttcagtgcaaacagagctgcgaccaccaccacacacaggttcagatcgcgccagcgcccggtgcatactttcatgatgcagtacgacataaagccgagtgcaatcccttcggtgatcgagaaagtaaagggcatcatcaccgtggtaataaacgcaggcaccgattcggtaaaatcatcccagttaacgcgcgccaggctcgaagtcatcagcacgccaacaaagattaacgctccggcggttgcgtaaggaggaaccatcgccaccagcggtgagaagaacataactaacaggaacataacgccaaccacaaccgcagtcagccccgtgcgaccaccgactgccacaccagaagtactttcaatataggcagtaacagacgaggtgccgataaacgcccccgccaccgaactgacgctatcaacatacagcgccttattcatattggggaatttaccgttactatctattaagcccgctttatcagttacaccaattaatgttcctgatgaatcaaataggttgatcagcataaaggagaaaatgataccggcgagttcaagtgttaacgcgccgctcaaatctacttcaccaatgacgccgctaatatcaggcggaatggaatagacgccgctaaaatgaacatcaccgaaaaataatccacagcaagacgtcaccacaatagaaaccagcaccgcggcatgaaaatgacgtgatgacaacacggttataataaaaaaccctaaaatacctaacaacacgccgtgagaacttaaatcgccaatcatcaccagcgtgtctttattggcgacaataacgccagtattttttaatcccattaaggcgataaataatccaattccgctggtgataccaatacgtaaacttaagggaatgttggagatcatccagtaccggatacgaaacagcgtgagcaaaaatagtccaactgcgccccagaatattgcgcccatcccggtctgccaggagatgcccatcgcccccacgaccacgaaggcaaagaaggcgttcagccccattgccggagccagcgccacgggtaagttagcaaatatccccatcgcaatactgccgataccggcaatcaaacaggtggtaacaaacaccactttcgggtccatttgtgccgcgccgaggatttgcgggttcacaaaaacgatgtacaccatggttaaaaaagtggtcatccccgcaatcaattctgtgcggacggtggtcccatgctgaggtagtttaaataatcgcgaaagcgtccctgattcattactcacgtaatcggtattgtcattattcatttttttgtccattggaggagatttaatcccttgcttttgtaaaacaaatgacaacaacggttcagtgataattatcacatttcaattgcacattaatggatattctttaataatctcgcgacgtttctttatgataaataataatcaaattgataaaatcaaaatgagaaaaatatgaataattctattaaccataaatttcatcacattagccgggctgaataccaggaattgttagccgtttcccgtggcgacgctgttgccgattatattattgataatgtctctattctcgacctgatcaatggcggagaaatttccggcccaattgtgattaaaggacgttacattgccggtgttggcgcagaatacgctgatgctccggctttgcagcggattgatgctcgcggcgcaacggcggtgccagggtttattgatgctcacctgcatattgaatccagcatgatgacgccggtcacttttgaaaccgctaccctgccgcgcggcctgacgaccgttatttgcgaccctcatgaaatcgtcaacgtgatgggagaagccggattcgcctggtttgcccgctgtgccgaacaggcaaggcaaaaccagtacttacaggtcagctcttgcgtacccgccctggaaggctgcgatgttaacggtgccagttttacccttgaacagatgctcgcctggcgggaccatccgcaggttaccggccttgcagaaatgatggactaccctggcgtaattagcgggcagaatgcgctgctcgataaactggatgcatttcgccacctgacgctggacggtcactgcccgggtttgggtggtaaagaacttaacgcctatattactgcgggtattgaaaactgccacgaaagttatcagctggaagaaggacgccggaaattacaactcggcatgtcgttgatgatccgcgaagggtccgctgcccgcaatctcaacgcgctggcaccgttgatcaacgaatttaacagcccgcaatgcatgctctgtaccgatgaccgtaacccgtgggagatcgcccatgaaggacacatcgatgccttaattcgccgcctgatcgaacaacacaatgtgccgctgcatgtggcatatcgcgtcgccagctggtcgacggcgcgccactttggtctgaatcacctcggcttactggcacccggcaagcaggccgatatcgtcctgttgagcgatgcgcgtaaggtcacggtgcagcaggtactggtgaaaggcgagccgattgatgcgcaaaccttacaggcggaagagtcggcgagactggcacaatccgctccgccatatggcaacaccattgcccgccagccagtttccgccagcgactttgccctgcaatttacgcccggaaaacgctatcgggtcattgacgtcatccataacgaattgattacgcactcccactccagcgtctacagcgaaaatggttttgatcgcgatgatgtgagctttattgccgtacttgagcgttacgggcaacggctggctccggcttgtggtttgcttggcggctttggactgaatgaaggtgcgctggctgcgacggtcagccatgacagccataatattgtggtgatcggtcgcagtgccgaagagatggcgctggcggtcaatcaggtgattcaggatggcggcgggctgtgcgtggtacgtaacggccaggtccaaagtcatctgccgttgcccattgccggcctgatgagcaccgacacggcgcagtcgctggcggaacaaattgacgccttgaaagccgccgcccgtgaatgcggtccgttacccgatgagccgtttattcagatggcgtttctttctctgccagtgatccccgcgctaaaactaaccagtcaggggctatttgatggcgagaagtttgccttcactacgctggaagtcacggaataataaaaaagcccggcgtcatgccgggcaaaagtcaccagttacgtttatgccactgtcaactgctgaatttttttctcgcggcggattttgcgttcttccatcaccgccactatcgccatcaggcagatacaaccaatcgcggcgatatcaagtgcggcgaatgtgcctgcccagccggtaaggccgaataccggcgtcccatcggcaatcattcccagacctaacttggcaaagctgtcaccaatcaggtaagcaaaggtgcctttaataccatcggcagcgccaatcgctttttaggtacaaagccaacagcagccacaccaatcaacaattgcgggccaaagaccaggaaacccaacgcaaagagagaagccagatagatatattcgttgctggcatgttgatacacaccgagcgtggcgataatcagcgccagcgcgatgcaggccaccaggccacggcgaccgttcgccaggtcagagagccagccccacagcagcgtaccgaccagcgcaccagcttcaaacagcgtaaagccctgaatcgccaccgctttagagagtttcagttcctggaacgcgtatacggttgaccactggtcgataccaatacgtaccacatagaggaaaatgttggcgaagcacagcagccagatcactttgtttttcagcacatactcaacaaagatctgccacttggtcatatcggtagattctgtctctttgtcctcttcgctgatctcctcgccgaacagttcttcagctttgccgaggccataagattccggggagtcgctgccgtaacgcaggccgataaaaccgacaatcagcgcgataatcgacgggaagataaacatgccgatgacatggccatcgaacaggtaatttgccccgaacagcgccacacctgctgcgcctgcaccgccaaggttgtgagaaatattccagaaaccgaggaatgtcccgcgtttacgacgcggcgtccatttggtgatggtggagtaactgcacgaaccgccggtactctggaaaaagccgcttaaggcgtagaaggcaatcatcaggaacaggctaaccgagccgctgcccatactggcactgaagcccagcatacaaatggcagacaggatcagcatgaacggcaggaattgtttggtgtttttgccgtcggcgtagtaggaaaccagcgttttacccacgccataagtgatggagaaacccaggccgatcatccccagctgcgtcatgctcaacccgtaggtcgagatcatgtcgttctgcgcgatgttaaagttcttgcgaatcaggtacatcgtcaggtagccgataaagaccaccaggtaggattgcatgaacggtttgaaccacattttgcgccgcacttcgagcggaaggtccagggtcggcttgcgaacctggtttaagaaagccagcatgggttactcctgaaatgaatacctgcgtgaggcatgcattgtaaaaatcagcagcaaatcaggcctgagatagcgtccaggcaaaacctggaaaatttcttagttttgccggatatgaagtgaaaaggtgagatgcatcacgcttcgcgcggtgcctgggcgttcaaaaagggcagtaacagcagtgcggaaatcccggcggcgatagagataaccacaaaaaatccgctccagtgccaggtatcgagtactttcgccagcggccaaccagcaagcgacgcccccagataagcaaacaagccgacaaaccccgtcgccgcccctgccgcctctttgtgggaacactctgccgccgccatgccgattaacatctgcgggccaaagacaaaaaaaccaatggtgaagaagcaggttgcctgcatcacgtagctggcaaatggcatcagccacagcgagccgactgaaagcaaaattccggcggcgaaaatcaaattcatcggcccacggttgccgttaaacaatttgtccgagccccaaccggctaccagcgcaccgataaatccgcccagttcaaacatcgtcactgccgtattcgccgtgaccagatcgacgcccagtgtctcggacatatacaaattgccccagtcgttgatcgccgcccggaccacatagaccagcacatagcaaaacgaaagcagccagatatacggattcagcaacacatatttggtgaggatctctttacgcgtcaaccctgccccttcttgttgttgagcaatttccagcgcgtcgtgtcgccattcaccgaccgccggtaaacctaacgcctgcgggcgatcgcgtagccgccagcagagaaaaatccccacgactatcgccatacaaccagcaatcatcatcccggcacgccagccgtaatgcagcgcagccgctgccatcacaatgggaatgagtgcgccgccgacgttatgcgccgtgttccataatgcccaccaaccgccgcgctcggtacgtgaataccaggccgttaacagacgcgcacacaccggtgaaccccagccctggaaaaaggcgttcagcacccagagcacggcaaacgcccatagcgacgtcgagaagccaaacagaatgttgatgatgcccgtggcgataagccctatccccataaaataacgggcatttgagcgatcgctgacaatgccggagacaaacttcgacacgccgtaggtaatgtaaaacagggtcgctaacaggccgatatcgctacggctgagcacgccgttagcaaggatttctggtacggcggcgttaaaacttttacgcgtgaagtaaaacagcgcgtaacccagccagatggtcagcagaatatgccgacgccagtagcgatagcgggcatcaatttcatgtttgtcagtcattaatggcgcatcggcaggcgctttcagaaacggcaacatcatcgaaccttagacatagcgttgaggtagagaaacgctgacacgcgtgccgtgcagacaggaaatgtgtaatgtgccgcccagcgccgttacgcgctcgcgcattccggtgaggccaaaaccttgttgcccggaacccggcggcaaaccgctgccatcgtcttcaatcaccagcatcaaccgttcatcctgctgccagccttgcagcgtgaccgcgctggcatcagcatgtttcacaatgttgttcagcccttcctggcagacacgaaacagcgtcacgcgctggttttcacttaatgctgattcatcgattcgccattcgagatggctgacaatgccgcgcccttccagctccatttcccgcatcagtgagcggatggcctgctccagggagagatcatccaactggcgcggacgtaaccgtcctaataaacggcgcaccgcgtcgtacacgcccagcgacagttgttcgatgagctgcccgctctgcttcacgctggcgttatctgccgccagccgctgaacaatgcccgcctgagtacgaatggctgtgatggtctgaccgatatcatcatgcagctcacgcgccacatcacggcgcacgctctcttcggtttccagcaaccgttcagccagatgctgattgcgcgccagttccttttgcagcgactggttaagttcacgcaaccgctggatgccagcgcccagtaacaaccctgtcagactttgcaccagcaacgagagcaataaatccaccggatgatcgcgccaggtttgactggcgatcagcgcgatggcgttcatcaacgtcgcgatcagcgccccttgccaaccgtagtgccaggccagcgcgataatcggcagcgccaggcagaatggcgtaaagcgcgacagttcgtccggcaatcccaactggagccagagactaataacaaacaacagcaagtaccagaccagatgccgcccgcgccagttgatcggttgagaaaccagtgacgggccgagcggcagccaggtgttattggcgagatagtgccagaacaccagacatatcggggccagcgtcaggccgccagttaaagtcagcaacagcgcattccacgactctttgccgtgccaaagccagggcagcgactgcaacaacgccgccgccgttaacgccgccccctgtaacagcaaggtgcgccagtcacgctgatggcgatagcgcgagatcagcgctacgggcagtaacgtcagtaaactaccgatcatcaataacggaaaatgggttaaaccgaccgcctgcgttagccagtaaatcagcagccattccgcacccagcaatacgggccagtatccgcgcgggcattgcagcattagccctagccgcagaccaaacggaaataacagcaccgccatatcagggcgctcaaccaggtgcaggctgatactccacaggcaaaaccatgcggcagagaagataaaaaagcaggcaataacggtaattaagcgggagaacaacgtcttcatcaccagccatcaaacatgcggcgcgccagttctacgtcgttactgacgcccagtttttccatcagattggcgcgatggacgtgtaccgttttcggtgacaagcccagttcggcggcaatctctttcaccgccattccttgcgccagtttttccgccacctggcgttcacgtttggtcagcgggtcctgacgaccggatgccagtttaatggcaatatccggcgtcagataacagccgcccgtggcaaccgtatgcaccgccgcaatcagttcgtcagggctacagcgtttggagagaaagccgcgtgcccccgcgttaagcgcctgctcaaccagcgccggactgtcatgaacagagagcattattgtcgccatacctttcggcagctggcttagcagttccagaccggagatatcgggcatggagatatcgcaaatacacacctgcacaccgcgccccggcagccccgccagcgcctcgcgccccgaaccaaactcggcaactacctgcaaatcaggttccagccccagcagctgcgcaaagccggagcggacgatgaggtgatcgtctataagggcaacggtgatcatggtcttgtcctggcgggtaaaaaaaaacgcgcttaccttaacgataagcgcgatgttgttcaagccttgagcggttactgaaaaaacaccgcaatcttgttaaacatagtcggatcggactgattacgctgcactttcaccacatcttccagcttatcgatttggcttatcatctgctccagacgctggtcgtcattgaccagtagccagatatggcttttgtcgctgtcctgaatcggcagacaaagaatgccttcaacgttaaaagcgcggcgggcaaaaaggccacaaacgtgggtcattacgcccggatggttgcgaacggtgagctccagaattacgttgttatgagttgtgttttgcatggcttattcccccaccatttcagtattcgccgcacctggcggcaccatcgggtaaactttttcttcggcatcaatgcgcacatggatcagcgccgggccagggcgattgatgatttcctgcaatgcagcctgcggatcggcttcgttattcaaatcacaggtttcgaggccgaatccggcggcaatctgcataaagttgattttgcccggataggtggcggcaaaaacgccttgctcgtagaacagactctgttgctgatgcaccagccccagcgcttcgttgttcatcagaatgattttgacatccagctgattttcactggcggtcgccatctcctgaatattcatcatcaggctgccgtcgccggagaaacacaacactttgcgatccgggttcgccagcgccgcgccaatcgccgcaggcaggccaaaacccatcgtgcccagcccaccggaggtcagccactggcgtgggcgattgagcggataagcttgcgcggtccacatctgatgctgacccacatcggtggtgataatcgcattgtcatcgacacaggcggcaacggcgttgatcaggccgtaatggcttaatggatcgcacgctttcgggattggacacgggaattcgcgctgcaaatccgctaccaactggtgccactctgcacgcggttgcgcttccacctgcgggatcaattgcgccagcacgtcatcaacatccgcctgaatcgccacatgcggctgcttgattttacccagctctgcgcgatcgatatcgacatgaataattttggcattcggacagaactgctcggttttgccaatcgcccggtcatcaaaacgcgcaccgagcactatcaacaaatccgcctcctgcaaaatatagttggtgctgcgcacgccgtgcatccccagcatacccagcgacaacggatgcgcttttggcaacatgcccagcgccattaaagtcatggtggtaggcagttgcgctttctccgccagttcacgcacccgtgcgggcgcattgatcacaccgccgcccagataaagcaccgggcgtttggcagcgttaatcatcgccgctgcgtcacgaatgctttcttcgctaaaggcgggggcggcggctttttctgccatagcgggctgtgtttcaatctcaaaaactgccgtttgcacatccttaggaatgtctatccacaccgggcctgggcggcctgattgcgcaatgcggaaggcatcgctcatgacctgcgggagttcttcgatatgtctgaccagatagttgtgtttggtgatggggatagagatgccgtaggtgtccacttcctggaaggcgtcggtgccgatcatcgaggcgggaacctgaccggtgatgcaaatcagcgggatggagtccagccgcgcatcggcaatggcggtcaccaggttagtcgcacccggtccgctacaggccatacagaccgccggtttaccgtcggtgcgcgccatcccctgagcgataaatcccgcgccctgttcatgacgggccagaatatggcggatttgcgtgctttggcttaaggcatcgtaaacaggcaggatagaaccgcccggaatgcccgtcacaatcttaatgccctgctgttccaggaaatgaacgataaattctgcgccggtaaagcgcttacgcgtcgatgttgtgcccgaacttgccatgctccagtccttttcttctgggccgactttccgggaggtgcttaaacgaaaaaccccgcccggtttgcgccggcggggttttggaatcgtgtgttgttccagtccctacggcgcattgccgacgaccaccaccacacgcacgacgaccactgcggcggatagcgcagttggtagtagttttgcgttgaacatggaagtagtcattggggaccttgttggttttgtgtttaacaatatttatacaagcacagctttacaggggagacaatggaaaatttttcagcaagggaaaattgaggggctgatcacgttttgtactgaattgcaggtaacaaaaaaccccgccggagcgaggtttcatcagccgcctgcggctggtaaccgcaaagcacactgtattatgtcaacactgaaagtatacgtgttccgcgcagaacgcgcaatttcggcacgaattttgacgtatttagggcatagttgagtatcgatcacagtttgcgttttgtccaaatattactgtttatttatacagtaaacttctataatatcactgtacgcaatgtgttatgcgggggccgcatcgttacccggcgcactaagtcctggctgaaacgggtggtgccgtcagcgccttaaccccgcgtgagcacactgtgttatgtcaacaagcacaacgtttctccttaagataccgcgtgcacaacagctggcaacaggcagcggaaaggtacgtcagctggcagtgctcctgaaccacaggagacgcgtatgagcctggtggatatcgccattcttatcctcaaactcattgttgcagcactgcaactgcttgatgctgttctgaaatacctgaagtaattcagattcaagtcgcaccaaaggggagcgggtaaccgctccccttttatatttagcgtgcgggttggagttgggggcttcttctaccagcagaatgtttgcacctgcgctgcctgtgcccctcaccctagccctctccccaaaggggcgaggggaccgtcccgtgcaatgtttagctcattttctgaaagggaacggtggtttccccctcgcccctttggggagagagttacagttcgcacgtaatccctcccggcaacatttattgccgcttttgtttacatattctgccgctaaacaattccccattcctggcgtatatctggctaacattcatcaatgtgatagattcctctcccgcatttatgggaatgcgtagtgacttattctagttatttttataaaagcatccgtgataatgaaaaggcaaagaaacgtcaatttgttattgatgttggtattactcgtggccgtcggtcagatggcgcaaaccatttatattccagctattgccgatatggcgcgcgatctcaacgtccgtgaaggggcggtgcagagcgtaatgggcgcttatctgctgacttacggtgtctcacagctgttttatggcccgatttccgaccgcgtgggccgccgaccggtgatcctcgtcggaatgtccatttttatgctggcaacgctggtcgcggtcacgacctccagtttgacggtgttgattgccgccagcgcgatgcaggggatgggcaccggcgttggcggcgtaatggcgcgtactttgccgcgagatttatatgaacggacacagttgcgccatgctaacagcctgttaaacatggggattctcgtcagtccgttgctcgcaccgctaatcggcggtctgctggatacgatgtggaactggcgcgcctgttatctctttttgttggttctttgtgctggtgtgaccttcagtatggcccgctggatgccggaaacgcgtccggtcgatgcaccgcgcacgcgcctgcttaccagttataaaacgcttttcggtaacagcggttttaactgttatttgctgatgctgattggcggtctggccgggattgccgcctttgaagcctgctccggcgtgctgatgggcgcggtgttagggctgagcagtatgacggtcagtattttgtttattctgccgattccggcagcgttttttggcgcatggtttgccggacgtcccaataaacgcttctccacgttaatgtggcagtcggttatctgctgcctgctggctggcttgctgatgtggatccccgactggtttggcgtgatgaatgtctggacgctgctcgttcccgccgcgctgttctttttcggtgccgggatgctgtttccgctggcgaccagcggcgcgatggagccgttccccttcctggcgggcacggctggcgcgctggtcggcggtctgcaaaacattggttccggcgtgctggcgtcgctctctgcgatgttgccgcaaaccggtcagggcagcctggggttgttgatgaccttaatgggattgttgatcgtgctgtgctggctgccgctggcgacgcggatgtcgcatcaggggcagcccgtttaagcgcacgtcaccgcagcatcgtcatcagctccatgggagaacgatgctgctttatcagatcacgcatcacccgcatatgcggtgcggagtaagaataaaacgcctgatagcccgcacaaagcacgctgtctggcgtctcctggcgagcgtgcgggcacaggcgatgccagtcgcacgcctggcagtcacggcgcggttgcgggttttcgctgccacaccatttttgtaaggtggcgtcaaaaagctcaatcgagatacgactgatatctgcccgcacccaacactcgaacagggcaattaaaaatttcccccacagctctgctgtcaccgaagcggccgtcagatcgccccggtcatcaaattcaagatagggaatgagctgtacggagcggatgccccgctgtttgaaattgtgataaaaatcggcaggttgcagagcatccttgtactctacaaccagtttatgcctgtcctcttcagcatcaatgacctgacttcctgtcatgcgactctctcaataaatacgataagttgatgtatatgcgttacagcaaacagtattgcgagagataacaccgcgagggagatcaaaaatttgtcacggactacgtgaaattgggaaaaatcgctattcgtgacatccattaaattgcgattacgggtgtagtgccagaggatcagcgccacgatggcgagaatgccaatcgaaatccagaataacatgcccgcctggtgccagttgtgtttgatagccaacgccatcaacgcgccgtagcccagcatggtacgaaaccacgccagtgatgtgcgctccggctgcagtcctgggtcggcaatgcgtctggctttgcggctatccggcatacaacaccagtcccataacgatcaccgccacgaccatcaatattaagctaatgattaataagctgttggtgtagggcaggtcctctttcagacgcatcgctttttcattgcgtaaccagcgcaggtagccatacatcgctaacccgccggaaaacagacacaacaacaacgccagcagttcacgaatgacgggcgtggcgaaatctggcgcaagttgatcaagcccaacccccgccgccagaaatcctagtgcggtacggatccacgccagaaaagtacgctcattagccagcgagaagcggtaatcgggcgcttctccaaggcgggaaattttcattgttgctcctttgcaatttcactaacgctctacctttagcggttttttttaagaatttcgtccgcccgtttcctgatatgctttcgccatccgctacaaggaggtcagatgggtatcatagctcaaaataaaatcagttcattgggcatgctgttcggtgccatcgctttaatgatggggattatccacttttcattcggccctttttccgcaccaccgccaacgtttgaaagcatcgtggcggacaaaacggctgaaattaaaagaggtcttctcgccggaataaaaggcgaaaaaattaccaccgtggagaaaaaagaggacgtagatgtcgataaaatcctcgatcaaagcggtatcgcactggccattgctgcgctactttgcgcatttattggcggtatgcgtaaggaaaatcgctggggcattcgcggcgcgctggtttttggcggcgggacgctggctttccataccttgctttttggtatcggcatcgtgtgcagcattttgctgatattcctgattttttccttcctgaccggcggttcactggtttaagcagcctgaataatgcccgccgggtgttcatcagcgggcattatcgtcagaacttctgttttttctcttccactttcactccttgcgtcggtaggccggtgtcatagtcacgtaccaccggcgaatagccatcttgtgggcgtggacgaaatgcccccatccagcgcggcagtgcatctttacgccacggacgcaggctccattggtaactgcggaacggatcgcgaattttgtccatgtaatccaataaggcgtcatgcattttgctgcgaacgtctgcaaaacggatatcatcgatcaggttatgcatttcatttgggtcattacggcgatcgtaaagttcatcactggtgaagaggttgagtaccagtttaaagtcatccgtcacccagcaacgcaccggaataaaaccgccaaagctgtcatgctcaatctcgtagcggttaaattccaccattacaccgcgtggctctttcacggcaaggatattttcccccggcagaatctctggtttttcaatatctgccagcgccatcattgtcggcagtaaatcgatatgactgactggcgtatcgacctgtcgccgctccccttgcggcgaacggatgatcagcggaatacgggtgatgtcgtcatacatcgccgctcctttactgatcagcttatgtgcgcccatcatttcgccgtgatcggaagtataaatgacccacgtattttcacgttgctctggcgttaaggcattgatgacccgtccgatttggtcatcaacaaagtcattacaggcaaaatagagcggatggtgataaagcccgtcatcaccgactggcgatggcatcgcctgcgcccataagcggtgatgttccggtttgttcgccaggtcatcctgagctttctcgcccagatcgtagtaaaaatcagcgtatttctctaaatactccaccggacaggtgaacgggtgatgcggctcatcatacgaaaccaccatcaggaagggttcctcggcgcgcgcgggctgttgcagaaaatctaccgcccgattgctgatgcggtgcgcccaggtgaaggtttcgtcgatatggttcgcctgtaaatcctcaacgctgtttaggccattgcgccacaggctgatctctttttccgtcagttcgctaaggtagttcgccccatcgaaccagtaatcagcgtcccactccggcggacactcgccagtgccgaaatagtcatgaccgtcgagatgccatttgccgatgtaacaggtgtgatagccggcatccttaaagtagcgccccatagtggagatgtttttgcctggcgcgacgttgttggtccacgggccggactggttagcgtagataccggtaaatagtccggcgcgtgcaggcgtacaaaccggtgaacaggtgtaggcggaattaaagcgaataccttccgccgccagactatcaatattttgcgtattcagcggtttaccgctatagcaaccgaccatattggtggcctgggtatcggtcatgatgaacagaaaattggggcgtttcataggctatccttcgcgtcgggagtaaaggttacggctgggtcgtgacgatgccgccagctgtcaaaaatcaggtagacaatcactacggcggcaatgaaataactgatcatcgctaaccagcgcgtaccgtagccgccgaattcagccagcccggcatagacgccaatcatcgcgaacaggatgccaattgacgcgatcttgacgtttctccacggtttcatgtccaccgcaaacgcatctttgaaggtgaacggcgtggcgcgcggtttgataaaaccgatcaccagcatcacgaccacgttgatgcagaacgtacaggccagcacatagaggaaatggaagtcgaacttcaccagatagttgatggtgatgtagctgattatgccaatccccatcgccacttttgccgccagcgccgggatgcgcgggaagaaaaagcccataatgatgatggtaaccagcggcacgttgtaaatgccgttgagctgtttcatccagctatacagcccctgcggcgcgttggcgatccacggcgcgaccagcaccgaaacgatagcgataaagaaaccaaatttgcgcccgacggtgaccagctgctgcggctcggcattctggttaatgatgcgacggtaaatacccatactgaataacgtactggcgctattcagaaagccgttgaaggtactgatcaccgcaccaaataacaccgcgccgaagaaacccaccattggcactggcagaacgttattgaccagcgtcgggtaggccatgtcggctttcggtaaatcctgatacagatgaaacgcaatcaaccctggcagcaccagtaccagcgggtcgagcattttcagcaccgccgttaacagcgcccccttttgcccttccgccaggctttttgacgccagcgtgcgttgcacgatgccctgatttgtacaccagtaaaaggtgttcaccagaatcaaaccggtaaatgccgcgccaatcggcaagggatcggtcgggccaccgattgagtttaatttctcggcgtgaacggtggtgagttgctcaatgccctgcataaagctgcccttgcctatcgcgatcaggccaaataccggcaccatcaacccgccgataaccagcccaataccgttgatggagtccgccactgccattgcgcgcagtccgccgatcaccgcatacaaaattcccgccagaccaagcaaaattaccagtagccagatagccgcaccgtgagaaatctgtagcgattccccgacgtgaaacaggctgttgagcgccaacgcgccggagtagagaacaatcggcagaaagcagacgccggtggcaatgaggaagcagaagtcgatgataatacgcgtcgttttatcataacgttcctccagaaaatcggggatggtggcaatgccgcgcttcagatagcgcggtaaaaagattagcgcgaggaagatcagcgtcaccgctgaagtcacttcccagcccatcaccgacatgccgcttttgtaggcctgcccggaaaggccgaccagttgttccgtggaaaggttggttagcattaacgaagcggcaataaccggcgcttttagtgaacgtccggcaagaaaatagccttgttgcgatccggtatctgttttgcggaccttccaccaggtgatcaccgccaccagcagcgtaaaaccgacaaaactcaagatttgtaacgaattcatctcatagcccttatttatgtttatgtcccggacgcatgaatatagggagaggtaaaatgcgtcgggtcaggcagtcagattcttaaaatacaaacgtcgtatccctgaacggattgttttctgttaagttcaggttgtgagcataattcgccggagggatattaaaatgaatggaaaattgcaaagttcagatgtaaaaaacgaaactccgtacaatattcccttattgattaacgaaaatgtgatctccagcggaatttctctgatctcgctctggcatacctacgccgacgagcattaccgggtgatctggccgcgggacaagaagaaaccgcttatcgccaactcatgggttgcggtgtataccgtacaaggatgtgggaaaattcttttaaagaatggcgaacaaataacactgcatggcaactgtattatattcttaaagccaatggatattcactcttatcactgtgaaggtttagtctgggaacagtactggatggaatttacccccaccagtatgatggatattcccgttggtcagcaaagcgttatttataatggcgaaatttataatcaggaactcaccgaagttgctgagttaataacttcaccagaagcaataaaaaataatctggcagtcgcttttctgacgaaaattatttatcagtggatttgtcttatgtacgcagatggtaaaaaagatccacaacggcggcaaattgaaaaattaattgccactttacatgccagtctgcaacaacgctggagcgtagctgatatggctgccacgatcccctgtagcgaagcctggttgcgtcgtctgtttttacgctataccggcaagacgccgaaagaatattacctcgatgcgcgtctggatctggcgctatcgctattaaagcaacaaggaaactcggttggcgaagtcgctgatacgctcaacttcttcgactcctttcatttcagcaaagcctttaaacataaatttggttatgcgccgtcagccgtgctaaagaatacggaccagcacccaacggatgccagtccacacaattaacgtaactctggccagtacgctttgttggcctccagcaactcatccagaatagctttggcgaccgaggcgctcggtaccgttttcgacaacgtaatcgcctgccacaggtgctgatatgaacgctgttcccaggcgtccacgaccagtttttccaccgccacttgctgactcattaaccctttctgaaactgcgggatatcgccgaccaccagtggttcaggccgtagtagcgcacgcgcatctgtttgcgatcttgcagcccaacaatttgcgccatccggctttcaataccgattggcatgtcacagatgttgaggattttcgcattcgggcgcagacgacgcgtggcttctgcgacaatggctgccgggttggagtagttgagcatccaggcatttggtgaatatttttccatataatccaccagttccaggacgccgccaatggaacgcatgccgtacgctattccgccgggtccgcaagtttcctgaccaacaacaccgtggcgcagtgggattttttcatccagttcgcgcatcgggtacttgccgacgcggatgtgcgccatgacaaaatcaacgtcgctgaatgccacttcaggatcggtggtgtaactaaacgcaatgtccggcgctttctctttaaggatgactttacaggcttcggcaatcacttcctgccgcgcaccatcgttatcataaaatttcagtgcacgaagcgggaaacggtcctgattcaccaggagcatcaacacgatgcctggcgtaaaggtgcttccaccgcctgcgacaaccactgagaatttggtcattatactgcctccgtaatggcaacattttctgctgattgatgagaattaattaagctatcgagctgttcacgcagctgggatacatgcagaccaatgatcacctgaatggcatcgccactacggaagacgccgtgcgctcccagctttttaaagacttcgtcatccagcgtttgtgacatgtcatgcagtgcaatgcgtagacgcgtcgcacaattgttaatgctggagatattgccgaccccgcccagggcttgcaggataccggcagcctgatccagctctttttttggctctgccgcggtggtttggcctcgcgaggctttgtattcggcttttgagtagagtttcacttccgcatcttcacgtcccggcgtgcacatgttgaactgcagaatcagggtgcggaaaaccacgaagtacagcagggtaaagcacaacccaatggcgatttgggtcagcatcatatccgcgtggttgctgaacatcgggatccagtttgcggtaaaacctggtcaatcagacctccgcccatgttgcccaccacaccaaagagatacatcacggtcgacattgaggccgcaagcacagcgtgtaccgcaaacagcaacggtgaaatgaacaggaaggtaaattccagcggttcggtaattcccaccagcatggcggttaaggttgcgggaatcagcaagcccgccacttttacccgattttccggtgcggcagtgaagtacatcgctaaagaaatgcccacggcaccaaagatttttgagttaccgtgcagggcaaaaccgccttccgggaacaacgatttcagcggctcggcgctcagactgaactcttgcagatgctgcgcccagtacatctgaatgccgccttcaacagctgccggaccaaagataaactgtccgtagatgaagtggtgtaaaccggttgggatcagaatacgttcgaggaaggtgtaaacccacaccccaagcgcacccgccgaacgcaggaacgcttgcagagattcaatccccatttgtacttttggccagccgagcaatgtcagccaggcacaggggatcatcaccaggaaggcgataatcaccacataagacgtcccctggaaaatgccgagaaaaaccggcagttttttatcgaacagacggttatgcagcgccgtcacaatgccggaaatgataattgcgccgataatgctggtatcgagggttttaatcccggccatcattgtcagaccgctacctgccaccgcgtcctgagtgaaatcgacgccgaagtagcttccccaggtcattcccatcgcgttgatgaaatagttccaggtcaggaaactcaccatcaccgccagacaagcacgcccctgcgcttgcttagcaaggccaatgggtaaaccgacagcaaaaatcagcggcatattacggaataccgtccaaccgccctcttcaataatgtgtacgatttgcgcgaataaactgttcggatcggtcagtgattccccgacaaacatcgggttttgcagcaagatggcaagacccaccacaatcccggcgaagggaaacagcagcactggcgtgaacatcgcgccgccaaagcgttgaatttgactgagcatttccacatcctcttttctcaattctgtaagtaggaagcctgattggttatgcggcaggcctggagcgaggataggaagatgcgatcggcagaacatgacgacccaatgggattcgtgatcgctttcatgcttttcgttgggcggtagagatctacgttttcgcgaaaaagtagacatctgtgagcactggtacacagcatcgaacacatctttaaaaaaaagatgttttttcaatcgattaagcagaacttgtgggcgcattacccgggcttgcaggcaaaaaagagatctagagatgatctacaaaagcattgcggagcggttaagaattcgacttaattccgcggatttcacgctaaacagccttcttcccggtgaaaaaaagttggcggaagaatttgcagtatcccggatgaccatccgtaaagcgattgacctgctggtagcgtggggattggtggtccgccgccacggcagcggcacttacctggtgcgcaaagatgtactgcatcaaaccgccagcctgaccgggctggtggaggtgttaaaacggcagggaaaaacggtcaccagccaggtgctgatttttgaaatcatgcctgcgcctccggccattgccagccagttacggattcaaatcaacgagcagatctacttctcccgtcgcgtgcgttttgtggaagggaaaccgctgatgctggaagacagctatatgccggtaaaactgttccgtaatctttcgctgcaacatctggaagggtcgaagtttgaatatattgaacaagagtgcgggattttgattggcggtaattatgaaagcctgacgccagtgctcgccgatagactgctggcgcggcaaatgaaggtagcggaacacacgccactgctgcggatcacctcgttgtcatatagcgagagcggggagtttttgaattattcagtgatgttcagaaatgccagcgaataccaggtggagtaccatttacggcgactccacccggaaaagagttaaccgatactccagaagagcaccgccagtaattggggggtgataatgcgcaggaacatcactaacggatagacagtggcgtaagagagcgccgccgcaccgctggttggatgaagattattagcaaacgccagcgccggaggatcggtcatggaacctgccagcatcccgcacatggtcaggtaattcattttggctaacatccgcgccagaatgccaacagtaatcagcggaacggcggtgatcagggcaccataaccaatccagcttagcccttcgccattgaccagggtatttacaaaatccccaccagatttcagaccaacgaccgagaggaacagcacgatccccagctcccgcagcgcgaggttggcacttggcggcataaaccagtacagcttgccgatactgccgatacgcccgaggatcaacgccataatcagcggaccgcccgccagccccagtttcaacgcggccgggaatcctggcacaaagacgggaatagaacctaacaatacgccaagcccgatgccaataaacactggcagcatctgaacctgttgcagtttttgctgcgcattccccagcacattggcaacggcatcaattgcggacggacgccccaccaggttgaggatatcgccgaactgcaggctgatatcgccactggcgaccagttcgaccccggcacggttcaggcgcgagataacaacgtcatagcgttctttaaagtgcaggtcgcgaatacgttttccgagcacgttttcattggtgaccaccacacgctcgacgcgcaaatcagtgcctttcgtggacagcgaagtatcgacctcctgaccaatcaccagttgcgcattatgtaaatccgctggctgacccaccagatgcagcaaatcgcccagttgaataatggtatctggcgaaggaacttttagggtttcttcgcgtttcagacgcgagcagataattttgtcgccgttgagaatcggtacatctttaatggctaaatcatgcaggttagggttctcaacgcgaatattgatagtcttgatcagcgcgccgccattggtgcgtgaagactcgtgctgctgagcttctgtctcgacattgacgcggaaaataacccgcaacatccacatggtgaacaaaatcccgcaaatgccgaatggatacgccatcgcgtaactcatccccatctgatcgaccatttccattggtgtacccaggtcgcgcaaaatctgctgccctgcccccagcgctggcgtattggtaaccgcaccggagaaaatccccagcactaccggcagtggaatatcaaacagtttatgcaggatggcggtaaccagaccaccgatgatgacgatcagaacagcaaacaggttgaggcgtaatccggagacgcgcaatgaggcaaagaagcccggccctacctgaatcccgatagtataaacgaacaggatcaggccaaattcctgaataacatgcagcatatcgctacttaatgtcatccccgcctgagaaacaaaatggccgacgatgatcccaccaaacagcacgccgccaatacctaatcctatgccgcgaaatttgacattgccgataaacaaaccgacgactgccaccaaagccagaatactgaccgttaatgctatatcactcatcgtccatttctcttgagataacatttttaattgctacggattatggctgaatcggtgaagcagatttgccttatagcgcacattatcacgggaaagaacgtgccgaaatatcttaaacagtcgaaatttaacgcattgttgagtaagtaagacaaaaaaagccccaccagaatggcggggcaaagagaatagctagttagctatttaacgcgggacgttcgctgatagcgatacgctgcgctgcgatgggttcaggctcattacgaattaaatcaatatgcagtaaaccgtttacgaaggttgcgccagagacttccatattttcagccagcgtaaagctcaggctaaatggctgattcataagcccttgatgcagccattttttctcttcttttggctgctccggcgtgccttttacgctcaggcgcgtaccttccagttgaatctctaaatcttcctgacggaaacctgccagcgcaagggtaatgcggtagtggttatcgtcgcttttctcaatgttgtacggcgggaagctctggctttcaccggcgttttgcagtgcgttggccagtttgtcaaaaccgatccattgacgcatcagtggggataaatcgaagttacgcatagtcatttctccttctaagaagcgagtaagtacctgcaaatccgaagattcgcatatgctccctgacggcgagcatggagatgtcaggccgcgccaggcggccttagggaattagttgatttcgatacggcgcggttttttcgcttccggaatcacgcgttcgagatcgatatacagcaaaccatttaccaggttagcgccacgaacatgaatgttctcagctaactggaatttgcgttcaaagttgcgttcagcgatgccctggtacagataggtgcgctctttttgttcgtcggcgtgagcacctttcaccaccagcagattatcctgggcggtaatttccagttcgctctcagcaaaaccagccacagcgatagcaatgcggtaatggttttcgtctaccagttcaacgttatacggagggtagccgccattactctggctctggttgttttctaagtggttaaacaaacggtcaaatccaatagcagaacggtaaagcggggataaatcaaagttacgcataatcaatagctcctgaaatcagcgagaatgtaagaccttccacaatggacaggtcaggtagccagaacacccatcaggcgcgtcctcatcggctacgatgtaaaaatgggtctggaaatgaacttttcaagccttatcagcggactttttttgcagtttatggtctattgcatagactgagggggcagcacgaaacgttaaagtgcgatagccgccacagtgcgacgtaatgatgatgttattttcagcaagggatcgctataactcatcaggccaacacccacgatcaacagatgaatttattatgataagaaatgtgttgttagcgttcatgatatgcagcggaatgacattactcggaggatgctccagcgtgatgtcccataccggagggaaagaaggaacgtatcccggcacccgcgccagcgcaaccatgattggcgacgatgaaaccaactggggcactaagtcgctggcgattctcgatatgccgtttaccgctgtgatggacacgcttttactgccgtgggatgtgttccgcaaagacagctcggtgcgctcgcgcgttgaaaaaagcgaagccaacgcgcaagccaccaatgcggttattccaccggccagaatgcctgataactgatttagcgatcagtttcggtgatccacagctggccgccttccatccacgccagccactgaccatccggcgagaagaccacggcgtccgcagaaggtggattggcgtggttttcggttaaatactcaacctcgccgctttgcgcatgggcacaagcaattcgattatccagcacaaagcccaaccattctcctgacggatgccagttaaatgcagactgaatatccgttttgttatgggttaactggcgcggctcgccgccctgtggcgagataagccacagttgcacaatgccgttatcatcacgcattaaaaacgcgatttgcgtaccctgcggattacagcgcacccagtggcgcgggacgttgactaaccccggataagcccgatggtgggtaaaggttaaacgtcgctgcacgacgccgcgcggtggcgcgggcagggtggtttccgttccacttaacggcgcatcacctgccgctttccagccagcttcatcttgcggtaactcaacgataaacagctccggcactttctcgccctttggcgaaagtgtgtcgccaataaacgccagcgcgtgatttcctacccatccttcttcataagcacgattgatttcatcgctgccaggctgcggcgtgggcgtggttttactcaccagcacgcaccagtggctaccgctgtattcacgcggatgctgcttttgtacgttgaccgggccaaacggcgcagcaacaccgacgtttcgcaaatccagcgccggatcgagttcatgcattacatggtcgttataggtaaagctcaccctttcaccgttcgggctaaagacatgcacatggctgccgccgcgcagcgctcctggcgtatacggcgcggtaatatccattgcatcgagattgctcaccttgccgccttcagcaatgactccgcgtcgatgatggaagtcgtaatgccatgtttcatcaggattttcagggccgtgaataaagacatatttctctgacttcggatgaacggtcaccacgccgacgtgtgcgccctgtgacgcgcgatagataacctcgacctcgcctgtatggatattcacacgctcaatggtctcgccggtaaacgacgccccagaaggacgcacgtcaaataccagccactggctgtcgggcgtccaggtattggtattggtgagcaggtgattacggggagcaaaggttatctgtttcatggcgcggtcctgatacaaaacgggtcccaccatcatacttcacaaggacttcactttcagacaatagtcttttgccatcgtgatgaatgtgagtgaaaagatggaacatttcgacgtggcgattattggcctcggcccggcaggatcggcgttggcgcgaaaattagcaggcaaaatgcaggtgatcgcgctggataaaaagcaccagtgtggtactgaaggtttcagcaaaccttgcggcggtctgctggcaccggacgcgcagcgatcttttattcgcgatggactgacgcttcctgtcgatgtgatcgccaatccacagattttcagcgtcaaaactgtcgacgtcgccgcatcgctcacgcgtaactaccagcgaagctatatcaatattaatcgccatgctttcgacttgtggatgaaatcgctgatccccaccagcgttgaggtttatcacgatagcctgtgccgaaacatctggcgtgaggatgataaatggcatgtcatttttcgtgcagacggctgggagcaacatattaccgcccgctatctggtcggtgccgatggcgcaaactcgatggtgcggcgacatctctacccggatcatcaaatccgtaaatatgtcgctatccagcagtggttcgcggagaaacatccggtgccgttctactcctgcatctttgataattcgataactaactgttattcatggagtatcagcaaagacggttattttatctttggcggtgcttatccaatgaaagacggtcagacgcgtttcacgacgctgaaagagaaaatgagcgcctttcagttccagtttggtaaggcggtgaaaagcgaaaaatgcacggtgctgtttccctcacgctggcaggattttgtctgcggtaaggacaacgcctttctgattggcgaagcggcaggatttatcagcgccagttcgctggaggggattagctatgcgctggatagcgcagacattctgcgtgcggtgttactgaagcagccagagaagctcaataccgcttactggcgcgccacccgcaaactgcgtttaaaactcttcggcaagatagtaaaaagccgatgcctgaccgcaccggctttaagaaagtggattatgcgcagtggtatggcgcatattccacagttgaaagattagccaacgcgcttcacatcgcccaccagcaggatgtaagagagcgcgccaatcaacgcgacggcggagatataaaccagtgcaggtgcgaaaccgtaaccctgcgccaggtaccccaccaccagcggaacggtgatgccgcccagaccaccggcgaagttaaacacgccgccggttaaaccaatcaggcgcatcggtgccagagaagagaccagcgaccaggtaatcgaagcaaaaccgttgccgaagaatgccagcgccatcaggcacataatcatcatcggatcgttggtgtagttagcgcccataatgcaggtggagatcagcaagccgcagataatcggcgttttacgcgcaaagcccagtgaaaagcccttacgtaccagcagatccgcgacccagccagagagcaggacgccgacaaacgccgcgaggaatggcaccgtggtcataaagcctgctttcagcgccgtgattcctttttcctgggttaaatagttcgggaaccaggttaagaaaaaccacagtgtagaagccaccgcaaattgcccaagataaacgccgatcagtttacgatggaacaccagtttccagtctttggctgttaacggctgacgcgcctctttcttcaccggcgcatcaccatccaccagaccgccgccatcacgaatgtaatccagttcagctttgctgatacctttggtcaggcgcggcggctgataaaccttaaaccaaatcagcgaccagataatgccgataccaccagtgacaatgaacacccagtgccagctcaacatctcctgaatccagatcagcagcggagtcaaaaacgccagaccgacaaactgaccagacgtataaaaaccaacggcggaagcgcgttcatgttccgggaaccagctggtcaccatccggttattggtcgggaaagcgggcgcttcgaaaataccggttatcgcacgcagaccaattaatgacattaatcccgtggcaaagccctggaataaagtcgccactgaccaaccaaatatcgcaataaaataagtcacgcgagaacctacgcgatctaaaaaccaaccgccggggatctggcatagcgtataaagccaggcgaaggccgaaaatacatagcccatttccgctttcgtaatgccgaactcttcctgaatatgggcggaagccacggccaggttagcgcggtcaacataacaaatgaccaccgtaataaagatcatcaccagcgtcagataacgccgacgccccggctttgctgcattaacgggaatatccatagcgagctttctccagattttgggcatagcgaagccgctcaccatgccctgtaatttacagagggttatatttttgtattgctgttttagtgcccgatgaggggcttacgtggcaggaattaccactctgctacgctgttatcttcatgacgccagagcggattacgccagtccggggcatttttactgaactcaataactttagcttcgtcgatttccacacctaagcccggtttcgttaacggtttaaagaagccgccaaccatactgaagtcttctttgtttttcacaaagtcgagtaactccgcgcctttgttgtaatgaatgcccatactttgttcctgaagtaccgcgttataggaaacaaagtcgatatgcaggcaagccgccagtgcaatcggtccgagcggacagtgcggcgcaagggtcacatcataggcttctgccattccagcaattttgtagcattcggtaataccgcctgcatgggagagatccggttgcagaatcgaaataccgcctgcctccagcacgcgtttaaaatcgaaacgtgagaacatgcgctcacccgccgccagtggaatatgcgtttgtgccgccagtttcgggtagtattcggcttgttccgccagcaccggctcttcaataaacagcgggcgatacggctccagttctttaatcagcactttcgccattggcgcgctgacgcgaccgtggaaatcaagaccaaactcaatctgattgccaaaagcttcacgaatttgtgccacggtgttgactgccgcatctaccgcgcgggagttatcaattagccccagttcttcacaaccgttcagtttgaaggtatcgaagccgatttcgcgcagggttttaatgccgtcgataacatccgccggacgatcgccgccgacccaactgtaggctttaattttgtcgcgaaccaggccgcccatcagttgccagaccggcgcattcagcactttgcctttgatatcccataacgcctggtcgatcccggcaatggcgctcatcaggattggaccgccacgataaaatccggcgcgatacatcacttgccataagtcattgatgcgcgaaggatcctgaccaatcaaatagtcacccagctcgtgaactgccgcttccaccgtacgggcgcggccttcaatcacgggctcgccccaaccgaccacgccttcatcggtttcaattttcaggaacatccagcggggaggtaaacgatacgtggtaattttggtgattttcattgcactgcctctcgatacgccttaacaaatgctgctgcctgctgcgcggtgcgttctacggactgcccggcgcgatagagatcgctgcctaagcccgccccagcacaacctgcgtctatccactgcgccaggttttctggcgtcacgccgccaacggcaaagactgcgatgtccgatggcaataccgcttttaacgctttgatgtattgcggaccaaaagccgatgacggaaatattttcagcgcctgcgcgcccgcttcgagcgcggtaaaggcttcggtcgccgtcgcgcagccggggcagacggtcatgccgtagcccaccgcacggcggatcacttcactatggatattgggcgtaacgatgagctgacagcccatcctagcgagcgcatcgacctgttcaggtttcagtaccgtacctgcgccaatcaacgccttgtcgccatacgcatcaacgatggcggaaatgctttgctcccattgtggggaattcagcgggatttcaaccgcgtcgaacccggcgtcaatcaccgcgccaacatgcgccagcgcctcgtcgggcttaatgccgcgcaaaatggcgatcagcggaagtttagtttgccactgcatgagcgatgctccttataccagcctgaaatgccgtgtcgcccgccaccgccgtcacgtcgcaacccatcgcctgaaaggcttgctggtagcgcgcggtcagcgatgttccggcgacaagggtgatggcgtgttgatgggtcacatagtcgcgcatactggcaacctctgcgccaatcaacaaaccagagagaaattcgctgacctgttcgcggggaagtgttcccagcacatgcgaggcgcgaacttcaaaaagctgcggcaatatggcgggcgcattaaggccgcgctcaaggccagccgcgaaggcatcggcagagttttcctgcggcggcaaacctgcgccaatcaatgagtgatttaacagtaaatgatgtagttcaccggtcatcacggtgcgaaaatcgttgatttgctggctatcggcctgcacccatttgcaatgcgtaccgggcataacataaagagaggaaggagccagagttcgcgcgccgatcaattgtgtttcttcgccgcgcatcacattgtggttatcgtcatgagagacgcataatccgggaataatccagatattgtcgccaacagacgttaattgttcgccaatagacgaaaaacgggcaggaacagataaatacggagcaactttccagccgacattgctgccgaccattcctgccattaccactggcgtattctcttcacgccagtcggtcgtgacttctgctaacaccgcagccggagattttccgttcaggcgcgtgacgcctgcttctgattgcctgctctccaggcagtggtcgccctgataaagccaggcgcgaagattggtcgatccccagtcaattgcgatgtagcgagctgtcatgtgatttcctttaaccttcgtgtcgagctggcgatcatggtaagcgccgcctgctctgccgcatcgccgtcctgatgccgtatcgcatcgaacagcgccttatgttcctggagcgtttgcggcatgttggcctcatcgcccatccaggttcgttcaaaaaccgcccgctgcagcgaactgatcgcaatgctaagttgctgtaacaccgggttatgcaccgactgcagcaccgcctcgtggtagcgaatatccgcttcgttaaacgcttcgcggtcctgattgttggcaatcatctcgttcagcgccgattcaatctgcgccagatcgctggaggtcgcgcgctctgctgcccaacgggcaatcgccggttccaccagatttcgcacttcgctcatggcactgataagccgtgggtcgtagtcgttttccaacacccattgcagtacgtcagtgtcgaggtaattccactggttacgcggtgccacaaacgccccgcgataacgtttcatttcaatcagccgcttcgccatcagcgaacggaacacctcacggatgatgttgcgcgaggttgcaaactcttcacagagctccgcctcagccggaagtggcgagccaggtacgtatttgccgtgaacgatctgtttacccagcgtaatgacaatgcgatcggttttattgagagtcatggagagtccttgtgctctgtatgttcttctctactttaccccgatcgatgcataacgcggcaactttgtagtaccagcgtgatgacgttcgcgtttgccgtgtgcgtaatgtagtacaaacttatattgttgtactacaatttagatcacaaaaagaacaatgcataaaaaaatgacatgcgtcgggcagaaatctgaaaagggatatcaggcgctaaacaggagggaaagaagagtatgctttcaacggcttagctactcgtttaaaggattaatcatgaagttgaattttaagggattttttaaggctgccggtttattcccactggcgctgatgctttcaggctgtatctcgtatgctctggtttcccataccgcaaagggtagttcaggaaagtatcaatcgcagtcagacaccatcactgggctatcgcaggcaaaagatagtaatggaacaaaaggctatgtttttgtaggggaatcgctggattaccttatcactgatggtgccgatgacatcgttaagatgctcaatgatccagcacttaaccggcacaatattcaggttgccgatgacgcaagatttgttttaaatgcggggaaaaagaaatttaccggcacaatatcgctttactactactggaataacgaagaagaaaaggcactggcaacgcattatggttttgcctgtggtgttcaacactgtaccaggtcactggaaaacctaaaaggcacaatccatgagaaaaataaaaacatggattactcaaaggtgatggcgttctaccatccatttaaagtgcgattttatgaatactattcacccagaggcattccggatggtgtttccgcagcattactgccagtgactgttacgctggacatcattactgcaccgctgcaatttctggttgtatatgcagtaaaccaataatcagtaagcgggcaaacgcgtttatgctgtttgcccgtccactgattaattcagcacatacttctcaatagcaaacgccacgccatcttcaaggttggatttggtgacaaagttcgccacttctttcaccgaaggaatagcgttatccatcgccacaccgacgcctgcatattcaatcattgcgatgtcgttttcctgatcgccaatcgccatgatttcttccggtttaatacctaacacgtcggccagtgatttcacacccgtacccttgttaacgcgtttatcgaggatttcgaggaagtacggcgcacttttcagcacggtatatttctctttcacttcctgcggaatacgcgcaatagcctggtcgaggatggcgggttcatcaatcatcatcactttcaggaactgggtattggggtccattttctccgcttcgcagaacaccagcggaatggtggcaacgaaggattcatgcaccgtgtagtagctgatatcgcgatttgctgtatacagcgtggtgcggtccagggcgtggaaatgagaaccgacttcgcgagagagtttttccaggaaacggtagtcgtcatagctgagagcggtttgcgccacggtgctaccatcggcggccttctgtaccaacgcgccgttataagtaatgcagtagtcgcccggctgttccatatgcagctctttcaggtagttgtgaacgcctgcataagggcgacccgtcgttagcacgacattcacgccacgggcgcgagctgcggcaatcgcatttttaacggcgggtgaaatggtgtgatcgggcagcagaagggtgccatccatatcgatagcaatgagtttgatagccatgagttccccaggtagattggttcctgacccatgctaacgcgattccgctcaaaaatcagtacaacacccgagggaaaagggggatgcaacgcgggttgcatgctccccatttgcttagcggaagagtttccctttcagcagttccatacctgcggaaagcagatcgttattggcttgtggtgacacttcaccttgcggtgagagcgcatcaataatcttcggcaattgctctgccagtaaactggaagctgtactggtatccacgccaagtttttgcccgagatcggacaccgcatttgtgccgagcgccgattccagttgctcgccactaaccgattgattgccctgttgattactcagccaggttgagagaatggcccctaagccgccactttgcagtttttccagcagcacctgaatgccgccctgctcctcaacccaacttaaaatagcctgatatttccccgcatcgcctttcagaaaggcaccgacaacttcatcaaaaagccccatgataatcacctgtaaagcgttacgtgttgacccaaaaagtatagatttgcgggatgataattgcggattgcagaaataaaaagggcggagatgatctccgcccttttcttatagcttcttgccggatgcggcgtgaacgccttatccggcctacaaaatcatgcaaaatcaatatattgcaggagtctcgtaggactaataagcgtagcgcatcaggcacgctcgcatggttaacgccattaaatatcaatattcgccgctttcagggcgttctcttcaataaacgcacgacgcggttctacggcgtcgcccatcagcgtggtgaacaactggtcagcggcaatcgcatccttaacggtaacgcgcagcatacgacgactttccgggtccatggtggtttcccacagctgttccgggttcatctcgcccagacctttataacgctggatggagagaccgcgacgagactctttcaccagccagtccagcgcctgctcgaagctggctaccggctgacgacgctcgccacgttcgataaatgcatcttcttccagcaagccacgcagtttctcacccagcgtgcagatacgacgatattcgccaccagtgataaattcgtgatccagcggatagtcagtatccacaccgtgggtacgcacgcgaacaatcggctcgaacaggttttgttcggcattggtgtggacatcaaacttccactggctgccgtgctgttctttgtcgttcagttcgctgaccagcgcgttcacccagcgggtaacggtctgctcatcagagaggtcggcttccgtcagcgtcggctgatagataagctctttcagcattgctttcggataacgacgctccatgcggttgatcattttctgcgtcgcgttgtactcagacaccaatttctctaacgcttcgccagccaatgccggtgcgctggcgttggtgtgcagcgttgcgccatccagcgcgatagagatctggtactgatccatcgcttcgtcgtctttaatgtactgttcctgcttgcctttcttcactttgtacagcggcggctgagcgatgtagacgtgaccgcgttcaacgatttccggcatctgacgatagaagaaggtcaacagcagcgtacgaatgtgcgagccgtcgacgtccgcatcggtcatgatgatgatgctgtgataacgcagtttgtccgggttgtactcgtcacgaccgataccacagccaagcgcggtgataagcgtcgccacttcctgagaagagagcatcttatcgaagcgcgctttctcaacgttgaggattttacccttcagcggcagaatcgcctggttcttgcggttacgcccctgcttcgcagagccgcccgcggagtccccttccaccaggtacagttcggaaagcgccggatcgcgttcctggcagtctgccagtttgcccggcaggcccgctaagtcgagcgcacctttacggcgggtcatttcacgcgcgcgacgcgccgcttcacgggcacgggcagcatcgataattttgccaaccacgattttcgcgtcggttgggttttccagcaggtattctgccagcagttcgttcatctgctgttcaaccgctgatttcacctcagaagaaaccagtttgtctttggtctgggaggagaatttcgggtccggcactttcacggaaacgaccgcaatcaggccttcacgcgcatcgtcaccggtggcgctaactttggcttttttgctgtagccttctttgtccatgtaggcgttcagggtacgggtcatcgccgcacggaagcctgccaggtgagtaccgccgtcacgctgcggaatgttgttggtaaagcagtagatgttttcctggaagccatcgttccactgcaacgccacttcgacgccaataccgtctttttcagtggagaagtagaagatattcgggtggatcggcgttttgttcttgttcagatattcaacgaacgccttgatgccgccttcatagtggaagtggtcttctttgccgtcgcgcttgtcgcgcagacgaatggaaacgccggagttgaggaacgacaactcacgcagacgtttcgccagaatttcatattcgaactcggtcacattggtgaaggtttcgaggctgggccagaaacgcaccatggtgccggttttttcagtctcgccggtaaccgccagcggagcctgcggtacaccgtgttcgtagatctgacggtgaattttaccctcgcgctggataaccagctccagtttttgcgacagggcgtttactaccgaaacaccaacgccgtgcagaccgccggacactttataggagttatcgtcaaatttaccgcctgcgtgcagaacggtcatgatcacttccgccgccgatacgccctcttccgggtgaataccggtcggaataccgcgcccgtcatcctgtacagagacagagttatcggcgtgaatggtgacgataatttctttacagtgacccgcgagcgcttcgtcgatagcgttatctaccacctcgaataccatgtggtgcagaccggtgccgtcatccgtgtcgccgatatacatacccgggcgcttacgcaccgcatccagccctttcaggactttgatactggaggagtcataagaattcgacatcaacgtttctcgctcatttatacttgggttaatccgttattttacccttttccacggtaaacatcttcgaattttcgtccgacatgtctataacgtgttcagcactgatcgcgctgacaaagacctgtgattgcgtcgcttttaagcggctggcaagcagcccgcgacgctcatcatcaagctcagaggcaaaatcatctatcaggtagagacaccgccgcccgctttcacgggtgaggaactctccttgcgccagacgtaaggcgcacatcaacagcttaagctgcccacgcgataaggtatcttccaccggcgcaccgtcggcgcgaatgcgtaagtccgctttatgcgggccatgcgcggtgtaggttagctggcgatcgcgttcaaaattacgttccagcacctcagcatattctgtctctttctcccagccgcgctggaaagagaaagtcagagaaaactcagggagaaattgcttacaggtatcggccatatcggccgcgataccggcgctatactccgcgcgccaggtgctgatttgctccgccagcgggatcagttctttatcccacgggcgtagctgttcgtaacgtgtcacctggcgcagcgccgcattgcgctgcttgagcaatcgcttgagattgctccaggcggtgaaaaatccgggttcgttgtgaaagcatccccagtcgaggaatgctcttctgtatttggggccgccgttgagtaaagtaaacccttctggcgttatcagctgcattggcatcaggtgcgccagttccgcgactttatgcccgtcagtaccgtcgatgcggactttgctgtcgccctgtttgtccttggttaagccaatcgccgtctcgcgctcttcgccctgtaatcgcccatggagaacaaatgcctcctgctcatggcgaatgacgcgaccaatctgcaaactgcgaaacgcccgaccatggccgagcgtatagatggcttccagcacgctggttttgccactgccgttggcacctaccagaaagttaaagccgggagataaagcgagatccgcggtttcaatgttgcggaaatcgcggatcaacaagcgggtgagggacattacagtctcattggcatgacaacataggcagccgactgtgatgcggcatcttcaatctgcacgctggaaaccgaatcggtcagcatcatgcggacgttttcgcatttcagcgcgttcagaacatccagcacatagctgacgttgaagccgatttccatctccgcaccgctataggtaacgtcgaggatctcttccgcttcttcctgttccgggttgttggcggtgattttcagctggttttcgctgacatacaggcgcacgccgcggaatttctcgttagagagaattgccgcacgggcaaacgcctgcttgagcagatcgcagccagcttccagatgtttgtccggattcttcggcagaacgcggcggtaatccgggaagcgaccatccaccagtttggaggtgaagataaagtcgccaacgtgggcgcgaatattgttgctgccaatctgcacgcgcagcggattgtcgccgccgtcgagcatacgcatcagttcaatcacgcctttacgcggtacgatcaccgaatggcttggcaaagattgaccaattggcattgaacagaccgccagacggtggccgtcggttgccacggtgcgcagttcttcaccttcggtttcaaacagcataccatttaagtaatagcgaacgtcctgatgcgccatcgaaaactgggtcgcttcaatcagacgcttcatcgttgcctgcggcagggtaaattcgacttcactctgccagtcatcgaggttcgggaaatccgccgctggcagggtagacagcgaaaaacggctacgcccggagcgcaccagcatccgctcaccttccagctgcacggcaatttccgcgccttcaggcagaccacggcagatatcaaagaatttgcgcgccggaacggtcgtcgctcctggctcgtgtggctgaaccagcgcaacgcgtgccaccatttccatctcgagatcagtaccggtcagcgacaacgtaccgtcagcaacctgtaacagcagattaccgagaatcggtagcgtaggacgaccacctaacggaccgctcacctgttgtagcggttttaataaatgctcacgttctacggtaaatttcataggtttacgatgacaatgttctgattaaatttgaaaaatcttctttgatatcgtggctctcttcacgcaactgctcgatcttacggcaggcatgaagcaccgtcgtgtggtcacgaccaccaaacgcatcgccaatctccggcagactgtggttagtcagctctttcgccagcgccatcgccatctggcgcggacgcgccaccgagcgggatcgacgcttggaaaggagatccgcaactttgatcttgtagtactccgccaccgtcttctgaatattgtcgatggtgaccagtttttcctgcaatgccagcaagtcgcgcagcgcctcacgcacgaagtcgatggtgatcgcccttccggtaaagttggcgttggcaatgacgcggttcagcgccccttccagctcacgtacgttagatcgtagacgcttggcgataaagaacgccacttcacccggcaaacgaatgtcgttttcgtcggcctttttcatcaggatcgccacacgggtttccagctctggcggttcgatcgccacagtcagtccccaaccgaagcgggatttcaaacgatcctcaacgccgttgatctctttcggatagcgatccgaggtgagaatgatctgttgattaccttccagcagggcgttgaaggtgtggaaaaactcttcctgagatcgttctttattagcaaaaaactgaatatcgtcgatcagcagtgcatctacggaacggtagtagcgtttaaactcttcgatcgcgttgttttgcagggctttaaccatgtcctgaacaaagcgctcggagtgcatataaaccactttggcattcggcttgcgcgccataatgccgttacccaccgcatgcagcaggtgagttttacccagacccgtgccgccataaaggaacaacgggttataggcaccgccagggttatccgccacctggcgagccgccgcgcgcgccagttggttagatttaccttcaacgaagttatcaaacgtgtgtttgacgtttacgttagaacgataggtcggttctgccggggccgggacgttatcccaacctgagcgcgtagaaggcgcagcacgttgcggctgcgtttgcgccacctgtgcaggggccgcgacgttgctcgtcactgccgcttgtggcgtttgcgtcaccggtttggtgccgacttcaaaacgcagctgtggggcatccgctccgcagaaactggttagcagtccattgatattattaaggtacttgtcccgtacccaatcgaggacaaaacggtttggcgcgtacagggccagcgtgttatcgctcagttccgcctgcaatgggcgtatccacatactgaattctgtggctggtaactcatcctgcaatcgggcaagacactgctgccaaagcgaaagtgacacggcggactccactcgaacaaaagtcgataatgactaaggctgaaacattcatgattgttgacgtacgtcgaaaagaccctgcttgagggtgacgcacgaaccgctgtctgcggttatatgcccgatcaagatcctgcaaaacgatcgggaccgcggatcatagcctaaactgcgcaagagatcttctgtttctcacagattttcccgatttatccacaggactttccagaactcgctaagtgtaaacgatcctgccgcgaggcgggcacgatttacgccgcatattggaaaatttaatgaccatagacaaaaattggcttaatcgatctaataaagatccaggacgatccttgcgctttacccatcagcccgtataatcctccacccggcgcgccatgctggttttcactggtgtgaggtcgtacattttccctgcgaaaaggtgcggaaaagcgcggtaaataaggaaagagaattgactccggagtgtacaattattacaatccggcctctttaatcacccatggcttcggtgtccatcgtttcatttttcggcggatatccaataaagccattgaatttattcaagtttaggtagaaatcgccatgaaacgcacttttcaaccgtctgtactgaagcgcaaccgttctcacggcttccgtgctcgtatggctactaaaaatggtcgtcaggttctggcacgtcgtcgtgctaaaggccgcgctcgtctgaccgtttctaagtaataaagctaacccctgagtggttaagctcgcatttcccagggagttacgcttgttaactcccagtcaattcacattcgtcttccagcagccacaacgggctggcacgccgcaaattaccattctcggccgcctgaattcgctggggcatccccgtatcggtcttacagtcgccaagaaaaacgttcgacgcgcccatgaacgcaatcggattaaacgtctgacgcgtgaaagcttccgtctgcgccaacatgaactcccggctatggatttcgtggtggtggcgaaaaaaggggttgccgacctcgataaccgtgctctctcggaagcgttggaaaaattatggcgccgccactgtcgcctggctcgcgggtcctgatagccctcattcgggtctatcaacgcctgattagtccgctactcgggccgcattgtcgtttcactccaacctgttcaagctacggaattgaggcattgcgcaggtttggagtgataaaaggcagttggttgacggtgaaacgcgtattaaaatgccaccctttacaccctggtggtgacgatcccgtcccgcccggaccatttgataccagagaacactaacgatggattcgcaacgcaatcttttagtcatcgctttgctgttcgtgtctttcatgatctggcaagcctgggagcaggataaaaacccgcaacctcaggcccaacagaccacgcagacaacgaccaccgcagcgggtagcgccgccgaccagggcgtaccggccagtggccaggggaaactgatctcggttaagaccgacgtgcttgatctgaccatcaacacccgtggtggtgatgttgagcaagctctgctgcctgcttacccgaaagagctgaactctacccagccgttccagctgctggaaacttcaccgcagtttatttatcaggcacagagcggtctgaccggtcgtgatggcccggataacccggctaacggcccgcgtccgctgtataacgttgaaaaagacgcttatgtgctggctgaaggtcaaaacgaactgcaggtgccgatgacgtataccgacgcggcaggcaacacgtttaccaaaacgtttgtcctgaaacgtggtgattacgctgtcaacgtcaactacaacgtgcagaacgctggcgagaaaccgctggaaatctccacctttggtcagttgaagcaatccatcactctgccaccgcatctcgataccggaagcagcaacttcgcactgcacaccttccgcggcgcggcgtactccacgcctgacgagaagtacgagaaatacaagttcgataccattgccgataacgaaaacctgaacatctcttcgaaaggtggttgggtggcaatgctgcaacagtatttcgcgacggcgtggatcccgcataacgacggtaccaacaacttctataccgctaatctgggtaacggcatcgccgctatcggctataaatctcagccggtactggttcagcctggtcagactggcgcgatgaacagcaccctgtgggttggcccggaaatccaggacaaaatggcagctgttgctccgcacctggatctgaccgttgattacggttggttgtggttcatctctcagccgctgttcaaactgctgaaatggatccatagctttgtgggtaactggggcttctccattatcatcatcacctttatcgttcgtggcatcatgtacccgctgaccaaagcgcagtacacctccatggcgaagatgcgtatgctgcagccgaagattcaggcaatgcgtgagcgtctgggtgatgacaaacagcgtatcagccaggaaatgatggcgctgtacaaagctgagaaggttaacccgctgggcggctgcttcccgctgctgatccagatgccaatcttcctggcgttgtactacatgctgatgggttccgttgaactgcgtcaggcaccgtttgcactgtggatccacgacctgtcggcacaggacccgtactacatcctgccgatcctgatgggcgtaacgatgttcttcattcagaagatgtcgccgaccacagtgaccgacccgatgcagcagaagatcatgacctttatgccggtcatcttcaccgtgttcttcctgtggttcccgtcaggtctggtgctgtactatatcgtcagcaacctggtaaccattattcagcagcagctgatttaccgtggtctggaaaaacgtggcctgcatagccgcgagaagaaaaaatcctgattcggtgagttttcgctaaaataagggcggtcagttgaccgccttttttcttttcgtagggcggataagcaccgcgcatccgccacacaaagcaacaggaacatcatgagcgataatgacactatcgtagcccaggccacgcctccgggacgtggcggcgttggcatcctgcgcatctccggcttcaaagcccgtgaagttgccgaaaccgtgctgggtaaactacctaagccgcgctacgccgattatcttccgtttaaagacgccgacggcagcgtgctcgatcaggggattgcgctatggttccctggcccgaactcgttcaccggcgaagatgtgctggaactgcaaggtcatggcggtccggtgatcctcgacctgctgttaaaacgcattctgaccattcccggcctgcggattgctcgccctggtgagttttccgaacgcgcgtttcttaacgataaactcgacttagcccaggccgaggcgattgccgatcttatcgacgccagttcggaacaggcggcccgttcggcacttaactcgctgcaaggggcattctccgcacgggtcaaccatctggtggaagccctcacccacttgcgcatttacgtcgaagcggcaattgatttccctgatgaagagatcgatttcctctccgacggcaaaattgaagcccagcttaatgacgtgattgccgatctcgatgcagtgcgtgctgaagcacgtcagggtagtttgttgcgcgaagggatgaaggtggtgattgccggacgtcctaacgccggtaaatcgagcctgttaaacgcgctggcgggccgtgaagcagcaatcgtaactgatatcgccggaaccacacgtgacgtgctgcgtgagcatatccacattgacggaatgccgctgcatatcatcgataccgctgggctacgtgaagccagtgacgaagtggaacgtattggtatcgagcgcgcgtggcaggaaattgaacaggccgaccgcgtgctgtttatggtcgatggcaccacaacagacgccgtggatccggcagagatctggccggaatttatcgcccgtctgccagcgaaactgccgatcaccgtggtgcgcaataaagccgatatcaccggcgaaacgctgggaatgagtgaagtgaacggtcacgcgttaattcgtctctcggcaaggacaggtgaaggcgtggaggtgctgcgtaaccatctcaaacagagcatgggctttgacaccaacatggaaggcggcttcctggcgcgtcgtcgccacctacaggcgctggaacaggcagcggagcatttgcagcaaggtaaagcgcaactgttaggtgcctgggcgggtgaactgctggcggaagagttgcgcctggcacagcagaacttaagcgaaatcaccggggaatttacttcagacgacctgctggggcggattttctccagcttctgtattggtaagtaaccgcgcttacgaagccgtattctgactgtcagatgcggcttcgcttcattgttagcactcctgttattcctcaaccctttttttaaacattaaaattcttacgtaatttataatcttaaaaaaaagcatttagtattgctccccgaacgattgtgattcgattcacatttaaacaattttagaatagacaaaattcttgagtattatactgtagcctcgtgtctttcgaggataagtgcattatgaatatcttacatatatgtgtgacctcaaaatggttcaatatcgacaataagattgtcgatcaccgcccttaatttacccttctgtagccatcaccagagccaaaccgattagattcaatgtgaacgattagtttgctatatcttaattttgccttttgcaaaggccatctctcgtttatttacttattttagtaaatgatggtgcttgtatatatacatggcgaattaatggatattgcagatgtaatattcacagggatcactgtaattaaaataaatgaaggattatgtaatggaaaactttaaacatctccctgaaccgttccgcattcgtgttattgagccagtaaaacgtactactcgcgcttatcgtgaagaagcaattattaaatccggtatgaacccgttcctgctggatagcgaagatgtgtttatcgatttactgaccgacagcggcaccggggcggtaacccaaagtatgcaggcagcgatgatgcgcggcgacgaagcctacagcggcagccgcagctactatgcgttagccgagtcagtgaaaaatatctttggttatcaatacaccattccgactcaccagggccgtggcgcagagcaaatttatattccggtactgattaaaaaacgcgagcaggaaaaaggcctggatcgcagcaaaatggtggcattctctaactatttctttgataccacgcagggccatagccagattaacggctgtaccgtgcgtaacgtctatatcaaagaagccttcgatactggcgtgcgttacgactttaaaggtaactttgaccttgagggattagaacgcggtattgaagaagttggcccgaataacgtgccgtatatcgttgcaaccatcaccagtaactctgcaggtggtcagccggtttcactggcaaacttaaaagcgatgtacagcatcgcgaagaaatacgatattccggtggtaatggactccgcacgctttgctgaaaacgcctatttcatcaagcagcgtgaagcagaatacaaagactggaccatcgagcagatcacccgcgaaacctacaaatatgccgatatgctggcgatgtccgccaagaaagatgcgatggtaccgatgggcggcttgctgtgcatgaaagacgacagcttctttgatgtgtacaccgagtgcagaaccctttgcgtggtgcaggaagggttcccgacatatggcggcctggaaggcggcgcgatggagcgtctggcggtaggtctgtatgacggcatgaatctcgactggctggcttatcgtatcgcgcaggtacagtatctggtcgatggtctggaagagattggcgttgtctgccagcaggcgggcggtcacgcggcattcgttgatgccggtaaactgctgccgcatatcccggcagaccagttcccggcacaggcgctggcgtgcgagctgtataaagtcgccggtatccgtgcggtagaaattggctctttcctgttaggccgcgatccgaaaaccggtaaacaactgccatgcccggctgaactgctgcgtttaaccattccgcgcgcaacatatactcaaacacatatggacttcattattgaagcctttaaacatgtgaaagagaacgcggcgaatattaaaggattaacctttacctacgaaccaaaagtattgcgtcacttcaccgcaaaactgaaagaagtttaattaatactacagagtggctataaggatgttagccactctcttaccctacatcctcaataacaaaaatagccttcctctaaaggtggcatcatgactgatcaagctgaaaaaaagcactctgcattttggggtgttatggttatagcaggtacagtaattggtggaggtatgtttgctttacctgttgatcttgccggtgcctggtttttctggggtgcctttatccttatcattgcctggttttcaatgcttcattccgggttattgttattagaagcaaatttaaattatcctgtcggctccagttttaacaccatcaccaaagatttaatcggtaacacctggaacattatcagcggtattaccgttgccttcgttctctatatcctcacttatgcctatatctctgctaatggtgcgatcattagtgaaacgatatcaatgaatttgggctatcacgctaatccacgtattgtcgggatctgcacagccattttcgttgccagcgtattgtggataagttcgttagccgccagtcgcattacctcattgttcctcgggctgaagattatctcctttgtgatcgtgtttggttctttcttcttccaggtcgattactccatcctgcgcgatgccaccagcaccactgcgggaacgtcttacttcccgtatatctttatggctttgccggtgtgtctggcgtcatttggtttccacggcaatattcccagcctgattatttgctatggaaaacgcaaagataagttaatcaaaagcgtggtatttggttcgctgctggcgctggtgatttatctcttctggctctattgcacgatggggaatattccgcgcgaaagctttaaggcgataatctcctcaggcggcaacgttgattcgctggtgaaatcgttcctcggcaccaaacagcatgggattatcgagttttgcctgctggtgttctccaacttagctgttgccagttcgttctttggtgtcacgctgggattgttcgattatctggcggatctgtttaagattgataactcccacggcgggcgtttcaaaaccgtgctgttaaccttcctgccacccgcgttgttgtatctgatcttcccgaacggctttatttacgggatcggcggtgccggactgtgcgccaccatctgggcggtcattattcccgcagtgctggcaatcaaagctcgcaagaagtttcccaatcagatgttcacggtctggggcggtaatcttattccggcgattgtcattctctttggtataaccgtaattttatgctggttcggtaacgtctttaacgtgttacctaaatttggctaaatccttcaggaagccagccatttcgctggcttcttgcctgtcaggaaatcacttatgtccaaatggcaactcgcctgattctccttcaccacgtatgctttgcgtcaccttactatcaggacgctttagcccatgtcccgctttttgatttgtagttttgccctggttttactttatcccgccgggattgatatgtacctcgttggtttaccgcgcatcgccgccgatctcaatgccagcgaagcgcagttgcatattgcgttctctgtttatctggctgggatggcagctgcgatgttatttgccggtaaagtggccgatcgttcagggagaaagccggtcgccatccccggcgcggcgctatttattatcgcctcggtgttctgttcactggctgaaaccagcacgttatttcttgcagggcgctttctacaggggttgggcgcgggctgttgttacgtggtggcgttcgccattttgcgcgacacgctggatgatcgacgtcgggcaaaagtgctgtcattactcaacggtattacctgcatcattccggtgttagcgccagtgctcggacatctgattatgcttaaattcccgtggcagagtctgttctgggcgatggcaatgatgggcatcgcggtactgatgttgtctttgtttattttaaaagaaacgcgccctgcggcccccgcagcttcggacaaaccacgagaaaatagcgagtcgctgcttaaccgttttttcctcagccgtgttgttatcaccaccctcagcgtttcggtgatcctcactttcgtcaatacatcgccggtattgctgatggaaatcatgggttttgagcgcggagaatacgccaccattatggcgttgactgctggcgtcagcatgaccgtttcattctccacgccatttgcgctgggaatttttaagccacgtacgttgatgatcacctcgcaggtgttattccttgcagcggggatcacccttgccgtttcaccttcccatgcggtttctctgtttggtatcacgctgatttgcgccggtttctcggtaggttttggcgtagcgatgagtcaggcgttaggaccattttcattacgcgcgggcgtagccagctcgaccttaggtattgcgcaggtttgcggttcgtcactgtggatttggctggcagcggtggttggtatcggcgcatggaatatgctgatcgggattctgattgcctgtagcatagtgagcctgttactgattatgttcgtcgcgcctggacgccccgttgccgctcatgaagaaatccatcaccacgcttgatctcaatctgctgctctgtctgcaactgctgatgcaggagcgcagcgtgaccaaagcggcgaagcggatgaacgtgaccccttcagcggtgagtaagtcgctggcaaagttaagagcgtggtttgacgacccgctctttgtgaactcaccgctggggctgtcgcccacaccactaatggtcagcatggagcaaaatctggcggaatggatgcaaatgagcaatctgctgctggataaaccgcaccaccagacaccgcgcggcctgaagtttgagttggcggcggaatcgccgctgatgatgatcatgcttaatgcgctgtcgaaacggatctaccaacgttacccgcaggcgaccatcaaactacgtaactgggattacgattccttagatgccattactcgtggtgaagtggatattggtttttccggtcgcgaaagccatcctcgctcgcgggagctgttaagctcgctaccgttagccattgattatgaagtgctgtttagtgatgtaccctgcgtctggttacgcaaagatcatccggcactgcatgaaacgtggaatctggacacctttttacgttatccgcatatcagcatttgctgggaacagagcgacacctgggcgctggacaatgtgttacaggagctggggcgcgaacgcacgattgctatgagcctgccggaatttgagcagtcactgtttatggcagcgcaacccgacaatctgctactggcgaccgcgccgcgctactgtcagtactacaatcaactccatcaactgccgttggttgctcttcctctcccgtttgacgaaagccagcaaaaaaagctggaagttccttttaccctgctgtggcataaacggaacagccataatccgaagatcgtctggttacgggaaaccattaaaaacctttacgcgtcgatggcataaccgaatcgtatgaaacgcgacccaatttcacaataaaatgtaaaaaagttgtaataagcttgtctgaatcgaacttttagccgctttagtctgtccatcattccagtaaatgattactcttatattcataatggaccattaagcatggagcgaaaaatggcgactcactttgcccgagggattttaacggaaggacatctgatttctgttcgtctcccctcccagtgtcatcaagaagcccgaaacattccccctcatcgtcaaagccgttttctggcgtccagaggtttactcgcagaactgatgttcatgctgtatggcattggcgaattgccggaaatcgtcaccctgccgaaaggtaaaccggttttcagtgataaaaatttgccttcgttttctatttcctatgccgggaatatggttggcgtggcgttaacaaccgaaggtgaatgtggcctcgatatggaactacagcgtgcgacgcgcgggtttcatagcccacacgcgcccgataaccacaccttttccagcaatgaatcgctatggatcagtaaacaaaacgatcctaacgaagcgcgggcgcagctcatcacgctgcgccgaagcgtgctaaaactaaccggtgatgttttgaatgacgatccgcgcgatctgcagctgctgcccattgccggacgcctgaaatgtgctcatgtaaatcatgtagaagcgttatgcgacgcggaggacgtgctagtgtggtccgtggcggtcacgcccgcgattgaaaagctcagtgtctgggagttagatggcaaacacagctggaaaagcctgccggatattcacagccgcgccaacaatcctaccagccggatgatgcgttttgcccagctctctaccgtgaagtctttttcgccaaattgatagacaaccacaggagtcattatgtctgaaaaattgcaggtggttacgttactggggagcctgcgcaaaggctcatttaatggcatggttgcacgtaccctgccgaaaattgctccggcgagcatggaagtcaatgcgttaccttccattgccgacattcccctgtatgacgctgacgtacagcaggaagaaggttttccagcaacggttgaagctctggcggaacagatccgtcaggctgacggtgtggtgatcgtcacgccggaatataactactcggtaccgggtgggctgaaaaatgccatcgactggctttcccgcctgccggatcaaccgctagccggtaaaccggtgttgattcagaccagctcaatgggcgtgattggcggcgcgcgctgtcagtatcacctgcgccagattctggttttcctcgatgcaatggtgatgaacaagccggaatttatgggcggcgtgattcagaacaaagttgatccgcaaaccggagaagtgattgatcagggtacgctggaccacctgaccgggcaattgaccgcatttggtgagtttattcagcgagttaagatctaaataaaaaacccgccagcaatcatgcatggcgggtttttaacgcgctatcgattttagtgagcgtcgataaagacaatcttcaggataaacagcagcgcaacgatgattacgcacgggcttagatcacgcagacgtccggtaccgattttcatcacgcagtaggagataaagcccagcgcgataccttcggtaatcgagaagctgaacggcatcatcacggcggtaataaacgccggaacagattcagtaagatcctgccagttcacgcgtgccagactggaagtcatcagcacgccaacgtaaatcagcgcaccagctgcagcgtagcctggcaccatccccgccagcggcgacagaaagataaccagcaggaacagcagaccaacaaccactgccgtcagaccggtacgaccgccaaccgatacgccggaagaggactcaatataagccgtaacggaagaagtaccgataaacgaaccggtcacggaagagatactgtcgacatacagcgcctgcttcatgcgcgggaatttacccttctcatccgccaggcctgctttatcggtcacgccaatcagcgtaccggaggagtcaaacaggttgaccagcatgaaagagaaaatcacccctgccagcccgaggttaaacgacccggctaaatctacatgacccacaactgtcattacgctcggcggcgcagaaacgatgccattgtagtgcacatcacccagcatccagcccagcagcgtcgtcaccacgatagaaaccagcaccgctgcgtgaatgttgcgcgaggccagaatagcaatgatgaagaagccgaggatacccagaagtacgctgtgagaagtcagattaccgatgctcaccagcgtttccgggttagcgacaatcacacctgcgtttttcagccccatcatgccaatgaacagaccgataccgctggtaatacccacacgcagactcaccggaatgttggcaatcatccagtagcgaacgcggaaaatcgtcagtaacagcagacctatcgcgccccagaagattgcgcccatcccgacctgccacggcaagcccatcgcctgtacaacgacaaaagcgaagaacgcattcaggcccatagcgggtgccagtgcaactggcaggttagcaaacagtcccatcataatactgccgaatgcagcgatcagacaggtagtgacgaagacggcgctggtatccatgccagcaacgccaagaatttgcgggttaacaaaaacgatgtaaaccatcgtcaggaaggtggtaaaaccggcgatcacttcggtccgtgccgtcgtgccatgttcgcgcagtttaaacacgcgttccagcatcccctggccagaagcctgggttgtgtgttgttgactcattatctatttccgaacaaggagggaaaatccgtcgctatcgtataccaaaatgagacaatatggacggctgaagataactttttttcattgtatttgcttatacggcaacgattgcgtcatgcgaattggcatgacgaaaacgttaaactaacgataaaggaaagacatgtcccagatagaagcggtatttttcgactgcgacggtacgctggtcgacagtgaagtcatttgctcccgcgcatatgtaacgatgtttcaggaatttggtattacgctcgatcctgaagaggtattcaaacgtttcaaaggtgtaaaactgtacgaaattatcgatattgtttcccttgaacatggtgttacgttagcgaaaacagaagctgaacacgtttaccgtgcagaagtcgctcggctgttcgattcagaactggaagccatcgaaggggctggagcgctcctgtcagctatcactgcgccaatgtgtgtggtatctaacggcccaaataacaaaatgcagcattctatgggcaagctgaatatgttgcactacttcccggataaactgttcagcggctacgatattcagcgctggaagccagacccggcgttaatgttccatgcggcaaaagcgatgaatgtaaatgtagaaaactgcattctggttgatgactcagttgccggtgcgcaatctggtatcgacgcaggtatggaagtgttctacttctgcgccgacccgcacaataagccgatcgttcacccgaaagtcaccacctttacccatctttcgcagttaccggaactgtggaaagcgcgtggttgggatattacggcatagttcttcacactcccttcacttaccccgcttaaattggcgctcaaaggtaagtaaagggagtttgatatgtctgtttcacgtcgggtaatacatcacggactttattttgcggttttaggaccgttaattggtgttctgtttcttgtcctctacatattcttcgcaaaagaaccgctggttcttttgcgaagaatacaggtacttccattgtttctcttattgtcgattactacgggagttattcctgcattgttaaccggcgtgatggtcgcctgtctgccggaaaagatcgggtcacagaaaaattatcgttgtctggctggtggcataggtggcgtcgttatcaccgagatctattgtgcagttattgtacatattaagggcatggcttcctcggagttgtatgaaaacattctttctggtgacagtctcgttgtccgcatcattcctgcattgctggcaggtgtggtgatgagcagaatcattacccgtctgcccggattggatatttcatgtcctgaaacagactctttaagttaagcgggatactttatctttgggctactcaaaagcagacaggatgttactatgactcaaaatatcaggccgttaccccaattcaaatatcatcccaagccactggaaacaggcgcatttgaacaggataaaaccgtagagtgcgattgctgtgaacaacagacgtcagtttattactcgggtcccttttattgcgttgatgaagttgaacatctctgtccgtggtgtattgcggacggttctgctgctgaaaagtttgcaggtagttttcaggatgatgccagcatagaaggtgttgaatttgagtatgatgaagaggacgaatttgccggtattaagaacacatatcctgatgaaatgctgaaagagttggttgaacgcacgccaggttatcatggatggcaacaggaattctggcttgcgcattgtggcgatttctgtgcttttatcggctatgtgggctggaatgatataaaagatcgcctcgatgaatttgccaaccttgaagaagattgtgagaatttcggtattagaaattctgatctagctaaatgcctgcaaaagggtggtgattgtcagggttatctcttccgctgtctccactgcggcaagctgagactgtggggtgatttttcgtagttatttaaataatgagaacaggccggagcgtaattcatacatccggccttatttcttcagcttaatcgagcgctaattctgcggcagcggctttatcagcgattaccatcagcgaaggatgcagctgcaacacggaagctggaacatcttcggtaaccggaccttgcagcacatttttcagtgcctgcgctttacctgcgccactgacaattatcagcaagtttttcgccgccatgatgcttttcggccccatcgtcacgtagctgtcaggcactaacgaaaagtcgccgcccaactcaccatgcgccacaatatcaaccatctctccctggatcgggaactccacggtttgctcatggaaatgggtcgtattcggcaaattgccacaaaaatgaccatctgcacctaatcccagcaccaccaaatccaggccgccttcacgcgccagtttctgatcatgctcgcggtagttatcaatagtgagcttctggatattctcttctttgatccccgcagggtgaaaaacagattacgcagattggtaatcgttacaccttctccctctttgccgcgaaagggaatttcatcggaattatagaaatagcagttatcataccagggcttacctttaaccagggtggtgaggtattcatacatgcctttgggcgtgctaccggcggtaattgccaggttaacacgacgcgtcttcgacatataaccaagcagatggtgtgccgcgacacggctcatttcctggtaatcttcggtaatgattaatttcatcttagtgccttattttatttaaataatttctgtacgaaggctgcataggcaggccgccagacatccatttcatggttcaggccgggatattcctggtaatcaaacttaatttttttctgctcaagctcagttttcagcccggcgatatccttgccggttacgacatctttatcaccaacgaccacagtaaaattacgtagttgctggttaatagctgccggatcgttcagccgggccgcgacaccttcatccggtacggttgtcgtggtaacaccactgaatgtggccagccagccaaagctttccagatgattcattccggaaaccagcgcctggtacccgccttgtgaaagccctgccagcgcgcgaccatcggcatctttacggacattaaaacgcttgctaatcagcgggataatatcgttcatcagttcgcgatctgccgctttagcattcagcggataaaagactttacgtctttcctgaggcacgaaatcttcgggaataatgcccttcgcatcggtttcggtatccgggatcaccaccagcatcggtttaattttcccttcagccagcaggttatccatgatttgcgggatacgcccctgatcgatagcggaacgtccggtatcaccaaaaccgtgatagaaatagagcactggcaaaggctcgcccatgccggtgtatcctggcggggtccagacatacatctgacgttcagattgcaatgcgttggagtggtaagttatggcgatcaaatcaccatgcgcaacagaacgcgtatccagataactgcctggcaccagaatcatactggagttaacctggcgctgaggcttagtcattgcggtgcctgtatcaatgctgcgtacaccatcaacattgaaaaaatactcgtacaggttgcctttcaggataggtgtgcgccacgaccagactcctgcttcgtctttggtcatcgggtgaatattgtccggaaccggaacacccaccactacagagacattttttgccccaggggcaaagtagcgaaaggtcacgctgttatcggcattgacctgagtcacatactgtttcaccgggatagtgggtgccgggctggctggcatatccgctgctatggcccactgagcagaaataccgctggcaatagccagcgttaaagcagcaatttttatattcatcgtaatattcctttcattaagttccattaccaccagatttcagcctgggcaccgacagcaaactggtcgtctttattgtcttcgaaggtgaagccatccagttcgttttccagggctttgatatacgtggcgtagaaacgaatttccggacgcgaggtcaacatactggtattgactttaaaggtatggaagagcgtggttttataaccagactcattaaatttattactattcgcatctttgttttgctgggtgaaatagcccagctcaacacctgtctggttatattggtcccaaatataggccgggcgaacaaccgcacgaatagattcgaaatcagagtgtgcgcctgtttcgtagctataaatatcgttaccgaaggagtaaacaatcgcgttagccacaatgaaatgatcgccgatataggcttcgccctgcgaagtcagacgaactgctgttccgccggtgtgatcaccataataacgaccattaaaggtagtaaatggacttgcgccagcataacggccaaagttactggcgatagaattattcgcgaccaggaaggagaattcgttgaagccacctttatcaaatttctgcgttaaagatgtgccaaacatccaggtatctttccagtcataatacccgttattatcctgattatctttttccgatgcactttcgtttgcagtgacataacgaccgctcaccattaaggtggctttatcccataacgggatatctttatagcgtaaatcaatggtattagtatttatctgctgtttgttttgcaggctgcgatcgtagtcatcgacatcttcacgaaccagcgcgacatcaattttacccggaccgactttccagttttccagacctacacctgcggcagcatcggtacgctgggttttccagtcaagcatctggatttcaattttcggcgcaccatgtttacccacccagaaatcagcctctggcgcaaagggcaggaaacctttggtggtaacgtacatatcggagaactgcataaagttctcgccaccggcgttatcgccaaaccagccggtagagtactgctgaccaacgttaccatccatcatcacaacggcatcaacccgtttgccgttttcgttgtagacacgttgttttaactgcaaatcaaaccagccggagtattcgttaccaaagcggcccagagaaccaatcgcccatgatttaggtgaaccatgagaggcggtcccccaaccagaacggtaatagccgttgtaactaaagccaatttcatctttcacaaacttactgaaatctttcagagtcatggaagaataaatcgagcctgtctcactggcatttttctcttcatttttgaccagtacagcatcaggttttgcggcactactggtcgggaacggattggcggcatacccttgatcattcgtacttacgctacgattcaccgtcgctggcgtatactttttcttctcttcatctttatattttttgagttcgctttgcgtttctcttaacgctttttctaataactcaaggcgatgttccaccgttaatgattcagccaatgattgtgcagaaaaggctaacggtgccattaataagatggcagaggtaataagatttcgtctaaacataatatccctttatggtgcaaagaaagaattaacgtatcgcatccagactgttctgaatgcgacgataattaaggtgctttattggttatttttttaatgacagcccccgcgttttgatcacttctgcataccatccgaagcttttcttacgcgttcttgtgaggcttccttcgccattatcatcacgatccacataaataaagccgtagcgcttagacatttgtgaatgagatgcactgactaaatcaattggcccccaactggtgtaccccataatatccacaccatcggcaatcgcttcatttacctgtaccaggtgatcgtttaaataggcaattcgataatcgtcctgtatcgaaccatccgcttcaacgctgtcttttgcgcctaatccgttctcgacaataaataacggtttttgataacgatcccaaagcgtatttaacagaacccgtaatccaaccgaatcaatttgccacccccactctgaacttttcagatgcggattggggatcatattcagtatgttgccctgcgcatttttattaatgctttcgtcgtgggaaacacaaccagtcatgtaataactaaaagagatgaaatcgacggtatgttttaaatcttctgcgtcactttcagtcatctcaatggtgatattgtggtcgcggaagaaacgctgcatatagccgggatactggccacgcgcctgaacatcaccaaagaacatccagcgccggttctcttccatggcctgcaacatatcctgtggctggcaggtgagggggtaaaccagcccaccgagaagcatattgccgattttcgcttcggggagcaggctatgacaggctttaactgcccgcgcactggcaaccagttgatggtggatagcctgataaacttccgcctcgccactctcttctgccagccccacgcccgtgaatggctcgtgtaacgacatgttgatttcattaaacgtcagccataacgccactttatgttggtagcgagtaaagaccgtgcgggcgtaatgctcgaagtgatcgatgaccgctcgattagcccaaccgccgtagtttttcaccagcccatatggcatttcgtaatgggataacgttaccagcggcttgatccccgcctgcgccatttcatcaaacagccgatcgtaaaacgctaaccccgcttcattcggttcgacttcgtcgccctgagggaaaattcgcgcccaggcaatggaaatacgcagacaggtgaagcccatctcggcaaataacgcgatatcttccgggtaacggtgataaaaatcgatggcgacatctttgatattctctttccccaggatgcgcggttccatttttcccattacgccatgaggctgtaaatctgaggtcgagatccctttgccatcttcctgccaggcaccttccacctgattggcagctgttgcgccaccccaaagaaatgtttctggaaatgctttcataattaactccttttatcgttagcgaatgatggataacagcggttcacctgcgcttatctgcgccgtgccgtggggtaatacgtccgtaaaatcatcgctattactgattaataccggcgtcgtcagatcaaatccggcctcgcgaatagcagggatatcaaaagaaatcagccgatcgcctgtattgaccttgtcacccacgttgacgtgagcggaaaagaatttgccgtccagttttacggtgtcgataccgacatgaatcaggagctccacaccatcatctgactcaatgccaatggcgtgtaatgtggcgaacaacgaagcaattcgacccgcaaccggagaacgcacttcaccaaccgagggcagaatggcgatacctttacccaacaggccactggcaaacgtggtatcagcgacgtgaatgagcggcacaatctctcccgtcatcggtgaacagataccgccctgctcaggtggtgtaataacctctggtgttttctcttgcggggcaccctgcgctggctgacgtttagcggtgatgaaatgaagcatcaccgtaccgacaaatgcgcaaccgatggcaatgacaccgccaataacgctggcccagacggtgaaatcaattcccgttgacgggatggtttgcatgaaggtgaaaatacttggcaaaccaaaggagtagactttcgtttgcgcgtagccaatgatggtggcccccaaagccccactgatacaggcgataacaaaggggtacttacgcggcagattaacgccatataccgctggttcggtgataccaaacaggcccgtcaacgccgctgatcccgccaccacttttttctgcgcatcgcgttcgcagaggaagacgccgagcgccgccccgacctgcgccataatggcgggcattaacagcgggatcatggtgtcgtagcccagcacggtgaagttattgatacatagcggcaccaggccccagtgcagtccgaacatgacgaagatttgccagaagccgcccattaccgcgcctgcaaatgcaggaaccgcctgataaagccagagataaccggcggcaatcagttcgcttatccaggttgatagcggccccaccagcagaaaggtgacgggtgtgataaccatcagacatagcaatggtgtgaagaaatttttgattgccgacggtaaccacgcattaagtcggcgttccagaatgctgcacaaccaggcagaaaaaataatgggaataaccgatgacgagtaattcaacaatgtgaccggaatacccaggaaatccagccccagctcatccgctttttgcccgttctcgaaagcagtcagaattaatggatgcactaacgctccaccaatcaccatggcagtaaatggattaccgccgaagcgtttccccgcggtgtatcccaggattatcgggaagaaccaaaacaaggcatcactggcgctgaataaaattaaataagtaccactttgttcggtcgtccactgaaaagtgagcgccagagccagcatacctttcaggatcccggttgccgccatcaaaccgatcagaggcgtaaaaatacctgaaataacataaacaaagcggtttagcagattacctttctcatcattttccggtgcctgttgcgctttttcgccaaggcctgccacgctgttgaccgccaggaagacatcggccacatggttacctatgaccacctgaaactgaccaccgctttccaccaccataataataccgggggtctttttcagtacctcagcttgcgctttgctttcatcctttaacttaaaacgtaatcgcgttgcgcaatgcatcagactcacaatgttatctgcgcccccgactcctgcgactatttttctggctaactccgtcataacttgccctctaccgctttgcggcaaaactccaaaaaaaaacctgaaaaaaacggcctgacgtgaatcaagcaatttttttcaggttttgcccgcttagtgcggtaacaatcctttactcagtaataatatttcagtgttctttgcgcacgcgctctatatttatggctaaaaacataatctctgcgggtgaaattttacgttgatactgcaaaccaataaaaatggcgatccgttccgcacattgccatgcttgcgggtaattttgttttactgcttgttgtaatgattcatcactatcgttaattgaagcatgttcaagaatacgccaggataaaaacttcagatgtgtaaccagtcgctgataactcaagctttcttcctggtaattaaggctgaactgaaattttattaattgcagcatttcgcgcattaactgcgtgacacctgcaacatcctccatatttccgctcatttgggcactgaccagatgcatggcaataaagcccacttcatctttcggtaactacacgcccaaccgtttatcaataatggttaacgcttcttcccctagctggaactctttcgggtaaagccgctggatatcccacagcaacgggttgggcagcaacacgttttgctgaaagcgtttaatcgcaaactggcaatggtcagttagcgagatataaatactgtcctgtaattttcccaagcgctcctgcgctaaagagataatacgatcacaggttgccatcacctcaagaggaatatgacttaagagttcgcttaatcgcccgttcagttcatgactgctcaaggcatactctttttctattccacttgagttaattctttcgccagcgcgtttttgaaagccaattcctcgccccatgacgactttttcccgctgttgatcatcaataaccaccacaacattattgttgagaattttggtgatttgcatgttcatagcaaggaccttttttataaacaaaaaaacccgacttcaccagtattctctggttatgtcaggttttgcctgcgaatgcagtaacaatccagtcatttattaatggtttttataacgaacatccaggttcggaaattaatttaattgcgtgcagagaaaatagcaatgcgctattgataaaaatatgaccatgctcgcagttattaactttgtgtaattttaggaatttataaagttatatataacaaatcccaataattaagttattgggatttgtctggtgaattatttgtcgctatcttttcccgccagcagtttatccagctcatcaccgcctacatgacggaaatcctgccccttcacgtagtagaagataaactcacaaatattctggcagcggtcgccaatacgttcgatagaacgcgcgcagaacagcgcagtaagtacgctcggaatggtacgcgaatcttccatcatgtaggtcatcagttgacgaacaataccttcgtattcctgatcgacttttttatcttcacgataaatacgtaccgcttcgtcaatgtccatccgcgcgaacgcgtccagcacgtcgtgcagcatctggatggtatgacggcccagcgactccagacttaccagcaacggctgatgctgctgggagaatttctccagcgcagtacggcagattttgtccgccacgtcaccaatacgctccagctcggcaatggttttactgatcaccataaccagacgcaggtcgctcgccgtcggctgacgtttggcaataatgcgcacgcaggcttcatcgatcgccacttccatcatgttgacgttcttgtcgccttcgatcacgcgcttcgccagatcgctgtcctggttatgcatcgcggtgattgcatcagaaagctgctgctccaccatgccgcccatggtcatcacctgcgtgcggatactttccagttcggcgttgaactggccggaaatatgtttattaagattgagactgtccataacgcactcctgaatcaaccgtaacgaccggtgatgtagtcttctgtttgtttcttcgctggcttggtgaacagatcgtccgtgttgctgaactcaatcaattcgcccaggtacataaaacgccgtgtggtcggaacaacgcgcagcctgctgcatgttgtgggtgacgatcaccacggtgtaatcctgcttcagttcggtgatcagctcttcaatacgcccggtagagatagggtcgagcgccgaacacggttcgtcgagcagcagcacttccgggcgaatggcgataccacgcgcaatacacagacgctgttgctgaccaccagagagagagtaaccgctctggtgcaatttatctttggtttcgttccacaatgcggctttggtcaatgcccactgcacgcgctcgtccatgtcggcacgggagagcttctcaaacagacgaacgccaaaagcgatgttgtcgtagatggacatcggaaacggcgtcggtttctggaacaccatgcccactttcgcacgcagcagggcgatatcctgagagttggtcaggatgttgtcgccatcaagcagaatttcaccttccgcacgctgctccggatacagttcaaacattttgttgaaggtacgcagcagcgtcgatttaccgcagccggacggcccgataaacgccgttacctggtttttagcgatatccaggttgatgtttttcagggcatggaatttgccgtagtagaagttcaaattacgaacctgaattttactcggggcagtttcaaccatactcattgcaatcttttcctcatcgtgcctgatgcacttcgctaatcaggcttaccgtaggccggatcaggcgttcacgccgcatccggcaaagtgttaaccgtgtttattcttcgcaaaaacaacgcgcgccagaatgttcagcagcagtacgcacagggtaatgatcaataccccggcccaggccagttgctgccattccgcaaacggactcatcgcaaacttaaagatcgtcaccggcaggttggcgatcggctgcatcatgtccgtgctccagaactggttggagagcgcggtaaacagcagcggcgcggtttcaccagcaatacgggcaatcgccagcaagataccggtcatgatcccggacaccgacgctttcagcgtaatcgcggagatcatcttccacttcggtgtacccagcgcataagccgcttcacgcaggctgtccggcaccagtttcagcatgttctcggtggtgcggataacaatcggcacctgcaacagcgccagcgcaattacgcccgcccagccggagaagtgctccatctgtgccaccacgatggtgtagacaaacagaccaaccacaatcgacggcgcggagagcagaatgtcgttaatgaagcgaatcacttctgccagccaggatttacgaccatattccgccagataaatccccgccataatgcccagcggcgtaccgaataccgtggcccacaaaattaacagcccgctacccgccagggcgttcgccagaccaccaccttccgtattgggcggcggcgtcatttcagtgaacagcgccagcgacataccgtcgataccgcgagtgatggtggacattaaaatccagatcagccagaacaggccgaaggccatcgtcgccatcgagagcgtcagcgcaatacggtttttgaggcggcgacgcgcctgcattttgcggcgagattcagccagcgccgcagtggtttgcatttcaaccatagccattagcgtgccccctcattcttagccaggcgcataatcataaacttcgatgcggcgaggacgatgaaggtaatcacaaacaggatcaggcccagttccatcagtgcggcaacgtgcagaccggattccgcttccgcaaattcgttcgccagcgcagaggtgatactgttgcccggcatatacagcgaggcgctgtcgagctggtaggtgttaccgatgataaaggtcaccgccatggtttcaccgagcgcgcggcccagccccagcatgatgccgccgataacaccatttttggtgaacggaagaacgatacgccagataacttcccaggtggtgcagccaataccgtaggccgactctttcatcatcaccggggtttgttcgaacacatcacgcattaccgccgcaatgtacggaataatcatgatggcgaggatcacgcctgccgcgaggataccgataccaaatgcggggccagagaacagcgcgccaacaatcgggatattcgacatgatattgccgaccggctcctgaaagtaaacggcgaacagcggcgcaaagataaacaggccccacatgccgtaaacgatacttggaatggctgccagcagctcaatggcgatacccagcgggcgtttcagccagccaggcgcaagctcagtcaggaacagggcgataccgaaactcaccgggacggcgatcagcagcgcgataaacgaagtcaccaacgtaccgtagatcggcaccagcgccccgtagatatcgttcggtgcatcccactctttggtccataggaaagccagaccaaatttctgaatgctcggccaggaggagatgatcagagagacaataatgccacccaacatcaatagcacaatcagcgccgccagttttaccagcacgctgaaaattatgtcgccctttttacccggtgggttaaaagcaggcttggttgcagccataagttactcttcagttaaacgcgtttacaaagtcattttgtaatgccggatgcggcgtaaaacaccgtacccggcctggagttttattagtacagcggcttaccgctactgtctttaatattggtcttccacgcagcgcgaacctgttcaactacactatccggcaggctggcgtaatccaggtcgttcgcctgtttagccccggttttgtacgcccagtcgaagaatttcagcacttctgtgccttgttctggtttcttctgatctttgtggatcagaatgaacgtggtagaggtaataggccatgcatcttcgcctttctggttggtcagatcctgagcgaaggttttgctccagtctgcaccttttgctgcattagcgaagttttcttcggtcggactaaccggtttaccatcagcggagatcagtttggtgtacgccaggttgttctgcttcgcgtaagcatattcaacataaccaattgcacccggcagacgctgaacgaacgcggcgataccgtcgttacctttaccgcccagaccgatcggccattttacggtagagccagtaccaacgttgtttttccactcttcgttcactttcgccaggtagctggtgaagacgaaggaagtcccggagccatctgcgcggcgtactacagcaatgttttgtgaaggcagtttcagacccggattcagtttggcgatggcttcatcatcccacttcttgattttgcccaggtagatgtcgccgagggttttaccatccagcaccagttcgccagacttcagccctggaatgttaaccgccagcaccacgccgccaatcacggtcgggaactggaacagaccttcctgagccagtttttcgtcagacagcggcgcgtcagaggcaccaaaatcaacggtattagcgataatctgttttacgccaccggaagaaccgataccctggtagttaactttattaccggtttctttctggtaagtgtcagcccatttggcatacaccggcgcagggaaggttgcacctgcacctgtcaggcttgcttctgcaaacacagagaaagcgctcatcgataaggtcgcggcgacaacagttgcgacggtggtacgcataactttcataatgtctcctgggaggattcataaagcattgtttgttggctacgagaagcaaaataggacaaacaggtgacagttatatgtaaggaatatgacatttttatgacagaaaggaattaccaaataacttactgattttaaatgtgaagatgaaaatcccacatgtcatctttttgtcatgatgcatttaaaagtgataaagaaatgggtgagatgacaacgatgtgatgaacaatcgttgtcagacctattagcgcacaatctcaacagttatcgtcgctgttgcagtaaattgccccggggatgggcgagctccagtaaggctcgcaggagcagctgaaaaagttacactacctgatttttcaccatacactgttgatttacccatgtctgttggcaactcaccaccgttcactttgatttccttattatttttgtcgtaaatttttatccccacgttagagtttgaagttacgaccattgaattgtccgtattgggttcggtagcataaaaagacgtactgatatcatcggtattcagtatccccaggttttcacactcaatagtgaccgttttagtaattttatgtgttgttaccgcacttccaacaacagatgaaaaatctgcagctggtatttctttaaaatcaaaataaactggctgtaaattatttatttcgcaactttgcggagctgtaatatcgcccgaatataaacatcagccatcggctgtgagtaatccaccggggtgtcacggctaattgttccatacaatgtcactatctttgcttcaggaataatcaattttcctgcaaatgtcttcttgatataaaaatatactatcgctttagccccactagatatacttaaaggttcaatgcggttgcaattgtactttgtattaccagacgggttgttagcatgatattcaaaaggtgcattcacatacccaaccccaagaatatctatagcaatcccaacatcaaggttcggattaagatcataataattaatattagagtgaaccccagcataagttaatgcctggtttatttttgacgtataatagatataggggaattctcctacgttaccagtatcacaatgacagcgtccaggatatgaggatccattagttacagtggtgttaaatgtcgttccaaccttattttcgttcgcggtaataagatatcccgagaaatcaagcgtactgtgaaatacgccattatcaggggtacagatacctttaggagctgcaagtgctacactacttaacgagagcataaacacagcaaagcaccactgtttgatatacttgttcataaaaatccttttaatgacatgtcacaccctgttcaattaatccgctctcactttctggtgtcgaaagtgaataattgaagatgcattttgttgaggcgttttctccccaggataacgtaacctgtcctttttctggtagaccagaaagataaagttcgccacggtcaccgacaattcctgaatctgccaaacttgcatcttgtatcgcagcaatggctccaaaaggtaccggtttaccatttgcatttaacactctgaagagaacgcgataacccacatgagtcacaaactccgctttaaccactgcaccacgcgtgggaaccatcgtaacgacggtattatcaagttctatattcgacttcgagaaatagttatcgctgattgctacccgattttcatcataagggtttagctgtgtcttgaccgtatagccgcgccagtccgtcgcagcaccgcgcatattatctatttctaacccggcggccccaggtgctttaacaagagcaatagtttcacctaactcctgacttaacgttaccccttcgctgtgtgccagaattccccctctgataccataattcagcctctgggaattttggctgtagttatagctgccgttcaccgtgccataagagccatcataggtcagggacatattaccgccaacctcatcatcatgactgttataggactgcattaaattccatgaaaggttatttctttccagcgccgtaccgctgagtccgagttgatgtgagctaccggaattatcgttttgcgaaacagaataggtggcgtaactattaccccaccagcccgataaaggaacagataaagagagcatgtagatctgctcactggtgttatcactggcatggttgttccccgtcccctgtctggcagtattggaataactccaggagacgttccacgagagacgcttccagctactgctgtagccaaattgcattaatcgttcgacatcatcggtatgccagtattgttgccggcttaatgtcaggtataaattgccataatctctccccaacgactgcgttagcgttccctccacgcgactacgtcggttacctgtttcccaaaagtcttcaggctgttgcgccgcgatgcccactcattgagggtatagtagccctcggtggagtaacgatagccaaccaggcgcaagctagtgtctgtgtcgtcaaatcgttttgaatagagaaagcgatatgactgacccgtttctgtatcatcatggctaaaattcgcacgagcatgtgtcacatcgaaagaaattgcgcccaaagcgccaagatctttaccgacacccagagctgcagaaccataattttcagcagcctgcatacctccatataaagtgatcccgtgggaaaaaccatgaagtatttgcgcctgaaggacgtccggtgtaaatccgtcttcatcgcgcaattcacccacgctgacatcaacatctgtctgaccttcacgtttaagaatcgccaatgaagcataaggttgggtgaatcgttgttcgctaccgtcttcttctttgatggttacgtccaaatcgccacctgtactggcggtgttgagatcggtgatctcaaaagcaccttgtggaacggcagactgataaatcacgtagccattctgccgaatgatgacggtggcgttggactttgcaatcccacgaaccacaggagcaaagccattctggctggcgggtagcatatcgttatcagtatacaaacgcgcgccgcgaatttgcgtactgtcgaaaatatcgctcgccgtccatgtatcaccaatcataatctggcttcttaacgcggcaatatcgcgctgtatccaggtactaatggagttgtattccgcacggccatcgctggtgtttaaagtactgtaattacgtagccgccacggtccaatattcagtccattgcgcagattgagataactggtatctgtctcttgtgaaccataatctgaacgtagtgtatgtgaaccagaaaaatcgtagttgatggtgagcgcgttaatcccctcatcccaacgcgtggggctgatgtaatcataagccatcgcgtccatgtagatttggggaatggatatattcagctgcaatttatcactgtcaaactgccaggatgagccttcaatacgtggagcaggatcgaggcaaaccgtctcatccacatcattgaacgatttgagcgcatcaacttttatgccaaaggaggacagtgtttttttaatggcaataaagcaagcgtgcagatcagcatctggattatcctgaacaaatgtcacatcctgacgttcaaacattttaccgttgataaaaatatcaacgctataaacacctgggggcatcaggtttgcccgattaaactggcgaatatcgactccggattgatggtcgatttccagaagcgccggattgaatacactgacctcggccatcaggttttgcgagaaaatcagacacgtccctgccgtgaggccaaccactattctggtcgtcatcataatacgcctatccttatcccttgcttacagcgtcatttttatcgggtcactgactgcgccgtaatcattaataaatcgccaggtcatttggcctcccgcagaattagcaggtaaaggtaacgtgagcgtttcaaaaggacggatcatattgaggggcacatcatggccatcaacgatgacatccatcacactgatatgaattgggttgggattctctgctatcagatttcgcccttcccggcgccatttcactttcggcgcagcatcttcgggaataaggcggatatttgctggtcgccagaacagcttgatacgcgtttttactgctatttccagcgagttcgtcgctttgttgctcgctgatggcggaatatttttaatattcagccagaagactgactcgcgatcatcaggcaatgacacacctttggtgtgaataatgcgtaatattttttcttgcgaaggttctaatcgtgatactggcggaataacggtaaacggcgctttgcttttatcctctttattaaatggatctacccaagcctggatgagataaggtattttttcttctttgctaaatacagaaatagatttatcagcattattacttaagtaaaccacccgcgtaccaccaatgacaacgcctgcataagttaatgctggttggcctaaaaaaacgctgagtataatcgcggtaaataacttacatgaaactgttgttttaaagagcctgattaaacaactttttctggacataacgactccctggccaaagccaactgaataaaaaggcccttgataaattatttcttatattcgacagtaaattgtgaatccgcgttcgccgtaccagccgttacggtcgcattggttgccacatagcgtgcaataaacttcatttcagccttgccttcagcatcgatagcggtataagcagagtcgttataaagtttaacctgcgaattatcggactggttaaaaatacgaataccaacgccggttgccgcaatcgcttgtcctgtaccggtaatatcaccagggttgcctgctgtaagcggcgtacccactttcaggtcgccgtcgccgccaggcgcttctgtaccatcaaaacgaacggctgcttgagtgtacgttgccgggcaattttcaagtttaatactgaacttctgtggcgacgccagactacctacacctgaaaatgcatttttactgactttacccagtgggacaatttgatcggctgtatcggaggtaacttcacaagtagtgtcgacaatttcaccgacgaagtgaacaacaccatcttctgccagtgcatgcccggccagcattagagatgccagagtgaatgcaccgcctataatattacgcttcataaaaactccattgatataatatatcctttaccatgaatcatcacttatattaataagtgtatttttgattcaaaggaatagtacaccaaagagacggctttatctaaaaataatattaattnngcnnnnnt

SEQ ID NO: 204 - DNA, 32331 bp, Escherichia coli
  modified_base (4)..(8): a, c, t, g, unknown or other
  modified_base (15)..(15): a, c, t, g, unknown or other
  modified_base (28)..(28): a, c, t, g, unknown or other
  modified_base (36)..(36): a, c, t, g, unknown or other
  modified_base (38)..(38): a, c, t, g, unknown or other
  modified_base (47)..(47): a, c, t, g, unknown or other
  modified_base (51)..(52): a, c, t, g, unknown or other
gttnnnnnattattnaaacagtaaaaantcaagttngntatcagacnttanngataattcagaatatatttatatagaaagatagatgaatttattgatgtcagttataaaaaagggccaccggtcggcagcccttttttatctatgatagtgattactcaaccgtaaccgattttgccaggttacgcggctggtcaacgtcggtgcctttgatcagcgcgacatggtaagccagcagctgcagcggaacggtgtagaagatcggtgcaatcacctcttccacatgcggcatctcgatgatgtgcatgttatcgctacttacaaaacccgcatcctgatcggcgaagacatacaactgaccgccacgcgcgcgaacttcttcaatgttggatttcagtttttccaacagttcgttgttcggtgcaacgacgataaccggcatatccgcgtcaatcagcgccagcgggccgtgtttcagctcgcctgcagcgtaggcttcagcgtgaatgtaagagatctctttcagcttcaatgcgccttccagcgcgattgggtactgatcgccacggcccaggaacagcgcgtgatgtttgtcagagaaatcttctgccagagcttcaatgcgtttgtcctgagacagcatctgctcaatacggctcggcagcgcctgcagaccatgcacaatgtcatgttcaatggaggcatccagacctttcaggcgagacagcttcgccaccagcatcaacagcacagttaactgagtggtgaatgctttagtggatgccacgccgatttccgtacccgcgttggtcatcagcgccagatcggattcgcgcaccagagaagaacccggaacgttacagattgccagcgaaccaaggtaacccagctctttcgacagacgcaggcccgccagggtatccgcggtttcgccagactgtgacaaggtgatcatcaggctgttacgacgcacggcagatttgcgatagcggaattcagaggcgatttcgacgtcgcacggaatacctgccagcgattcaaaccagtaacgggaaaccataccggagttataagaagtaccacaggcgaggatctgaatatgctcaaccttcgacagcagttcgtcggcgttcggtcccagctcgcttaaatcaacctgaccgtggctgatgcgcccggtaagggtgtttttgatcgcgttcggctgttcgtagatctctttctgcatgtagtgacggtaaatacctttatcgcccgcgtcatattgcagattggattcgatatcctgacgttttacttccgcgccagttttatcgaagatgtttaccgaacggcgagtaatttccgcaatatcgccctcttcaaggaagataaagcgacgggtcaccggcaacagcgccagctggtcagaagcgataaagttttcgcccatacccaggccaatcaccagcggactaccagaacgtgccgccagcagggtatccgggtgacgggagtccatgatcactgtaccgtacgcaccacgcagttgcgggatagcacgcagaacagcctcacgcagagtaccgccctgtttcagctcccagttaaccagatgggcaattacttcggtgtctgtttcagaaacgaaggtatagccacgcgcttttaactcttcgcgcagcggttcatggttttcgatgatgccgttatgcaccaccacaatgtgttcagaaacatgcggatgcgcattcacttctgaaggttcaccgtgggtcgcccagcgagtatgagcaatacccgtaccgccatgcagaggatgttcttccgctgcctgagccagcatctggactttaccgaggcgacgcaggcgggtcatatgaccttccgcatcaacaacggccagaccggcagagtcatatccgcggtattccagacgacgtaaaccttcaagaaggatttctgctacatcacgttgcgcgatcgcgccaacaattccacacatagtttttgattccgatttatatcgttgtcggtcaacctgtatgcccgtttttcgggcgccccgagccttgtagagagtggggttatttttatagttactgcttgtgggagggagattatgttatctcctcatcccatgtgaccggattacccggccagaatcactttttctttaccggacgacgccagccttctttctgagtctgcggcacacggctgatagctaatgcattttcgccgacattacgcgtcacagttgtacccgcagcaatggtcgcgcctttgcctactgttaccggggccaccagctgagtgtcggaaccgacaaacacatcgtcgccgataatggtcttaaatttattcgcaccatcgtagttgcaggtaatggttcccgcgccgatgttaacgttatcgccaatttccgcatcgcccaggtaagtcagatgaccagctttcgagcctttacccagacgcgcttttttcatctcaacaaagttaccgacgtgtgcaccttccagcaactcagcaccaggacgcagtcgggcaaacgggccaatagtacaggccgctgccagattcgcgtcttccacaacggtatacggactgatttcgcaatcatcgccaatcacgctgtttttaatcacgcaaccggtgccgattttcacgcgatgaccgagagtcacgttgccctcgatgataacgttagtatcaatttcaacatcgcgcccgtgagtaagcgtaccgcgcagatcaaaacgcgccggatcgcgcagcataacgcctgctaacagcagtttttcagcctgttcggactggtaaacgcgctccagacgggagagttgcaggcggttattcacaccttctacttcgcttaaacgttgcggatgaacggcgacgatttcacgcccttcctgatacgccagcgcaataatgtcggtgatgtagtattcaccctgagcgttattgttggtcagcttcgccagccagcgtttcatatctgcgccgttagcgatcagaatgccggtgttgatctcctgaatctgacgcagctcgtcggtggcatctttgtgctcaacaatgccggtaactttgccattttcacgggtgatacgtccataaccggtcggatcatccagtttcaccgtcagcagaccaatgccaccctgcggtttagcatcacgcaggcgctggagtgtttcgacagagatcagcggcacgtcgccgtagagcattaaaatgtcttcatcatcggcaaagaaaggtgcggcctgctgcattgcatgacccgtacccagctgctctgcctgaagcacccagttaaggttgtcgtctttcagcgcctgtttaagcagatcgccgccgtgaccgtacaccaggtgaacgtgcgctgcgcctaattcattcgcagcatcaatgacatgctgaaccatcgctttcccggcaagggtatgcagcactttcggaagatcggaatacatgcgcgtgcctttgcctgcggcaaggatcactacgctcatagcattattcaacatacgcgtcctgactgtaatttgagaacgaatttaaaccgcttcaccttgaaaaaactacatttttttcatcgtgaaatggacagaggataaattgttcaataacggattatccccgctgacgaaagtgccattttcgaccatcgtcacgccttttgtctgcagaaaattaaggcagtaccttcatttaagcgtcaggtggatgtttttgctcttatttcgatcaatgaataaacgggaaaacaggggtgttttatatcagcaggatctatgtgaacgctcttcaggacggatcacgcgtaaaaaaaagccagcctgtttccagactggcttttgtgcttttcaagccggtgttacatcgcttttttggtcaactcgataacgcgcagctgcgcgatcgctttggccagttccgcagacgcctgagcgtaatctacgtcgccgtgagagctgctaatgtgctcttcagccttacgtttcgcttccatggctcgcgcttcgtcgagatcctggccgcgaattgcggtgtcggccagaacggtcacgttgccaggctgcacttcaagaatgccgccagacagatagataaactcttcgtgaccgtgctgtttcacgatgcgaatcataccaggcttaatggcggtgagcagcggtgcgtggccagggtagatccccagttcaccttcgctacccgttacctggattttctcgaccagaccagagaacatttgttgctctgcgctgacgacgtccaggtggtaagtcattgccatatcaccctccgattaaggcgttaaagttttttggctttttccacagcttcttcgatggaaccgaccatgtagaacgcctgctccggcaggtgatcgtattcgccttccatgatgcctttaaagccacggatggtgtctttcagggagacgtatttacccggagaaccggtgaatacttctgccacgaagaacggctgggacaggaagcgctggatcttacgagcacgcgctaccaccagtttgtcttcttcagacagttcatccatacccaggatggcgatgatgtctttcagttcctgataacgttgcaggatggactgaacgccacgcgcggtgtcgtagtgttcctgaccaaccaccagcgggtccagctgacggctggtggagtccagcgggtcaacggccgggtagatacccagagacgcgatctgacggctcagtaccacggttgcgtcaaggtgcgcaaaggtggttgccggagacgggtcagtcaagtcatccgcaggtacgtataccgcctgtacggaggtgatagaaccagttttggtggaggtgatacgttcctgcagaacgcccatctcttccgccagggtcggctgataacctaccgctgaaggcatacggcccagcagtgcggatacttccgtaccggccagggtgtaacgatagatgttgtcaacgaacagcagaacgtcacgaccttcgtcacggaatttctcagccatggtcagaccggtcagagcaacgcgcagacggtttcccggcggctcgttcatctggccatacaccagggatactttgtcgataacgttggagtcggtcatttcgtggtagaagtcgttaccctcacgagtacgttcacctacgcccgcaaacacagagtaaccggagtgctcgatcgcgatgttacgaatgagctccatcatgtttacggttttacctacacccgcaccaccgaacagaccaactttaccgcccttagcgaacggacacatcaggtcgataactttgataccggtttccagcagttcctgagagtttgacagctcttcgtaggaaggtgctgcgcggtgaatcgcccaacgctcttcttcaccgatctcgcctttcatgtcgaccggttcacccagtacgttcatgatacggcccagagtcgctttacctaccgggacttcgatcgggtgttcgaggtcttttacatccagaccgcgacgcagaccgtcggaggaacccattgcgatggtacgcacgataccgccgccgagctgctgctgaacttccagcaccagacgctcattaccattttgcacctcaagagcatcgtacacgcgcggtacggcatcctgagggaattcgacgtcaactacggcgccgattacctggacaatctttccagtagccatcttaaatcctctacgaaataacctgtttaaaccgcggcggcccccgagacgatctcggtgagttcctgagtaatgctggcctgacgagctttgttgtataccaactgcagctctttaatcaggctgccgccattgtcggtcgcggctttcatcgccaccatacgggcggcctgctcgctggccaggttttcaaccacgccctgataaacctgagattcgacataacgacgcagcagggtatccagcaacgccttcggatcgggttcgtacaggtaatcccaggatttatgtttcagatcatcatcatctgatgccggtaacggcagcagctggctgatggtcggaacctgagacatggtgttaataaatttgttgctgacaatgtaaagcttgtccagacggccttcgtcgtaggcctgcaacatcacttttaccggaccgatcagttcggacagggaagggttatcccccatgccggtgacctgggcaacaacattgccgcccacggagttgaagaacgacacgcctttcgagccgatcattgcgaggtcgcattgaacgcctttgtcggtccaggtcttcatttccgccagcagttttttgaacaggttaatgttcaaaccaccgcacaaaccacggtcggtcgacaccaccaggtagcccacgcgtttaacgtcgcgttcttccaggtatgggtgcttatattccagattaccgtgtgcaaggtgaccaatcactttgcgcatggtttctgcataaggacggctggccgccatgcgatcctgcgatttacgcattttggaagcggcgaccatctccatcgctttagtgatcttttgcgtgttctggacgcttgcgatcttactacgtatctcttttgcgccggccatgagcttctcctcaatgccttgcggcctgccctaaggcaagccgccagacgttaccaggattgggttgctttgaaggaatcgaggatgcctttcagcttgccttcgatttcgtcgttgtagccaccggtctggttgatctcttgcatcaacggagcgtgatcacggtcgacgtaagccagcagagcggcttcgaagctgccaattttcgacagttcaacatccgccaggtaaccacgttctgctgcgaacagaaccagagactgctgcgcaacggacatcggcgcatactgtttctgtttcagcagttcggtcactttctgaccgtggtcaagctgcttacgtgttgcatcgtcaaggtcggatgcaaactgagagaacgctgccagttcacgatactgtgccagagcggtacggataccaccggacagttttttcatgatcttggtctgtgctgcaccaccaacacgggatacggaaatacccgggttaaccgcaggacgaataccggcgttgaacaggttggtttccaggaagatctgaccatcggtaatggagattacgttggtcggaacgaacgcagaaacgtcacccgcctgagtttcgataatcggcagtgcggtcagagaaccggttttccctttcacttcacctttggtgaaggcttcaacgtattcggcgttaacacgtgcagcacgctccagcagacgagagtggaggtagaaaacgtcgcccgggaatgcttcacgtcctggcggacgacggagcagcagggagatctgacggtaagcaacagcctgtttagacaggtcatcgtaaatgatcagcgcatcttcaccgcggtcacggaagtattcgcccattgcgcaaccggcatacggtgccaggtattgcagtgcagcggattcagacgcggttgctaccacaacgatggtgttagccagtgcgccgtgctcttccagtttacgtaccacgttagaaatggtggacgctttctggccgatagcgacatagatacatttgataccggaatcgcgctggttgatgatggcatcgatagccagtgcggttttacctgtctgacggtcaccgatgatcaattcacgctgaccacgaccgattgggatcatggagtcaacggctttataaccggtctgtaccggctgatctacggactgacgttcgataacgcccggagcgattgcttctacagcagagaagccgtcgtgatccagcggacctttaccgtcgattggtgcacccagagtgttaaccacacggcccagcaggccacggccaaccggaacttccaggatacggccagtacacttaactttcatgccttcggcaaggtcagcgtacggacccataacaaccgcacctacagagtcgcgctcgaggttcagtgcgatagcgtaacggttacccggcagggagatcatttcaccctgcatacaatcggccaggccgtgaatgcggataacaccgtcacttacagaaacaatagtaccttcgttgtgagcttcactcacaacattgaactgagcaatgcgctgcttgatcagttcgctgatttcggtggaattcagttgcatgctccagtccccttaagactgcaagacgtctgcaaggcgctcaagacgaccgcgtacgctgccatcaatgaccatatcacccgctcggatgataacgcctgccattacagacttatcgattttgcaattcagcttaactttgcgtgacagacgtttttccatcgcagcagaaattttcgcgagctgttgttcactcagtgcggcagcggaaatgacgtctacctcagcggtagcctcactcacggcacgaaggtgaataaactgctccagaacatccgggagcgcgttaagacgaccattttcagccattacccgaatcaggttctgaccgttttcgtccagttgctcaccacaaactgcgataaacgactcggcgagcgtttctggcgcaagcgcgccagagagaagctctgccatttgttcgtttttggttacctcggcggcaaacgccagcatgtcctgccagcgttctacactttggtgttcgacggcaaagtcaaaagctgctttggcgtaggggcgagctaccgtaataaattcagacatcagcccctccctccttacagttcagcgacaagtttatccacgatgtcgctgttagcagcttcatccacggaacgttcgatgatcttctcggcgccagcaacagccaggatagcaacttgcttacgcagctcttcacgggcacgtttacgctcggcttcaatttctgcctgcgcctgggccacgattttagtacgttcctgttctgcctcagctttcgcttcgtccagaatctgcgagcggcgtttgttcgcctgctcgatgattacctgggcttccgctttcgcttttttcagctggtcggtcgcgctggcctttgcaaggtcaaggtccttatgtgctcgttctgcggaagcaaggccgtcagcaatttctttttgacgtttttcgatggctgccattaatggcggccatacgtacttcatgcagaacagaacgaacaggacaaacgcgatggcctggccgaggattgttgcgttaagattcacagcacaatgcctctatttagttaacgttctgatattgctctttaaataaaagcaacgcttactacgcgacagcgaacatcacgtacagacccagacctacagcgatcatcgggatagcatccaccagacccataacgataaagaactgagtacgcagcagaggaatcagatcaggttgacgcgctgcgccttccaggaatttacccccgaggatgccgataccgatcgcagcaccgattgccgccagacccatcatcacagcggcagccatgtacagcagatccatattcaggttttccatgacagtctccagtttgtttcagttaaaacgtagtagtgttggtaaattaatgttcttcagacgccatcgacagatagacgatcgtcagaaccatgaagatgaaggcttgcagcgtaatgatcaggatgtggaaaatggcccacggcacattcaggatccactgtgaccaccacggcaacagaccagcaatcagaatgaaaatcagctcaccggcatacatgttaccgaacagtcgcaaaccaagtgaaactggtttggacagcaggcttaccccttcaaggattaagttgacaggaatgaacgcccagtgattgaacggctgcagcgtcaactctttcgtgaagccgccgatgcctttcattttgatgctgtagaacagaatcaggataaatacgcccaatgccatagacagcgttacgttcacgtccgcagacggaaccacacgcagtgcaggcagacccagtacatgttcagcaatgtacggcagcaggtcgataggcagtaaatccatcaggttcatcaggaatacccagacgaagatcgtcagggccagcggagcaatcagcttgcttttgccatggtacatgtctttcacgctaccattaacaaagccgatcaccagctcaatcgcggtctgaaacttacctggcacaccgctggtcgcctttttggctacgctacggaataaaaccaggaacaacagacccagcaccaccgagaagaacatggagtcaatattgattgtccagaaggtggctggggggttttgtggatccaccagcgagaatgtacgcaggtccagctgaaggttattcaggtggtgtcctatgtaatcctgcggcgtcatattttctgaagccatgatgccttttaccctttgttgttaattacagccggtgccagtatctgaaccaccagcaccaaaacccacgtaacgatcagcggcaagaataccgcctttaaaaccgccaacgccaccaccagtaacaccaacatcgccagaactttgaaagcttcgccaaatgcgaatgtccaggccacccggcctttcgctggtgtatgcgcctggtgacgccaggcaaatatcataaacaaaacgttaggcagaaagactgccaggcccccgcttattgcagagacgccccagaaggggtctttgaggctgaacagcaatccacttgctatcaccaccagtaactgaacgagcagaagcttccgagcaacgtttcgactcacgagcgacacagacatcacgtttttcactcctgctcccttcgaggtatgccgcgtgtcgtataaaactttctttaaggcttagagtcaagcatcaaaaagcggtcaaattatacggtgcgcccccgtgatttcaaacaataagtagccaaaaggtgaataaatgtttaaatatttttccagtgcatacaattgcgacttttctgctaaccctgttcgatcatgaaaaactgtaaataacgcgtaaacactggtgataaagcgtgcttcagatcacatattgcgcatgttcgcgcacagcatatttatttacttggcaaatgatgcctttgcaagtttatgatatttcagtctaaaaacagatactgttttaataaatgacatttacacaacaaaaaccacccattgacatttttaataatgttttaacagccaatgatggttcttagcgccgattttagcagactgatattttcactaatgacttattttctgcttaccaaaaaagccacgttatcttattgatgcaaaagagtgaacgtggcgttaaatgtaaccagttatatcagtagaaaacctggttgttgttaacagtctaaccggtcaattttttatgatttttttgataaaaattaaattttatttgctttaatcaccaccagatgacgttcgccatccagggctggaacctgaagtttaaccactgattcgacctgatattcttcgggcaacaaagcgatttcatcttccggcatttgccctttcagcgcgtagaaacggccttgctcaccaggaagatggtggcaccagctcaccatatcgttcagagaggcaaaagcgcggctaattacgccatcaaatggcggctctgaaggaaactcttctaccctgctctgtactggctcaatattctccagtttaagctcatgttgcacctgacgaaggaaacgcacgcgtttaccaaggctatccaacagagtgaaatgggcttcaggacgcacgatagagagtggaatgccaggcagtccaggaccggtgccgacatcgataaaccgttcaccttgcagatacggtgccaccacaatgctatcgagaatatggcgtaccagcatctcattaggatcgcggaccgaagtcaggttgtacgctttgttccatttatgcagcatattcacgtaggcaataagctggtttttctggtgatcggtaagcgaaatacctgcgtctttcagcagtaaggagagtttgttgagcacggtgattacctgttcttgatgcgttgcccggtaagcgggtgcttaccaggcatttttaatgcgttatgcgctacgacgcagcataccctgttttttcagccacaccagcagaatggagatggccgcaggcgtgacgccagaaatacgcgaagcctggccgatagaggctggtttgtgatcgttaagtttggcgatcacttcgttagaaagaccggatacctggcggtaatccagtgtcgcgggtagcagggtgttctcgttacgcagctgcttttcgatctcatcttgctggcgcgcgatataaccttcgtatttaacctgaatctcaacctgttccgccgcctgttcgtctgtcaacgcaggggcaaacggcgtcagcgtggttaatttttcataagtcatttccggacgacgcagcagatcttcaccactggcttcacgggaaagcggcgcagtcaggtgagcattcacttcggctgcagcttccgccgacggggttacccaggtcgatttcagacgctgacgctcacgctcgatattctcaagtttctcgttaaagcgcgcccaacgttcgtcatccaccaggcccagttcacgaccgatttcagtcaaacgcagatccgcattatcttcgcgtagcatcagacgatattctgcgcgcgaagtaaacatacgatacggttctttggttcctaaagtgcacaggtcatcaaccagtacgccgagatacgcctgagaacgcgccggagcccaaccttctttgtcagcagacagacgggcagcgttaagaccggccagcaaaccttgcgcagcggcttcttcgtaaccggtagtgccgttaatctgaccagcaaagaacagcccctggataaacttgctctccagcgtcggtttcaggtcgcgtggatcgaagaagtcatactcaatggcataacccggacgcacgatcttcgcgttttccatcccctgcatggagcggacgatttgcatctgcacatcgaacggcaggctggtggagataccgttcggataaatttcgttagaagtcagcccttccggttcaaggaagatctgatgctgatttctgtcggcgaagcgcatgactttgtcttcgatcgacgggcagtagcgtgggccgacaccttcgatcacccctgcgtacattgggctacgatcgaggttactgcggatcacatcatgggttttctcattggtatgagtgatataacacggcacctgctggggatgctgggacgcattgcccataaacgagaataccggcattgggttatcgccatgctgttgcgccagtacgctaaagtcgatggttcgagcatcaatacgcggtggtgtcccggttttcagacgaccaacgcgcagcggcagttcacgcaaacggcgagaaagcggaatggacggcggatcaccagcacggccaccgctgtaattatccagaccgatatgaattttaccgtcgaggaacgtcccaacggtgagcacgacggctttggcacggaacttcagccccatttgggtaacagcaccgaccacgcgatcgttttcgacaataagatcttcaaccgcctgctggaagatcatcaggttcggttggttctccagcgccgtacgtaccgcctgacggtagagcacacgatccgcctgagctcgggtagcgcgaactgccggtcccttgcttgcgtttagtatcctaaactggatacccgcctgatcgatcgctttcgccatcagaccgccgagtgcatccacttcttttaccagatgtcccttcccaataccgccgatcgccgggttgcagctcatctgccccagagtgtcgatattgtgtgtcaaaagcagagtctgttgacccatacgcgccgcggccatcgcggcctcggtgcctgcatgacccccgccaatgatgatgacgtcaaaaggatccggataaaacatggtgattgcctcgcataacgcggtatgaaaatggattgaagcccgggccgtggattctactcaactttgtcggcttgagaaagacctaggatcctgggtattaaaaagaagatctatttatttagagatctgttctattgtgatctcttattaggatcgcactgccctgtggataacaaggatccggcttttaagatcaacaacctggaaaggatcattaactgtgaatgatcggtgatcctggaccgtataagctgggatcagaatgaggggttatacacaactcaaaaactgaacaaccgttgttctttggataactaccggttgatccaagcttcctgacagagttatccacagtagatcgcacgatctgtatacttatttgagtaaattaatccacgatcccagccattcttctgccggatcttccggaatgtcgtgatcaagaatgttgatcttcagtgtttcgcccgtctgttttgcaccggaatttttgagttcagcctcgagtttatcaatagccccacaaaaggtgtcatattcacgactaccaataccgattgcgccaaagcggaccgcagaaagatcgggcttctgttcctgcaatgcttcatagaaaggagaaaggttgtccggaatatctccggcaccgtgggtggagctgataatcagccagatccccgaggcagataaatcttccaacagcggaccgtgcagcgtttcggtggtaaaacccgcctcttccagcttttcagccaggtgttctgctacatattcggcaccgccgagggtgctgccgctgataagagtgatatctgccataaaccgccacctttattaagagtggcgtattgtacgctgtgaacgcgttgggatctacctgtggaaaagtatgggattaaaaaagccgatcagggcttgatggtacgcatgatcgggttttgcaggacgatcaatgtctcggtggactgaatttcatcaattgtttggatcttgttgataagtacatgctggagagcgtcgatcgaacggcacatcacttttataaagatgctgtagtggccggttgtgtaataggcttcagtgacttcatcaaggctttccagctttgccagcgcggaagggtagtctttggcgctctttaatataatgccgataaagcagcctacgtcataaccgagctgcttcgggctgacatcaatacgcgccccggtaatgatccccgcctgcttcattttctctactcgaacgtgaatcgtccccggactgacgccaaattgtttcgccagttcggcgtaagcggtgcgcgcattgcccattaatgcttccaggatgccacggtccagattgtcgatcagataattttccataggattttcttatgcagattgatgattcattctattttagccttcttttttaatgaatcaaaagtgtgttaggctttttattgaatgattattgcatgtgtgtcggtttttgttgcttaatcataagcaacaggacgcaggagtataaaaaatgaaaaccgcttacattgccaaacaacgccaaattagcttcgtgaaatctcacttttctcgccaactggaagaacgtctggggctgatcgaagtccaggcgccgattcttagccgtgtgggggatggcacgcaggataacttgtcgggctgtgaaaaagcggtgcaggtaaaagtgaaagctctgcctgatgcccagttcgaagtggttcattcactggcgaagtggaaacgtcagaccttagggcaacacgacttcagcgcgggcgaagggctgtacacgcacatgaaagcccttcgccccgatgaagagcgtctttctccgttgcactcggtctatgttgaccagtgggactgggaacgcgtaatgggcgacggtgagcgtcaattctcgactctgaaaagcacggtagaggcgatctgggcgggaattaaagcaaccgaagctgcagttagcgaagagtttggtttggcaccgttcctgccggatcagatccacttcgtacacagccaggagttactgtctcgttatccggatctcgatgccaaagggcgtgagcgggcgattgcgaaagatcttggcgcggtattcctcgtcgggattggcggcaagctgagtgatggtcatcgtcacgacgtgcgcgcaccggattatgatgactggagcaccccgtcagagctgggccatgcgggtctgaacggcgatattctggtatggaaccctgtactggaagatgcgtttgagctttcttccatggggatccgcgtggatgccgacacgttgaagcatcagttggcgctgaccggtgatgaagatcgtctgcagctggaatggcatcaggcgctgctgcgcggtgaaatgccgcagaccatcggcggcggtatcggccagtctcgtttgaccatgctgctgctgcaactgccgcatatcggccaggttcagtgtggtgtatggccagctgctgttcgcgagaacgtcccttctctgctgtaataatttatcgccgccagcgtctgagcaggcggcttcgcatcccggtatcaaagcgccagatatgatcgaaaatgcgcatgatgccgggtttgccgtgtgccgacatcgccacggcatgaaagcgatgctgatgtacccgctgcagctctttcactttactcgtcacgtcgtcaggcaaccgctgagcgataaaatcagaaatcaccaccgcgtcggcatcaaaccattccctgctttgcaagcgttccataatggcgcgaaaacaactggcaagatcggtgccgccacgaaactgctggcttaaaaaacggattgcttgttcgatgccttgtgggcctgaaagctcataacggacgatctcggtggaaaatagcataatatagcagcgccggttttcagcgagagcaatgcgcatcaaggccaggcagaacgctttcgcacactgttcattaaagccgcccattgagccggaagtatccacacagacaataaacggcccgcgcggctgttcatcgtaatctttatgtaccaccggacgttcgatcactttttcacgccacgactcaccgtgcaggcgataggtgagcaactgtttttccaccagccgacggtaaaactcatactccagttccgttatccctagtgtcgccagttctggcggcaggagacgtaaaatatcatcgctttgttgcagaccatcaacctgctcaggaacagttgccggttcgcgcaccatggtgcggaaggcttccatctgcgcatcgttacgcggtattgatttggcttcccgggaacgccccagctgttctgccaggcgtttcagttccggctgttcgttaagaaattcaccgtatttcacaatcaactgatagtcgccacgtttaagctgaccggcgctcatatcccacagacgaccagctgcggtattgttatctgcgagaatcggttcaagttgtccgctcagcgtcatgcgttcctgaacttcacttaacagttgttcgcgttcttcttctaatagctgttgatttaacgtcgttgcttgcacgatcagacttaaacgccaacgctggaggaaaagcgtatgtaacgctgaagtgatcgtgctgttagcatcaaccaactgtcgggcttgttctgcccatggggaattcagacgatgcagtaagtccaggatctgtggtagctgcacaataaactgcggcgtggagaggagctggctttgctgatagcacatcacctcttcggtgagttccggcgggactcgggcatctttcagccgactgcgcagcgcctcacgccagcggggaacatcatcagtgattgccgccttcagtcgtgggaatttttcaaagaagactgccagctgcggtgaggccagcagcgcgatgatcatctcttcgatcaatccctcttcgctgacggccagcatcacattaagcgtatccagcgttagcattgttgtgcctggcgaatctgtgcgccgacatcctgtaggctggcttcaatgcgacctaaccagtcgccagggataaacagacatttttgctgttcgctgaataaagcgtgttgcttgcgccagtcactttcaagctcttccagttgttgttttatttcacctggcagaccttcagccgatgaaccgggaagtgccagcgtactgccttgtaaacttacatcgcgtacaacaagatgttgggcgctatccacttccagattcaatttctgggcaaagccgataccgttcagtttgccgcgaatttcaccacctttactcagccactgttccagcgcgttacgctcaaaggagatatgaaccacttccatatcatgcaattttaacggtttttgcagcagcagagtcagagtggaagcagtaacgttaacaggaagttgatactgctgacgacggctgaaaatgccgcccagacgaattaccgttaaggctgttttatcgctttgttgctgctggagttgcaggtgacgttgcacaatcgcgccaaggcgagtcaacatcccttgctgttgccaggcgtgaccggtcatcaatacatcaatttgttgttgtatcaaattcaggctttgcgcgtcataccacaggcaatctttcagcaaaatgagatctaccggggcaacagcactgcgaccgctaaaaaaggcgctggcctgcaataagcggatcgcttttttccagcgacgatccgagacataaggcgcatccggtaatttatccagttgctggcgcagcataaaaatcagctcaaatacatgatcgggcagcgtaatttcaccaatctctttctgccagcgttcatattcttcatctgtgacctgcaaggcatcaggaaccggattgtcgttttcatcctgttgactggtcagcatggagcggaaattcgctttatcctgcactttatctaaccacagacgaatcagcatgcggtcatataacgcttccagactgctgtctgcttccggcagctcgttggaggccgccaccagcagacgcatcgggattttttctacgtgtgcaccgttgcggaactggcgctcgttaatggcggtgagcaaggtattaagaattgccgggcccgctttccagatctcatccagaaagacaatttctgcttccggcaggtaaccgctggttaaacgttcatagcgcccttcatcttttagcgcctgaatagaaaggggaccaaaaacttcttccggcgtggagaagcgggtcatcagatattcaaacgcgcgggcattctgaaaggcgaattttaagcgccgggcgatcaaacttttggcaatacctggcgggccaaggaggaacacactttcaccacttaatgccgctaataaacacaagcggatggcgtggctacgttcataaagccccttttccaacgaactgctcaggcgggaaattctttccgctaataaatgagggtgagccataatgaagtggcgtcctttcgtcaaaagttctgcgtaaattgcgagtatagacgtttcttgctggtggctaaaatagtctcaaaggggggggatttttctttgagccaggttaatgtggccgcatttaggagtacgattttgccgttaatcgtgcatactgtgcgcttttttgtgggccaagggactaagcacacatttcatatttcaacgaaagactagtctatgagcactgataataagcaatcattgcccgcgattaccctcgcggcgattggagttgtctacggcgatattggtaccagcccgttatatacacttcgtgaatgtttgtccggccagtttggttttggcgttgaacgcgatgccgtgtttggctttttatcgctgatcttctggctgctaatctttgtggtttccattaaatatctcaccttcgtgatgcgggcagataacgccggtgagggggggatcctgacgttgatgtcgcttgccgggcgtaatacgtcggcgcgaaccacatcaatgctggtgattatggggctaatcggcggcagctttttctatggtgaagtcgtcataacacccgctatttcggtgatgtcagccattgaaggtctggaaatcgtcgccccgcagctggatacctggatagttcccctctcaattatcgttctcactttattatttatgattcaaaaacatggcacggctatggtcggtaagctgtttgcgccgatcatgctgacctggtttttgattctggcaggactggggttacgtagcattattgctaacccggaagtgctgcatgcgctgaatccaatgtgggcggtgcatttcttccttgaatacaaaacggtttcttttattgcattaggggcagtggtgttgtcgattacgggggtcgaggcgctgtatgctgatatggggcactttggtaagttccctattcgcctggcgtggttcaccgtcgtattaccttccttgacccttaattacttcggtcagggagcgctgttgttaaagaacccggaagcgattaagaacccgttcttcctgttggcaccggactgggcgctgatcccgctgctgatcatcgccgcactggcgacggtaattgcctcgcaggcggttatctctggcgtcttctcattgacgcgtcaggcggtacgtctgggatatttgtcgccgatgcgcattattcacacctccgaaatggagtcagggcaaatctatattccgtttgtgaactggatgctctatgtcgcggtcgtgattgtgattgtcagctttgagcactccagcaacctggcggcggcgtacgggattgcggtgaccggaaccatggtgctgacgtctattctctcgactaccgtggcacgtcagaactggcactggaataagtattttgttgcgctgatcctgattgctttcctttgtgtcgatattccattgttcaccgctaacctcgataaactgctctccggcggctggttgccattgagcctcggtactgtgatgtttatcgtgatgaccacctggaagagcgagcgtttccgcttgctgcggcggatgcatgaacatggtaactctctggaagcgatgattgcttcgctggagaaatcaccgcctgttcgcgtgcccgggaccgcggtgtatatgtcgcgtgcaatcaacgtcattccctttgcgctgatgcataaccttaaacataacaaggtattgcatgagcgggtgattctgttaactctgcgtaccgaagacgcgccatatgtccataatgtccgtcgggtacagattgaacaactgtcgcccactttctggcgcgtggtggcaagttatggttggcgagaaacgccaaacgtggaagaagttttccaccgctgcggtctggaaggattaagttgccggatgatggaaacctccttctttatgtcgcatgagtcgttgatcctcggcaaacgcccgtggtatttgcgtctgcgcggcaagctgtacttgctgctgcaacgtaatgcgctgcgtgcaccagatcaatttgaaattccgccaaacagggttatcgaactgggtactcaggtcgaaatctaacgccagacgcctcctttctccataagggggcgtttttgttttcatggttaatcaccatgtaaaacgtttcgaggttgatcacatttccgtaacgtcacgatggttttcccaactcagtcaggattaaactgcgggtcagcgaaacgtttcgctgatggagaaaaaaatgaaaaaaggcaccgttcttaattctgatatttcatcggtgatctcccgtctgggacataccgatacgctggtggtgtgtgatgctggtttacccatccccaaaagtacaacgcgtatcgatatggcattaacccagggtgtaccttcttttatgcaggtgctgggcgtcgtcacaaatgaaatgcaggtcgaggctgccattatcgcggaagagatcaaacaacataatccgcaactccacgaaacgttgctcactcaccttgagcagctgcaaaaacaccagggaaataccattgaaattcgttacaccacgcatgaacaattcaaacaacaaaccgcagaaagtcaggcggtaattcgcagcggagaatgttctccgtatgcgaatatcattctctgtgctggcgtgacgttctgaggccgtcatggaagcattacttcagcttaaaggcatcgataaagccttcccgggcgtaaaagccctctcgggcgcagcgttaaatgtctatccgggccgcgtgatggcgctggtgggcgaaaacggcgcgggtaaatccaccatgatgaaagtgcttactggtatctatgctcgcgatgccggcacgcttttatggctggggaaagaaacgacatttaccgggccgaaatcttcccaggaagccgggattgggattatccatcaggaactgaacctgatcccgcagttgaccattgccgaaaacattttcctcggtcgtgagtttgttaatcgctttggcaaaattgactggaaaaccatgtatgccgaagcggataaattgctggctaaacttaacctgcgctttaaaagcgacaagctggtgggcgatctttccatcggtgaccagcaaatggttgaaatcgccaaagtgctgagctttgagtcgaaagtcatcattatggatgaaccgaccgatgcgctgaccgataccgaaaccgaatccctgttccgcgtcatacgcgagctgaaatcgcaaggccgcggtattgtctatatctcccaccgcatgaaagaaatcttcgagatttgcgatgacgttaccgtttttcgtgacgggcaatttattgctgagcgcgaagtggcatcactgaccgaagattcgctgattgagatgatggtgggccgcaagctagaagatcaatatccacacctggacaaagcgccgggagatatccgcctgaaagtcgataatctctgcggacctggcgttaacgatgtctcttttactttacgcaaaggcgaaattcttggcgtctctggtttgatgggcgcaggtcgtaccgaactgatgaaagtgctctacggcgcactaccgcgcaccagcggttacgtcaccctggatgggcatgaagtcgttacccgttcaccgcaggatggcctggcaagcggcattgtgtatatctccgaagaccgtaaacgtgacggtttagtgttgggcatgtcagtaaaagagaacatgtcgctgacagcgctgcgctacttcagccgcgctggcggcagtttgaagcatgccgatgaacagcaggctgtgagtgatttcattcgtctgtttaatgtgaaaacaccgtcgatggaacaggcaattggtctgctttccggtggcaatcagcaaaaagtggcgattgcccgcggtctgatgacacgccccaaagtgttgatccttgatgaacctacccgtggcgtagatgtcggcgcgaaaaaagagatctatcaactgattaaccagttcaaagccgatggcttgagcatcattctggtgtcatcggagatgccagaagtattaggcatgagcgatcgcatcatcgtcatgcatgaagggcatctcagcggggaatttactcgtgagcaggccacccaggaagtgttaatggctgccgctgtgggcaagcttaatcgcgtgaatcaggagtaaaaaaatgacaacccagactgtctctggtcgccgttatttcacgaaagcgtggctgatggagcagaaatcgcttatcgctctgctggtgctgatcgcgattgtctcgacgttaagcccgaactttttcaccatcaataacttattcaatattctccagcaaacctcggtgaacgccattatggcggtcgggatgacgctggtgatcctgacgtcgggcatcgacttgtctgtaggttctctgttggcgctaaccggcgcagttgctgcatctatcgtcggcattgaagtcaatgcgctggtggctgtcgctgccgctctcgcgttaggtgccgcaattggtgcggtaaccggggtgattgtagcgaaaggtcgcgttcaggcgtttatcgctacgctggttatgatgcttttactgcgcggcgtgaccatggtttataccaacggtagcccagtgaataccggctttactgagaacgccgatctgtttggctggtttggtattggtcgtccgctgggcgtaccgacgccagtctggatcatggggattgtcttcctcgcggcctggtacatgctgcatcacacgcgtctggggcgttacatctacgcgctgggcggcaacgaagcggcaacgcgtctttctggtatcaacgtcaataaaatcaaaatcatcgtctattctctttgtggtctgctggcatcgctggccgggatcattgaagtggcgcgtctctcctccgcacaacccacggcggggactggctatgagctggatgctattgctgcggtggttctgggcggtacgagtctggcgggcggaaaaggtcgcattgttgggacgttgatcggcgcattaattcttggcttccttaataatggattgaatttgttaggtgtttcctcctattaccagatgatcgtcaaagcggtggtgattttgctggcggtgctggtagacaacaaaaagcagtaataacgactacaggacatcttgaatatgaacatgaaaaaactggctaccctggtttccgctgttgcgctaagcgccaccgtcagtgcgaatgcgatggcaaaagacaccatcgcgctggtggtctccacgcttaacaacccgttctttgtatcgctgaaagatggcgcgcagaaagaggcggataagcttggctataacctggtggtgctggactcccagaacaacccggcgaaagagctggcgaacgtgcaggacttaaccgttcgcggcaccaaaattctgctgattaacccgaccgactccgacgcagtaggtaatgctgtgaagatggctaaccaggcgaacatcccggttatcactcttgaccgccaggcaacgaaaggtgaagtggtgagccacattgcttctgataacgtactgggtggcaaaatcgccggtgattacatcgcgaagaaagcgggtgaaggtgccaaagttatcgagctgcaaggcattgctggtacatccgcagcccgtgaacgtggcgaaggcttccagcaggccgttgctgctcacaagtttaatgttcttgccagccagccagcagattttgatcgcactaaaggtttgaacgtaatgcagaacctgttgaccgctcatccggatgttcaggctgtattcgcgcagaatgatgaaatggcgctgggcgcgctgcgcgcactgcaaactgccggtaaatcggatgtgatggtcgtcggatttgacggtacaccggatggcgaaaaagcggtgaatgatggcaaactagcagcgactatcgctcagctacccgatcagattggcgcgaaaggcgtcgaaaccgcagataaagtgctgaaaggcgagaaagttcaggctaagtatccggttgatctgaaactggttgttaagcagtagttttaatcaggttgtatgacctgatggtgacataaatacgtcatcgacagatgaacgtgtaatataaagaaaagcagggcacgcgccaccctaacacggtggcgcattttatggacatcccgaatatgcaaaacgcaggcagcctcgttgttcttggcagcattaatgctgaccacattcttaatcttcaatcttttcctactccaggcgaaaccgtaaccggtaaccactatcaggttgcatttggcggcaaaggcgcgaatcaggctgtggctgctgggcgtagcggtgcgaatatcgcgtttattgcctgtactggcgatgacagcattggcgagagcgttcgccagcagctcgccactgataacatcgatattactccggtcagcgtgatcaaaggcgaatcaacaggtgtggcgctgatttttgttaatggcgaaggtgagaatgtcattggtattcatgccggcgctaatgctgccctttccccggcgctggtggaagcgcaacgtgagcgtattgccaacgcgtcagcattattaatgcagctggaatcaccactcgaaagtgtgatggcagcggcgaaaatcgcccatcaaaataagactatcgttgcgcttaacccggctccggctcgcgaacttcctgacgaactgctggcgctggtggacattattacgccaaacgaaacggaagcagaaaagctcaccggtattcgtgttgaaaatgatgaagatgcagcgaaggcggcgcaggtactgcatgaaaaaggtatccgtactgtactgattactttaggaagtcgtggtgtatgggctagcgtgaatggtgaaggtcagcgcgttcctggattccgggtgcaggctgtcgataccattgctgccggagatacctttaacggcgcgttaatcacggcgttgctggaagaaaaaccattgccagaggcgattcggtttgcccatgctgccgctgcgattgccgtaacacgtaaaggcgcacaaccttccgtaccgtggcgtgaagagatcgacgcatttttagacaggcagaggtgacgcttggctacaatgaaagatgttgcccgcctggcgggcgtttctacctcaacagtttctcacgttatcaataaagatcgcttcgtcagtgaagcgattaccgccaaagttgaagcggcgattaaagaactcaattacgcgccatcagctctggcgcgtagcctcaaactcaatcaaacacataccattggcatgttgatcactgccagtaccaatcctttctattcagaactggtgcgtggcgttgaacgcagctgcttcgaacgcggttatagtctcgtcctttgcaataccgaaggcgatgaacagcggatgaatcgcaatctggaaacgctgatgcaaaaacgcgttgatggcttactgttactgtgcaccgaaacgcatcagccttcgcgtgaaatcatgcaacgttatccgacagtgcctaccgtgatgatggactgggctccgttcgatggcgacagcgatcttattcaggataactcgttgctgggcggagacttagcaacgcaatatctgatcgataaaggtcatacccgtatcgcctgtattaccggtccgctggataaaactccggcgcgcctgcggttggaaggttatcgggcggcgatgaaacgtgcgggtctcaacattcctgatggctatgaagtcactggtgattttgaatttaacggcgggtttgacgccatgcgccaactgttatcacatccgctgcgtcctcaggccgtctttaccggaaatgacgctatggctgttggcgtttaccaggcgttatatcaggcagagttacaggttccgcaggatatcgcggtgattggttatgacgatatcgaactggcaagctttatgacgccaccattaaccactatccaccaaccgaaagatgaactgggggagctggcgattgatgtactcatccatcggataacccagccgacccttcagcaacaacgattacaacttactccgattctgatggaacgcggttcggcttagatttacgctgtcttttgatcaaattattaccatcggttgttttcagaagcatgaacattgctgctgaagcaacagtaataatgcccatcgtgataaacgtatagtggaattgttcgacagtcgttgtgccttccatcccttcataaacgcgaaggacggccgcacttacagcaacgcctaaactaatcgacagttgctgcgtgaccgccagaacactgttaccgctgctggcgttgtcatcggtcagatcggcaagtgtgatggtattcatcgcggtaaattgcgtcgacatagccatccctaatataaacaacggcaagatcagcatccatatcgccattgccggtgattgcaaagagaactgagcgatcattagcccaataatcaccgtgatccccactaaagtatggcgatagcccagacgacgtaagacttgggtaaccatcgattttgcaataatggaacctaacgctgtcggtgccatcatacagccggcaataaacgcctgataaccaaatcctacctgtaacatcaatggcataaggaacggtacacaaccggtccccagacgggttgcaatattgcctacgataccgatcgagaaagtgcgggttttaaataaatctaatgaaattaatgggtttggcgtgcgtcgtgcatggagaatatagagaagcagtaacccgatgctggtgacaattatcgtcaaggcaatccagctggcgacaatcttttccccgaatagctctattccgcttgagaagagaacaagactgaggccaaacagcaaaaagccagtgatatcgaatctgcgtcgtgcggtggtgaaattgggcatatgtttgcgcgcgtaaagaaggcccgcaatacctatggggatattgattaaaaatatccagtgccaggttgcccaggtgaccagcacgccgccaagaacggggcctaaaattggtcccaccagacccggcatggcgacaaaattcaatactggaagaagttcattacgaggataagcgcgcagtaaggccagccgagcaacaggcatcatcattgcgccgcctatcccctgaataacccggaagacaaccagctgtggtagcgaattagaaagtgcgcaggccagagaacccaatgtgaacagactcacggcaagggtaaaaatgcgacgcgtaccgaagcgatcggctagccatccgcttaccggaataagcatcgccaccgtcagcgtataactgatgatggctgattgcatcgcgagaggagaacgattaaggctatgagcgattgcgggtaaggcggtattcagaatagtggcatcaagtgcctgcatgaagaaggccatcgccgcgatccacggcaaacccgccatactgcgcttctttttatcgctcattcaatgtcctgttatcgggttatcacttatcaggtgagcgtagcagcgcctgacaagctttaaatgccgcgtcgccatcgctttggataatcgcatcgacaatcgcctggtgcagatccagctttatcactgtatcgctggtaattgacgtgaagtaagtgtgataaaccgaatggaatagcgaggcgaatgaggtcaaaaacggattggcgctcatttcatagatatgctcatgccaggccatatcgacttcgatccagcgttcacggcgaaagttctcttttaatgccgccatttcggccattaacgtattgagatgcgctttctgttctgcggtgccaaccgttgctgccagtaggcaggcttgcggctccagacagatacgcataaccagaaagtgatcgatgacctgatgaaagttctcttctgtcatccaccaggtaagcaattcctgatcaagaaaattccagttcgattgtggcattacccgggtaccaattcgcggtcgcggtaaaaccatcccttttgccgttaacgttttgaccgcttcgcgtaccgctgtacgactcactccaaattgctcgcccagctcaatctcaccgggcaaaatggtgccgggttcatattcaccttttaagatccgttgcgccagcttctcagccagaacatacgaaaggtttttctgtgcagctaactgttgtgcgcttaaaggcattactaatcttcctttttctttttattcctccttagtatgccaccaggatgtgtgattacggttgcaaaaacggcaaattgcttgttttatggcacattaacggggcttttgctgaaaaaatgcgcggtcagaaaattattttaaatttcctcttgtcaggccggaataactccctataatgcgccaccactgacacggaacaacggcaaacacgccgccgggtcagcggagttctcctgagagctccgacagagaaagcaaaaataaatgcttgactctgtagcgggaaagcgtattatgcacaccccgcgccgctgagaaaaagcgaggcggcactgctctttaacaatttatcagacaatctgtgtgggcactcgaagatacggattcttaacgtcgcaagacgaaaaatgaataccaagtctcaagagtgaacacgtaattcattacgaagtttaattctttgagcatcaaacttttaaattgaagagtttgatcatggctcagattgaacgctggcggcaggcctaacacatgcaagtcgaacggtaacaggaaacagcttgctgtttcgctgacgagtggcggacgggtgagtaatgtctgggaaactgcctgatggagggggataactactggaaacggtagctaataccgcataacgtcgcaagaccaaagagggggaccttcgggcctcttgccatcggatgtgcccagatgggattagcttgttggtggggtaacggctcaccaaggcgacgatccctagctggtctgagaggatgaccagccacactggaactgagacacggtccagactcctacgggaggcagcagtggggaatattgcacaatgggcgcaagcctgatgcagccatgccgcgtgtatgaagaaggccttcgggttgtaaagtactttcagcggggaggaagggagtaaagttaatacctttactcattgacgttacccgcagaagaagcaccggctaactccgtgccagcagccgcggtaatacggagggtgcaagcgttaatcggaattactgggcgtaaagcgcacgcaggcggtttgttaagtcagatgtgaaatccccgggctcaacctgggaactgcatctgatactggcaagcttgagtctcgtagaggggggtagaattccaggtgtagcggtgaaatgcgtagagatctggaggaataccggtggcgaaggcggccccctggacgaagactgacgctcaggtgcgaaagcgtggggagcaaacaggattagataccctggtagtccacgccgtaaacgatgtcgacttggaggttgtgcccttgaggcgtggcttccggagctaacgcgttaagtcgaccgcctggggagtacggccgcaaggttaaaactcaaatgaattgacgggggcccgcacaagcggtggagcatgtggtttaattcgatgcaacgcgaagaaccttacctggtcttgacatccacggaagttttcagagatgagaatgtgccttcgggaaccgtgagacaggtgctgcatggctgtcgtcagctcgtgttgtgaaatgttgggttaagtcccgcaacgagcgcaacccttatcctttgttgccagcggtccggccgggaactcaaaggagactgccagtgataaactggaggaaggtggggatgacgtcaagtcatcatggcccttacgaccagggctacacacgtgctacaatggcgcatacaaagagaagcgacctcgcgagagcaagcggacctcataaagtgcgtcgtagtccggattggagtctgcaactcgactccatgaagtcggaatcgctagtaatcgtggatcagaatgccacggtgaatacgttcccgggccttgtacacaccgcccgtcacaccatgggagtgggttgcaaaagaagtaggtagcttaaccttcgggagggcgcttaccactttgtgattcatgactggggtgaagtcgtaacaaggtaaccgtaggggaacctgcggttggatcacctccttaccttaaagaagcgttctttgaagtgctcacacagattgtctgatagaaagtgaaaagcaaggcgtcttgcgaagcagactgatacgtccccttcgtctagaggcccaggacaccgccctttcacggcggtaacaggggttcgaatcccctaggggacgccacttgctggtttgtgagtgaaagtcacctgccttaatatctcaaaactcatcttcgggtgatgtttgagatatttgctctttaaaaatctggatcaagctgaaaattgaaacactgaacaacgagagttgttcgtgagtctctcaaattttcgcaacacgatgatgaatcgaaagaaacatcttcgggttgtgaggttaagcgactaagcgtacacggtggatgccctggcagtcagaggcgatgaaggacgtgctaatctgcgataagcgtcggtaaggtgatatgaaccgttataaccggcgatttccgaatggggaaacccagtgtgtttcgacacactatcattaactgaatccataggttaatgaggcgaaccgggggaactgaaacatctaagtaccccgaggaaaagaaatcaaccgagattcccccagtagcggcgagcgaacggggagcagcccagagcctgaatcagtgtgtgtgttagtggaagcgtctggaaaggcgcg

SEQ ID NO: 205 - DNA, 62661 bp, Escherichia coli
  modified_base (1212)..(1212): a, c, t, g, unknown or other
atgtgtgttagtggaagcgtctggaaaggcgcgcgatacagggtgacagccccgtacacaaaaatgcacatattgtgagctcgatgagtagggcgggacacgtggtatcctgtctgaatatggggggaccatcctccaaggctaaatactcctgactgaccgatagtgaaccagtaccgtgagggaaaggcgaaaagaaccccggcgaggggagtgaaaaagaacctgaaaccgtgtacgtacaagcagtgggagcacgcttaggcgtgtgactgcgtaccttttgtataatgggtcagcgacttatattctgtagcaaggttaaccgaataggggagccgaagggaaaccgagtcttaactgggcgttaagttgcagggtatagacccgaaacccggtgatctagccatgggcaggttgaaggttgggtaacactaactggaggaccgaaccgactaatgttgaaaaattagcggatgacttgtggctaggggtgaaaggccaatcaaaccgggagatagctggttctccccgaaagctatttaggtagcgcctcgtgaattcatctccgggggtagagcactgtttcggcaagggggtcatcccgacttaccaacccgatgcaaactgcgaataccggagaatgttatcacgggagacacacggcgggtgctaacgtccgtcgtgaagagggaaacaacccagaccgccagctaaggtcccaaagtcatggttaagtgggaaacgatgtgggaaggcccagacagccaggatgttggcttagaagcagccatcatttaaagaaagcgtaatagctcactggtcgagtcggcctgcgcggaagatgtaacggggctaaaccatgcaccgaagctgcggcagcgacgcttatgcgttgttgggtaggggagcgttctgtaagcctgtgaaggtgtactgtgaggtatgctggaggtatcagaagtgcgaatgctgacataagtaacgataaagcgggtgaaaagcccgctcgccggaagaccaagggttcctgtccaacgttaatcggggcagggtgagtcgacccctaaggcgaggccgaaaggcgtagtcgatgggaaacaggttaatattcctgtacttggtgttactgcgaaggggggacggagaaggctatgttggccgggcgacggttgtcccggtttaagcgtgtaggctggttttccaggcaantccggaaaatcaaggctgaggcgtgatgacgaggcactacggtgctgaagcaacaaatgccctgcttccaggaaaagcctctaagcatcaggtaacatcaaatcgtaccccaaaccgacacaggtggtcaggtagagaataccaaggcgcttgagagaactcgggtgaaggaactaggcaaaatggtgccgtaacttcgggagaaggcacgctgatatgtaggtgaagcgacttgctcgtggagctgaaatcagtcgaagataccagctggctgcaactgtttattaaaaacacagcactgtgcaaacacgaaagtggacgtatacggtgtgacgcctgcccggtgccggaaggttaattgatggggtcagcgcaagcgaagctcttgatcgaagccccggtaaacggcggccgtaactataacggtcctaaggtagcgaaattccttgtcgggtaagttccgacctgcacgaatggcgtaatgatggccaggctgtctccacccgagactcagtgaaattgaactcgctgtgaagatgcagtgtacccgcggcaagacggaaagaccccgtgaacctttactatagcttgacactgaacattgagccttgatgtgtaggataggtgggaggctttgaagtgtggacgccagtctgcatggagccgaccttgaaataccaccctttaatgtttgatgttctaacgtggacccgtaatccgggttgcggacagtgtctggtgggtagtttgactggggcggtctcctcctaaagagtaacggaggagcacgaaggttggctaatcctggtcggacatcaggaggttagtgcaatggcataagccagcttgactgcgagcgtgacggcgcgagcaggtgcgaaagcaggtcatagtgatccggtggttctgaatggaagggccatcgctcaacggataaaaggtactccggggataacaggctgataccgcccaagagttcatatcgacggcggtgtttggcacctcgatgtcggctcatcacatcctggggctgaagtaggtcccaagggtatggctgttcgccatttaaagtggtacgcgagctgggtttagaacgtcgtgagacagttcggtccctatctgccgtgggcgctggagaactgaggggggctgctcctagtacgagaggaccggagtggacgcatcactggtgttcgggttgtcatgccaatggcactgcccggtagctaaatgcggaagagataagtgctgaaagcatctaagcacgaaacttgccccgagatgagttctccctgactccttgagagtcctgaaggaacgttgaagacgacgacgttgataggccgggtgtgtaagcgcagcgatgcgttgagctaaccggtactaatgaaccgtgaggcttaaccttacaacgccgaagctgttttggcggatgagagaagattttcagcctgatacagattaaatcagaacgcagaagcggtctgataaacagaatttgcctggcggccgtagcgcggtggtcccacctgaccccatgccgaactcagaagtgaaacgccgtagcgccgatggtagtgtggggtctccccatgcgagagtagggaactgccaggcatcaaattaagcagtaagccggtcataaaaccggtggttgtaaaagaattcggtggagcggtagttcagtcggttagaatacctgcctgtcacgcagggggtcgcgggttcgagtcccgtccgttccgccaccctaattaggggcgtagttcaattggtagagcaccggtctccaaaaccgggtgttgggagttcgagtctctccgcccctgccagaaatcatccttagcgaaagctaaggattttttttatctgaaataaccctctctgaagtaaatccttctaccggcatccttgccagccattcatattaatacacttcatccagcacgttaattttcaatagatcgcgaatcaacgtatttttatcgctattttgcagccatatggcataaagcggccgtgaaagtgttgtgctatcgacaacggtatgcaggccgccttttttacgcgcccagctgacgggtagccaggtgcaaccattaagcatcgcaatctgttgctgtgccagttcagcagaactggttgtcagaatgggcacttcgtcagcaccgatcaaacctgcctcatgctgttgaaaatctggcccccactccagtcgcagatagttaagatctccctttagtttagaaggggcactggtataaagcgctaaagtgaaataccccagcaactgactactaaattcgtccattttgggcgcttcagtggtaataagaagatcaagctggcgttcatgcagctgttttaccagagactgccgttgggcaattcgcgcttcgaactgtaagcctgtatgggcatcctgattttgatacaagcgtcccagccactgattaagcatacattcccacaacgaggcgctggcaccgatagaaaactcgttatgtcgtgaggtatgcgccacctccttgcgggcggcctgccaggtgctcatgagcgtttctgcataaggcagtagtttttcaccggcagcggttaaacggatattgtttctgtggcgggtgaaaaggttcacacccagttgattttccagttgtctgattcgaaagctcactgctgactgggtcagatagagcgattcagccgctcgaccaaagtgacgcgttcggctaacttccaggaaagtttttaacaattccgtatccacagtgctctccgcaaaattatttgtcgttatgatttaaatgttttgttttacactctgtcaagcgtaactaatactccgcgccataactagctcggtcaaagaattaggagcgtgcaggatggcggaaagctttacgacgactaatcgatatttcgacaataaacattatccacgtggattctctcgtcatggtgatttcaccatcaaagaggcacaactgcttgagcgtcatggttatgccttcaatgagttggatcttggcaaacgcgagccggttaccgaggaagagaaactcttcgtagcagtatgccgtggcgaacgtgagccagtgacagaagcagaacgcgtgtggtccaagtatatgacgcgtattaagcgtccaaaacgttttcacaccctttccggcggtaaaccgcaggttgaaggtgctgaagactacaccgattctgatgattaataaaaagggcgaaatgccctttttttatgtcagtagtttttgcagatggatgagcaaacggtcaatcgcacgatagctaactgcctcctgcaaatgctgacgtgtgataatgtcagactgatcaatatcagcaatggttcgtgcaactttcaataaccgctgccaggcacgaatcgataaccccagatggatcagtgttccttccaaccacatcgcatcttcgctctcaagtttgcagaattggcgtatttccggactatccagccaggcattcagtttattctgccgcttaaattggcgctctctggcggccattacgcgttgtttaacggtggcgctgctttctcccggcactaccgttttactcaaaatgccggggggtggtaatgggatctccagtgagagatcgaagcggtcgagaaagggccccgagagccggttgagataacgtaatgtctgttctggcgtgcagcggttatggtttccctgataatgtccggtagggctgggattcatcgccgcaacaagctggaaacgggctggataggttatttttgctcgcgtgcgtgaaagatggatctgcccggattcaatcggctctcgcaaggcatccagtgtacgccgttcaaattcaggtaactcatcaagaaaaagcacgccgttatgcgccagcgaaatttcacctggccctggaattgcaccaccgcccaccatcgcagttaacgacgcactgtgatgaggtgagcggaacgggcgctgccgccattgtttttgtactgactcagcatttaccagacttaatatcgcagcgctctccagtgcctcttcattgcttaaatctggcaacaggccattaatacggctggcgagcattgttttacctgttcccggcggcccaatcagtaaaaggttgtgcccgccagcggcggtaatttccagtcctcgctttccttgttcctgaccgacaacatcactgagatcatgttgtagcgcccgggatactgcatcagttggtttcgggcgttcgagagcgtgcttaccttccagaaacgcacagacagcttgcagatgatcggctatcaggcatccttcaccgttaattagccccacttcatcttcgttatctttcgcgacgataatttttctgcccgacttaatagcttcagttgcactggagattgcaccgggaacgccacgcagagcgcctgtaagagccagttctccgactaattcatattcatctaacttattggctgtaagctgttctgaggccgccagcaacgcaatggcgataggtaaatcatatcgtcccccttcttttggcagatcggctggagcaaggttgatggtgatttttttcgccggatattcatatccgctattgataatggcgctgcgcacgcgatcgcgagcttcttttacagttgtttctggtaagcctaccatcgttaagccgggtagacctttactgatatgtacctcaacagtgatcgggggcgcatttactcccagggctgcgcgggtatgaacaattgacagtgacataagccctccttgagtcaccattatgtgcataagatatcgctgctgtagcccgctaattcgtgaattttagtggctgattcctgtttatttgtgcaagtgaagttgagttgttctggcggtggaatgatgctcgcaaaaatgcagcggacaaaggatgaactacgaggaagggaacaacatttatactgaaattgaatttttttcactcactattttctttttaaaaaacaacaatttctattgaaattattaaagccatcataaaaataggcccaaaaatatcttgtgctattcgcaaaatctatggtaactctttaggcattccttcgaacaagatgcaagaaaagacaaaatgacagcccttctacgagtgattagcctggtcgtgattagcgtggtggtgattattatcccaccgtgcggggctgcacttggacgaggaaaggcttagagatcaagccttaacgaactaagacccccgcaccgaaaggtccgggggttttttttgaccttaaaaacataaccgaggagcagacaatgaataacagcacaaaattctgtttctcaagattcaggacggggaactaactatgaatggcgcacagtgggtggtacatgcgttgcgggcacagggtgtgaacaccgttttcggttatccgggtggcgcaattatgccggtttacgatgcattgtatgacggcggcgtggagcacttgctatgccgacatgagcagggtgcggcaatggcggctatcggttatgcccgtgctaccggcaaaactggcgtatgtatcgccacgtctggtccgggcgcaaccaacctgataaccgggcttgcggacgcactgttagattccatccctgtcgttgccatcaccggtcaagtgtccgcaccttttatcggcaccgacgcatttcaggaagtggatgtcctgggattgtcgttagcctgtaccaagcacagctttctggtgcagtcgctggaagagttgccgcgcatcatggctgcagcattcgacgttgccagctcaggtcgtcctggtccggttctggtcgatatcccaaaagatatccagctagccagcggtgacctggaaccgtggttcaccaccgttgaaaacgaagtgactttcccacatgccgaagttgagcaagcgcgccagatgctggcaaaagcgcaaaaaccgatgctgtacgttggtggtggcgtgggtatggcgcaggcagttcctgctttacgagaatttctcgctaccacaaaaatgcctgccacctgcacgctgaaagggctgggcgcagttgaagcagattatccgtactacctgggcatgctgggaatgcatggcaccaaagcggcgaacttcgcggtgcaggagtgcgacttgctgatcgccgtgggtgcacgttttgatgaccgggtgaccggcaaactgaacaccttcgcaccacacgccagtgttatccatatggatatcgacccggcagaaatgaacaagctgcgtcaggcacatgtggcattacaaggtgatttaaatgctctgttaccagcattacagcagccgttaaatatcaatgactggcagcaatactgcgcgcagctgcgtgatgaacatacctggcgttacgaccatcccggtgacgctatctacgcgccgttgttgttaaaacaactgtcggatcgtaaacctgcggattgcgtcgtgaccacagatgtggggcagcaccagatgtgggccgcgcagcacatcgcacacactcgcccggaaaatttcattacctccagcggcttaggcaccatgggtttcggtttaccagcggcggttggcgcacaagtcgcacgaccgaacgatactgtcgtctgtatctccggtgacggctctttcatgatgaatgtgcaagagctgggcaccgtaaaacgcaagcagttaccgttgaaaatcgtcttactcgataaccaacggttagggatggttcgacaatggcagcaactgttttttcaggaacgatacagcgaaaccacccttactgataaccccgatttcctcatgttagccagcgccttcggcatccctggccaacacatcacccgtaaagaccaggttgaagcggcactcgacaccatgctgaacagtgatgggccatacctgcttcatgtctcaatcgacgaacttgagaacgtctggccgctggtgccgcctggcgccagtaattcagaaatgttggagaaattatcatgatgcaacatcaggtcaatgtatcggctcgcttcaatccggaaaccttagaacgtgttttacgcgtggtgcgtcatcgtggtttccacgtctgctcaatgaatatggctgccgccagcgatgcacaaaatataaatatcgaattgaccgttgccagcccacggtcggtcgacttactgtttagtcagttaaataaactggtggacgtcgcacacgttgccatctgccagagcacaaccacatcacaacaaatccgcgcctgagcgcaaaaggaatataaaaatgaccacgaagaaagctgattacatttggttcaatggggagatggttcgctgggaagacgcgaaggtgcatgtgatgtcgcacgcgctgcactatggcacttcggtttttgaaggcatccgttgctacgactcgcacaaaggaccggttgtattccgccatcgtgagcatatgcagcgtctgcatgactccgccaaaatctatcgcttcccggtttcgcagagcattgatgagctgatggaagcttgtcgtgacgtgatccgcaaaaacaatctcaccagcgcctatatccgtccgctgatcttcgttggtgatgttggcatgggtgtaaacccgccagcgggatactcaaccgatgtgattatcgccgctttcccgtggggagcgtatctgggcgcagaagcgctggagcaggggatcgatgcgatggtttcctcctggaaccgcgcagcaccaaacaccatcccaaccgcggcaaaagccggtggtaactatctctcttccctgctggtgggtagcgaagcgcgccgccacggttatcaggaaggtatcgcgctggatgtgaacggttatatctctgaaggcgcaggcgaaaacctgtttgaagtgaaagatggtgtgctgttcaccccaccgttcacctcctccgcgctgccgggtattacccgtgatgccatcatcaaactggcgaaagagctgggaattgaagtgcgtgagcaggttctgtcgcgcgaatccctgtacctggcggatgaagtgtttatgtccggtactgcggcagaaatcacgccagtgcgcagtgtagatggtattcaggttggcgaaggccgttgtggcccggttaccaaacgcattcagcaagccttcttcggcctcttcactggcgaaaccgaagataaatggggctggttagatcaagttaatcaataaatacaaaaaatgggacggcacgcaccgtcccatttacgagacagacactgggagtaaataaagtatgcctaagtaccgttccgccaccaccactcatggtcgtaatatggcgggtgctcgtgcgctgtggcgcgccaccggaatgaccgacgccgattttggcaagccgattatcgcggttgtgaactcgttcacccaatttgtaccgggtcacgtccatctgcgcgatctcggtaaactggtcgccgaacaaattgaagcggctggcggtgttgccaaagagttcaacaccattgcggtggatgatgggattgccatgggccacggggggatgctttattcactgccatctcgcgaactgatcgctgattccgttgagtatatggtcaacgcccactgcgccgacgccatggtctgcatctctaactgcgacaaaatcaccccggggatgctgatggcttccctgcgcctgaatattccggtgatctttgtttccggcggcccgatggaggccgggaaaaccaaactgtccgatcagataatcaaactcgatctggttgatgcgatgatccagggcgcagacccgaaagtttctgactcccagagcgatcaggttgaacgttccgcgtgtccgacctgcggctcctgctccgggatgtttaccgctaactcaatgaactgcctgaccgaagcgctgggtctgtcgcagccgggcaacggctcgctgctggcaacccacgccgaccgtaagcagttgttcctcaatgccggtaaacgcattgttgaattgaccaaacgttactacgagcaaaacgacgaaagtgcactgccgcgcaatattgctagcaaagcggcgtttgaaaacgccatgacgctggatatcgcgatgggtggatcgactaacaccgtacttcacctgctggcggcggcgcaggaagcggaaatcgacttcaccatgagtgatatcgataagctttcccgcaaggttccacagctgtgtaaagttgcgccgagcacccagaaataccatatggaagatgttcaccgtgctggtggtgttatcggtattctcggcgaactggatcgcgcggggttactgaaccgtgatgtgaaaaacgtacttggcctgacgttgccgcaaacgctggaacaatacgacgttatgctgacccaggatgacgcggtaaaaaatatgttccgcgcaggtcctgcaggcattcgtaccacacaggcattctcgcaggattgccgttgggattctctcgatgacgatcgcgccaatggctgtatccgctcgctggaacacgcctacagcaaagacggcggcctggcggtgctctacggtaatttcgcagaaaacggctgcatcgttaaaaccgcgggcgtcgatgacagcatcctcaaattcaccggcccggcgaaagtgtacgaaagccaggacgacgcggtagaagcgatcctcggtggcaaagttgtcgcgggcgatgtggtggtgatccgctatgaaggcccgaaaggcggccctggcatgcaggaaatgctctacccaaccagcttcctgaaatcaatgggtctcggtaaagcctgtgcgctgatcaccgacggtcgtttctctggcggcgacctctggtctttccatcggccacgtctcaccggaagcggcaagcggcggcagcattggcctgattgaagatggtgacctgatcgctatagacatcccgaaccgtggcattcagttacaggtaagcgatgccgaactggcggcgcgtcgtgaagcgcaggacgctcgaggtgacaaagcctggacgccgaaaaaccgtgaacgtcaggtttcctttgccctgcgcgcctacgccagcctggcaaccagcgccgacaaaggtgcggtgcgcgataaatcgaaactggggggttaataatggctgactcgcaacccctgtccggtgctccggaaggtgccgaatatttaagagcagtgctgcgcgcgccggtttacgaggcggcgcaggttacgccgctacaaaaaatggaaaaactgtcgtcgcgtcttgataacgtcattctggtgaagcgcgaagatcgccagccagtgcacagctttaagctgcgcggcgcatacgccatgatggcgggcctgacggaagaacaaaaagcgcacggcgtgatcactgcttctgcgggtaaccacgcgcagggcgtcgcgttttcttctgcgcggttaggcgtgaaggccctgatcgttatgccaaccgccaccgccgacatcaaagtcgatgcggtacgtggattcggcggcgaagtgctgcttcatggcgcgaactttgacgaagcgaaagctaaagcgatcgaactgtcacagcagcaggggttcacctgggtgccgccgttcgaccatccgatggtgattgccgggcaaggcacgctggcgctggaactgctccagcaggacgcccatctcgaccgcgtatttgtgccagtcggcggcggcggtctggcggcgggcgttgcggtgctgatcaaacaactgatgccacaaatcaaagtgatcgccgtagaagcggaagactccgcctgcctgaaagcagcgctggatgcgggtcatccggttgatctgccgcgcgtagggctatttgctgaaggcgtagcggtaaaacgcatcggtgacgaaaccttccgtttatgccaggagtatctcgacgacatcatcaccgtcgatagtgatgcgatctgtgcggcgatgaaggatttattcgaagatgtgcgcgcggtggcggaaccctctggcgcgctggcgctggcgggaatgaaaaaatatatcgcccagcacaacattcgcggcgaacggctggcgcatattctttccggtgccaacgtgaacttccacggcctgcgctacgtctcggaacgctgcgaactgggcgaacagcgtgaagcgttgttggcggtgaccattccggaagaaaaaggcagcttcctcaaattctgccaactgcttggcgggcgatcggtcaccgagttcaactaccgttttgccgatgccaaaaacgcctgcatctttgtcggcgtgcgcctgagccgcggcctcgaagagcgcaaagaaattttgcagatgctcaacgacggcggctacagcgtggtggatctctccgacgacgaaatggcgaagttgcatgtgcgctatatggtcggcgggcgtccgtcacatccgttgcaggaacgcctctacagcttcgaattcccggaatcaccgggcgcgctgctgcgcttcctcaacacgctgggtacgcactggaacatttctttgttccactatcgcagccatggcaccgactacgggcgcgtactggcggcgttcgaacttggcgaccatgaaccggatttcgaaacccggctgaatgagctgggctacgattgccacgacgaaaccaataacccggcgttcaggttctttttggcgggttagggaaaaatgcctgatagcgcttcgcttatcaggcctacccgcgcgacaacgtcatttgtggttcggcaaaatcctccagaacgcctcaatcagcggctcatgcagccgctttttttgtgcacacacgcccagttcaaacggcgttttttcatcgctgcgctctaaaatcatcacgcggttacgcaccggttcggggctgttttccagcactacttccggcaacagcgccacaccacagccgagcgccaccatcgataccatcgcttcatgcccgccaaccgtggcgtaaatcatcgggttgctgattttattgcgtcgaaaccacagttcaatgcggcgacgcaccggtccctgatcggccatgataaacggcactgtagaccagtccggcttctctgccgaaacctggttacgcaccgggcagggcagcgcgggcgcaatcagcactactgccagattctccagcatcgaaaacgccacagcgccgggtagcgtctccggtttcccggcaatcgccagatccgcttctcccgtgaccactttttccattgcatctgccgcatcaccagtggtgagtttgatctccaccgacgggtgttccgcgcggaagcgatccagaatcggcggcagatggctgtaggcagcggtcaccgagcagaagatatgtaattcgccagagagcgacggcccttgctgatcgatggtgtggcgcaattgctgatactgcaacagcgtttgctgggcgaaaacgcgcagctcttcgcccgcttccgtcagcgttaccgtgcggttatcgcgcacaaatagcggctgaccaagatcttcttccaggcgctgaatctgccgtgagagcgtggatgggctaacgtgcatcgcccgcgcgctgcggccaaaatggcggctttccgccagatgcaggaaggttttcagatcgcgtaaatccaatggcgcagccctcgatgttgacgttgcaaaaattgcaatgtgacgttgtgaatatatcaatttccgcaataaatttcctgtcatatagtgaattcaatctcgcaaacgcgaaccgaacaataagaagcacaacatcacgaggaatcaccatggctaactacttcaatacactgaatctgcgtcagcagctggcacagctgggcaaatgtcgctttatggggcgcgatgaattcgccgatggcgcgagctaccttcagggtaaaaaagtagtcatcgtcggctgtggcgcacagggtctgaaccagggcctgaacatgcgtgattctggtctggatatttcttacgctctgcgtaaagaagcgattgccgagaagcgcgcgtcctggcgtaaagcgaccgaaaacggttttaaagttggtacttacgaagaactgatcccgcaggcggatctggtggttaacctgacgccggacaagcagcactctgatgtagtgcgcaccgtacagccactgatgaaagacggcgcggcgctgggttactcgcacggtttcaacatcgtcgaagtgggcgagcagatccgtaaagatatcaccgtagtcatggttgcgccgaaatgccctggcaccgaagtgcgtgaagagtacaaacgtggattcggcgtaccgacgctgattgccgttcacccggaaaacgatccgaaaggcgaaggtatggcgatcgctaaagcatgggcggcagcaaccggtggtcaccgtgcgggcgtgctggaatcgtccttcgttgcggaagtgaaatctgacctgatgggtgagcaaaccatcctgtgcggtatgttgcaggctggctcgctgctgtgcttcgacaagctggtggaagagggcaccgatccggcatacgcagaaaaactaattcagttcggttgggaaaccatcaccgaagcgctgaagcagggcggcatcaccctgatgatggaccgtctctctaacccggcgaaactgcgtgcttatgcgctttctgaacagctgaaagagatcatggcaccgctgttccagaaacatatggacgacatcatctccggcgaattctcttccggtatgatggcggactggaccaacgatgataagaaactgctgacctggcgtgaagagaccggcaaaaccgcgtttgaaaccgcgccgcagtatgaaggcaaaatcggcgagcaggagtacttcgataaaggcgtactgatgatcgcgatggtaaaagcgggcgttgaactggcgttcgaaaccatggtcgattccggcatcattgaagagtctgcatattatgaatcactgcacgagctgccgctgattgccaacaccatcgcccgtaagcgtctgtacgaaatgaacgtggttatctctgataccgctgagtacggtaactatctgttctcttacgcttgtgtgccgttgctgaaaccgtttatggcagagctgcaaccgggcgacttgggtaaagctattccggaaggcgcggtagataacgcgcaactgcgtgatgtgaacgaagcgattcgcagccatgcgattgagcaggtaggtaagaaactgcgcggctatatgacagatatgaaacgtattgctgttgcgggttaagtgcgcgctgatgccctcaccccgaccctctcccacagggagagggagaaaacactcaaggccttctcctggagaaggccttgctattagttgcggtacagcaccttaatgatgtgatatccgaactgggtgtgcagcgggccggtcggctccagtaccggacaagagaaaaccactttatcgaacgccggaaccatctgaccctggcggaattcacctaaatcaccgccgcgtttgcctgacgggcaaatagagtgtttcttcgccagcttgccgaaatcggcaccgttcttaatctgctcgagaagatccagagccagtttctcttcttttacaaggatatgcagtgctgctgctgttttgccatgatcgtgccttgagtgaataattgtcaggcggcgattttagcatgatccgcagatgctaacgtaattgtcagtcagggaggggctggtacatatatggcaaaagcccggaaaatccgggcttcgcaggtccctcaaggggagaaaacttagggcctctatgggctacaaagtcattatcggggatggttattttattgtcaatttatgagcgatatggcattgattgacttgatgaccgccctctgtatgtctgcaaccaactcatgtggcaaacattgattaagataccctctgtaagtccttgctctatttaatcggtttcgactgacttgttgtaccaggtcggctttggcccaacgaatctgctgatcaaagaattgcaggccattgataacattactggctatttcaacatgcattccacgatttaacttgtcatgatcgcgagtggttgataatggaacgacgatacatgcgttgccattaatttttccgttgagcacgacaactaacctgttttttatcatttcaggaggaatgcggccatcgtaatacttggtgctgaactgtccattctggctaacaggatagttaccaaagttgcattccagtatttcaccaaccttaggactgaaattaatcgccacgagtacacctctccttagtaaactctgaaaaagtaataacacaacgttacgacccgatattttctaagtctaatggattcacgatgaactccggtttcggtcttctctctctgatttaaacatccgcagccaaccggttagcggcttacacgcggtcacattcaaatgcgattctgctacaatcctccccccgttcgaagattgagcaatacacctatgcgtctaaaccccggccaacaacaagctgtcgaattcgttaccggcccctgcctggtgctggcgggcgcgggttccggtaaaactcgtgtgatcaccaataaaatcgcccatctgatccgcggttgcggttatcaggcgcgacatatcgcggcggtgacctttaccaataaggcggcgcgcgagatgaaagagcgtgtcggacagacgctgggtcgcaaagaggcgcgtgggctgatgatctcaaccttccacacgctggggctagatatcatcaagcgtgagtatgcggcgctggggatgaaggcgaacttttcgctgtttgacgataccgatcagctggcgttgctcaaagagttgaccgaagggctgattgaagatgacaaagttctcctgcaacagttgatttcgaccatctctaactggaagaacgatctcaaaacaccgtcccaggcggcagccagtgcgattggcgagcgggaccgtatttttgcccattgttatgggctgtatgatgcacacctgaaagcgtgcaatgttctcgacttcgatgatcttattttattgccgacgttgctgctgcaacgcaatgaagaagtccgcgagcgctggcagaacaaaattcgctatctgctggtggatgagtatcaggacaccaacaccagccagtatgaactggtgaaactgctggtgggcagccgcgcgcgctttaccgtggtgggcgatgacgaccagtcgatctactcctggcgcggcgcacgtccacaaaacctggtgctgctgagtcaggattttccggcgctgaaggtgattaagcttgagcagaactaccgctcttccggacgtattttgaaagcggcgaacatcctgatcgccaataacccgcacgtctttgagaagcgtctgttctccgaactgggttacggcacagagcttaaagttttaagcgcgaataacgaagaacatgaagccgagcgcgtcactggtgaactgattgtgcatcacttcgtcaataaaacgcagtacaaagattacgccattctttatcgcggtaaccatcagtcgcgggtgtttgaaaaattcctgatgcaaaaccgcatcccgtacaaaatttctggtggtacgtcgtttttctctcgtcctgaaatcaaggacttgctggcttatctgcgcgtgctgactaacccggacgatgacagcgcatttctgcgtatcgttaacacgccgaagcgagagattggcccggcgacgctgaaaaagctgggtgagtgggcgatgacgcgcaataaaagcatgtttaccgccagctttgatatgggcctgagtcagacgcttagcggacgtggttatgaagcattgacccgcttcactcactggttggcagaaatccagcgcctggcggagcgggagccgattgctgcggtgcgtgatctgatccatggcatggattatgaatcctggctgtacgaaacatcgcccagcccgaaagccgccgaaatgcgcatgaagaacgtcaaccaactgtttagctggatgacggagatgctggaaggcagtgaactggatgagccgatgacgctcacccaggtggtgacgcgctttactttgcgcgacatgatggagcgtggtgagagtgaagaagagctggatcaggtgcaactgatgactctgcacgcgtcaaaagggctggagtttccttatgtctacatggtcggtatggaagaagggtttttgccgcaccagagcagcatcgatgaagataatatcgatgaggagcggcggctggcctatgtcggcattacccgcgcccagaaggaattgacctttacgctgtgtaaagaacgccgtcagtacggcgagctggtgctcccggagccgagccgctttttgctggagctgccgcaggatgatctgatttgggaacaggagcgcaaagtggtcagcgccgaagaacggatgcagaaagggcaaagccatctggcgaatctgaaagcgatgatggcggcaaaacgagggaaataatcaaggccggaaaagatgcgtcagcatcgcatccggcacttactcattaatgcacttccagcggccagtggacatagctctgccactggctttcctgagcaataatctctttacccagcggatgttgggttagccaaccttgcggaagcgtcaaggtcaacagttcatggttagcctgtaatgtcatctctggcactaaatcgtcacgacgacggctggcaaaatgatggccaggcggagtaaacggcagagttgttctgcgacgcgcggtggtacggcattttgctgatgcagcgatgagagatcgaccgggttagtctggttgagcagtagcgtcgccagcagttttttctgtgcaggggtaaaaccgggaagatccaggttacgcaccagataagcagcgtgttgcggcgcttgtttgaagtcaacgctcaggccgatttcatgaagctgacaagcgctgatgagcaaatcgcggcttattgcttcaagataccattcgttttccacctgatcgaagaagttagctgcaactttggctacgcgctgcgcctgatcaatatcgatcataaagcggcgctgaatattacgcagcgtacggctgcgaatatcctgctcgacggccagatgcaacatgccgtagaccaggccttcacgcagcgcaccgcccgccagggtcatacactgaatattcagttcggtaaaaatggcgatcaggatcgccagaccactcgggaacactaacgcacgttccagcgtcagcccgtcaatctccagttcctccagccgaccgcaatgaatggctcgctgtttcaattgctgcaacttttccagggtaatgcgttcatccatcccctgtgccatcatgatttcctgtaacgcctgcacggtgccggaagcaccaacgcacactttccagccgtgataccgtaattcatcggcaaccggacgtaacacttcgcgtgccgctttttctgcagcatcaaaattttcctgccccagattacgatcggcaaaatagcgttccagccaggtgacgcagcccatcgacaggctgaacaacgaggtggtttgtgcacccgtgccggttaccagttcagtactggcaccgcctatatccaccaccaggcgctgatcggcaccgccagttgtgtgagcaacgccctgataaatcagacgtgcttcctcttcaccgctgattacctgtaccggacaaccgaggatttcctgcgctttggcaataaaatcacccgcattgacggcaagacgtaatgtcgccgtagcgacaacgcgaatttgcgagggagggatatcttgcagacgttcagcaaacaggcgcagacattgccaaccgcgctccattgcttcattagacagggcattttcgctattcaggccagcagccagacgcactttgcgttttattcgcgtcagcgtctggatgcttccagccacctcgcgcacaaccagcatatgaaaactattcgaaccgagatcaatggctgcatacagcgacgaggtggaacccatactcttcatccttcaatctgtctctgtgttggctgcattctttcacctgaatcacttactacagtatgctcatcgggattcattctcttgccatcttgatacagtttgaatgattttgagtatgacattttatttaacctgaacgacgacgattacgcggagcgccagtacgacgcggaccattgcctgtacgtgggcgcgtgaggcgcagcggttttggcagatcggtcatcaatgcgtccggattgtatttgcttaccggaattgagtgaccaatataggtctcaatagcaggcaaattcaatgcatactcttcacacgccaggctgatagagtgaccgcttgcgcctgcgcgacctgtacgaccaatacggtgaacgtaatcttcacagtcatcgggtaaatcgtagttaaagacgtgcgtcactgccggaatatgcaaaccacgcgcggcaacgtcggtggcaaccagaatatccagatcgccacgggtaaattcatcaagaatacgcagacgttttttctgcgcgacatcgcctgtcaacaaaccgacacgatgaccatctgccgccaggtggccccagatctcttcacaacggtgtttggtattggcgaaaataatcgctctgtctggccactcttcttcgatcagcgtttgcagcaaacgcattttttcttcgttagaagggtagaaaagctcttctttaatacggtggcccgttttctgttccggttccacttcaatatattcggcattgttcatctgctcgaacgccagttcacgtacccggtacgaaagcgtggcggagaacagcatgttgaggcgctggtttgcaggcggcatacggcggaacagccagcggatatctttaataaagcccagatcgtacatgcgatcggcttcgtccagtaccaccacctgaatggcaccgaggttaatgtggttctgcttggcgtagtcaattaaacgccccgtagtgccaatcagaatgtcaacgccgctttccagcactttcagctgtttgtcgtagccatcaccaccgtaagccagacccagcttcaggccggtagcttccgccagcggttctgcgtcggcatggatctgcacggcaagttcacgcgtcggtgccataattaaggcacgtggttgattcaccttgcgatcggcaatcgcaggatgagagagaagataatgaaacgttgacgtaagaaacgccatcgttttcccggtaccggtttgcgcctgcccggctacgtcacgacccgccagcgtcagcggaagggccagtgcctgaatgggcgtacagttatgaaacccttttttttcaagggcttctacaaccttcggatgcagggcgaagtcggaaaacttctgttctgttaaatgtgttttgctcatagtgtggtagaatatcagcttactattgctttacgaaagcgtatccggtgaaataaagtcaacctttagttggttaatgttacaccaacaacgaaaccaacacgccaggcttattcctgtggagttatatatgagcgataaaattattcacctgactgacgacagttttgacacggatgtactcaaagcggacggggcgatcctcgtcgatttctgggcagagtggtgcggtccgtgcaaaatgatcgccccgattctggatgaaatcgctgacgaatatcagggcaaactgaccgttgcaaaactgaacatcgatcaaaaccctggcactgcgccgaaatatggcatccgtggtatcccgactctgctgctgttcaaaaacggtgaagtggcggcaaccaaagtgggcgcactgtctaaaggtcagttgaaagagttcctcgacgctaacctggcgtaagggaatttcatgttcgggtgccccgtcgctaaaaactggacgcccggcgtgagtcatgctaacttagtgttgacttcgtattaaacataccttattaagtttgaatcttgtaatttccaacgcttcccgttttatcttaaatgcgaagtgaacagatttctggctcgtcactcaatccgtcttgtcgtttcagttctgcgtactctcctgtgaccaggcagcgaaaagacatgagtcgatgaccgtaaacaggcatggatgatcctgccataccattcacaacattaagttcgagatttaccccaagtttaagaactcacaccactatgaatcttaccgaattaaagaatacgccggtttctgagctgatcactctcggcgaaaatatggggctggaaaacctggctcgtatgcgtaagcaggacattatttttgccatcctgaagcagcacgcaaagagtggcgaagatatctttggtgatggcgtactggagatattgcaggatggatttggtttcctccgttccgcagacagctcctacctcgccggtcctgatgacatctacgtttcccctagccaaatccgccgtttcaacctccgcactggtgataccatctctggtaagattcgcccgccgaaagaaggtgaacgctattttgcgctgctgaaagttaacgaagttaacttcgacaaacctgaaaacgcccgcaacaaaatcctctttgagaacttaaccccgctgcacgcaaactctcgtctgcgtatggaacgtggtaacggttctactgaagatttaaccgctcgcgtactggatctggcatcacctatcggtcgtggtcagcgtggtctgattgtggcaccgccgaaagccggtaaaactatgctgctgcagaacattgctcagagcattgcttacaaccacccggattgtgtgctgatggttctgctgatcgacgaacgtccggaagaagtaaccgagatgcagcgtctggtaaaaggtgaagttgttgcttctacctttgacgaacccgcatctcgccacgttcaggttgcggaaatggtgatcgagaaggccaaacgcctggttgagcacaagaaagacgttatcattctgctcgactccatcactcgtctggcgcgcgcttacaacactgttgttccggcgtcaggtaaagtgttgaccggtggtgtggacgccaatgcccttcatcgtccgaaacgcttcttcggtgcggcgcgtaacgtggaagagggcggcagcctgaccattatcgcgacggcgcttatcgataccggttctaaaatggacgaagttatttacgaagagtttaaaggtacaggcaacatggaactgcacctctctcgtaagatcgctgaaaaacgcgtcttcccggctatcgactacaaccgttccggtacccgtaaagaagagctgctcacgactcaggaagaactgcagaaaatgtggatcctgcgcaaaatcattcacccgatgggcgaaatcgatgcaatggaattcctcattaataaactggccatgaccaagaccaatgacgatttcttcgaaatgatgaaacgctcataaatttgtcttatgccaaaaacgccacgtgtttacgtggcgttttgcttttatatctgtaatcttaatgccgcgctggcgatgttaggaaaattcctggaatttgctggcatgttatgcaatttgcatatcaaatggttaatttttgcacaggactggtgggttcggaacggactttcccttctgaataaaggtcttcgtggttatacttctgctaataattttctctgagagcatgcattgtgaatttactgacagtgagtactgatctcatcagtatttttttattcacgacactgtttctgttttttgcccgtaaggtggcaaaaaaagtcggtttagtggataaaccaaacttccgcaaacgtcaccagggattgatacctctcgttggggggatttcggtttacgcagggatttgcttcacgttcggaattgtcgattactatattccgcatgcatctctctatctcgcttgtgccggtgtgcttgttttcattggcgcgctggatgaccgttttgatatcagcgtaaaaatccgtgccaccatacaggccgctgttggcattgttatgatggtgttcggcaaactttatctcagtagcctgggttatatctttggctcctgggagatggtgctcggaccgtttggttacttcctgacgctatttgccgtctgggcggccattaatgcgttcaacatggttgatggcattgatggcttgctgggcgggttgtcctgcgtctcgtttgcagcaatcggtatgattttgtggttcgacgggcaaaccagcctcgcaatctggtgctttgcgatgatcgccgccatcctgccatacatcatgcttaaccttggtatcctgggtcgccgctacaaagtctttatgggtgatgcgggcagtacgctgattggttttaccgttatctggatcctgctcgaaacgacccagggcaaaacccatcccatcagcccggttaccgctttgtggataatcgccattccgctaatggatatggtggcgattatgtaccgtcgcctgcgtaaaggcatgagcccattctctcctgaccgtcagcatattcaccatttgatcatgcgtgccgggtttacttcccgtcaggcgtttgtgctgattacccttgccgcagcactgctcgcttccattggcgtgctggcagaatattctcattttgtcccggagtgggtcatgctggtgctctttttgctagcattcttcctctatggatattgcattaagcgtgcctggaaagttgctcgctttattaagcgcgtaaaacgcagactgcgtagaaatcgtggtggcagccccaatttaaccaaataaatgaggatgtgatgacacaaccaatgcctgggaaaccggccgaagacgctgaaaatgaactggatattcgtgggttgtttcgtaccttgtgggctgggaagctatggattattggcatggggctggcgtttgcgttaatcgcgctggcgtatactttttttgctcgacaagagtggagcgcgacggcgattaccgatcgtccaacggtgaatatgctggggggatattactcgcagcagcaatttttgcgtaacctggatgcccgttcaaacatggcttctgccgaccaaccatcggtcatggacgaagcctataaagagtttgttatgcaactggcctcgtgggatacccgcagagagttctggctgcaaaccgactattacaagcagcggatggtgggcaacagcaaagccgatgcggcgttgctggatgaaatgattaacaacatccagtttatccccggagactttacccgcgcggtcaatgacagcgtgaagcttattgccgaaaccgcgcctgacgctaataacctgttacgtcagtatgttgcttttgccagccagcgtgcagccagccatctgaatgatgagctgaaaggcgcatgggcggcacgcaccatccagatgaaagctcaggtgaagcgtcaggaagaggtggcgaaagccatctacgaccgccggatgaacagcattgagcaggcgctgaaaattgctgagcagcataatatttcgcgcagtgcgacagatgtgcctgccgaggaattacctgattcagaaatgttcctgcttgggcgtccaatgctccaggctcgactggaaaatttacaggccgtcggtccggcctttgatctcgactatgatcagaatcgggccatgttaaacaccctgaatgttggtccaaccctggatccgcgttttcagacctatcgctatttgcgtacgccggaagaaccggtaaaacgcgatagcccacgtcgtgccttcctgatgattatgtggggcattgtcgggggctgatcggggctggtgtcgcattaacccgccgttgctcgaaatagcaacactgctgctgcgagcgcaaaggcgctcgccgcttattcgaagagaatcgatgtgaaagtactgactgtatttggtacgcgcccggaagccatcaagatggctccgttggtgcatgcgttggcaaaagatcctttttttgaggctaaagtttgcgtcactgcgcagcatcgggagatgctcgatcaggtgctgaaactcttttccattgtacctgactacgatctcaacataatgcagccaggacagggcctgacagagataacctgtcggattctggaagggctaaaacctattcttgccgagttcaaaccagacgtcgtgctggttcacggcgacacaacaacgacgctggcaaccagcctggcggcgttttatcagcgtattcctgttggtcacgttgaggctggtttacgcacgggcgatctctattcgccgtggccggaagaggctaaccgtacattgaccgggcatctggcgatgtatcacttctctccaaccgaaacttcccggcaaaacttgctgcgtgaaaacgttgcggatagccgaatcttcattactggtaatacagtcattgatgcactgttatgggtgcgtgatcaggtgatgagcagcgacacgctgcgttcagaactggcggcaaattacccgtttatcgaccccgataaaaagatgattctggtgaccggtcacaggcgtgaaagtttcggtcgtggctttgaagaaatctgccacgcgctggcagacatcgccaccacgcaccaggacatccagattgtctatccggtgcatctcaacccgaacgtcagagagccggtcaatcgcattctggggcatgtgaaaaatgtcattctgatcaatccccaggagtatttaccgtttgtctggctgatgaaccacgcctggctgattttgaccgactcaggcggcattcaggaagaagcgccttcgctggggaaaccggtgctggtgatgcgcgataccactgagcgtccggaagcggtgacggcgggtacggtgcgtctggtaggcacggataagcagcgaattgtcgaggaagtgacgcgtcttttaaaagacgaaaacgaatatcaaactatgagccgcgcccataacccgtatggtgatggtcaggcatgctctcgcattctggaagcgttaaaaataatcggatatcactatgagttttgcgaccatttctgttatcggactgggttacatcgggctgcctacagcagcagcgtttgcctcacggcaaaaacaggtgattggtgtcgatatcaaccaacacgcggttgataccatcaatcgtggcgaaatccatatcgtcgagcctgatttggcgagcgtagtaaaaactgccgtagaaggcggttttttacgagcgagcacgacgccagttgaagcggatgcctggctgattgctgtacccacgccgtttaaaggcgatcatgagccagatatgacctacgttgaatcggctgctcgctccattgcgccagtgctgaaaaaaggcgcgctggtgatccttgaatccacctcgccggtggggtcaaccgagaagatggcagaatggttagcagagatgcgtccggatctcactttcccacagcaggtgggcgagcaggcggacgtcaacattgcttactgcccggaacgcgtgttaccgggccaggttatggtcgagctgattaaaaacgatcgcgtgattggtggtatgacgccggtttgttcgacccgcgccagcgaactgtacaaaattttcctcgaaggtgagtgtgtcgtcactaactcgcggacggcggaaatgtgtaagctcaccgaaaacagcttccgcgatgtgaatatcgcttttgctaatgaattgtcgctgatttgtgccgatcaggggattaacgtctgggaactgattcgcctggcgaatcgtcaccctcgcgttaatattcttcagcctggccctggcgtgggcggtcactgcattgctgttgatccgtggtttatcgtggcacagaacccccagcaggcgcggcttatccgtaccgcgcgcgaagttaacgatcacaaaccgttctgggttatcgatcaggtgaaagcggcggttgccgactgccttgctgctaccgataaacgcgccagtgaactgaaaatcgcctgctttggtctggcgtttaaaccgaatattgatgacctgcgcgaaagcccggcgatggaaatcgctgaactgatcgcccagtggcatagcggcgaaactctggttgttgagcctaacatccaccagttgccgaaaaaactgaccgggctttgtactctggcgcagcttgacgaggcgctggcaacggcagacgtgctggtgatgctggtcgatcatagtcagttcaaagttatcaatggcgacaatgtccatcagcagtatgtcgtcgatgccaaaggagtctggcgctgatgagaaaaattctgataacaggtggtgccgggtttattggctcggcgctggtgcgttatatcatcaacgaaacgagcgacgcggtggtagtggtcgataagctgacctacgccggaaacctgatgtcgctggcaccggtcgcgcaaagcgagcgctttgcctttgagaaagttgatatctgcgatcgggcagaactggcacgcgtattcactgagcatcagccagactgtgtcatgcatctggcagccgaaagccatgttgaccgttctattgacggcccggcagcgtttattgaaaccaacattgtcgggacttatacattgcttgaagcggcgcgggcttactggaatacgctgacggaagataaaaaatcagcgttccgttttcatcatatctccaccgacgaagtatatggtgacctgcactcgacggatgatttcttcaccgaaaccacgccgtatgcgccgagcagcccttattccgcgtcaaaagccagcagcgaccatctggtgcgcgcctggctgcggacctacggtctgccgacgctgatcaccaactgctcgaataactacggtccttaccactttccggaaaaactgatcccgctgatgatcctcaacgcgctggcgggtaaaccgctgccggtatatggcaacgggcagcaaatccgtgactggctgtatgtggaagatcacgcccgcgcgctgtattgcgtggcgaccaccgggaaagtcggtgaaacctataatattggtggtcacaacgagcgtaagaatctcgatgttgtggaaaccatttgcgagctgctggaagaactggctccgaacaagccgcacggcgtggcgcactatcgtgacttgatcacctttgtcgctgaccgtccggggcatgatctgcgttatgccattgatgcttcgaaaattgcccgtgaacttggttggctgccacaggaaacctttgaaagtggaatgcgtaaaacggtgcagtggtatctggctaatgaaagctggtggaagcaggtgcaggacggcagctatcagggcgagcgtttaggtctgaaaggctaattttcagcggaggcaaacatgaaaggtattatcctggcgggcggttccggcacccgattgcatccgattacgcgcggcgtatcgaagcaactgttgccgatttacgataagccaatgatttactatccgctgtcggtgctgatgttggccggtatccgcgaaattctcatcatcactacgccggaagataaaggttatttccagcgcctgctgggcgatggtagtgagttcggtatccagctggaatacgccgaacagcccagcccggacggtctggcgcaggcctttatcatcggtgaaaccttcctcaacggtgaaccttcttgtctggtgctgggcgataacatcttcttcggtcagggcttcagtccgaagctgcgtcatgttgcggcgcgcacggaaggggcgacggtatttggctatcaggtgatggacccggaacgctttggcgtggtggagtttgacgacaatttccgcgctatctcgctggaagaaaagccaaaacagccgaagtcaaactgggcggtgaccgggctttatttctacgacagtaaagtcgtggagtacgcaaagcaggtgaagccgtcggagcgtggtgaactggagattacctccatcaaccagatgtacctcgaggcgggcaacctgaccgttgaactgctcgggcgcggatttgcctggctggacactggcactcacgacagcctgattgaagccagtacctttgtgcagacagtagaaaaacgccagggctttaagattgcctgcctggaagagatcgcctggcgtaacggctggctcgatgacgagggtgtgaagcgtgctgccagttcattagcgaaaactggctacggccaatatctgctggagttacttcgtgcccgtccgcgccagtattgagccactaacctgggaaaacgccttctttggtgttaacagcgccatcgtgcgcattacgtctgaagcaccgctcctgacgccagacgtgttagcgccgtggtcacgggtgcaggccaaaattgcggcatcaaatacgggtgaactggatgccctgcaacagctgggattctccctggtagaaggtgaagttgatttggcactacccgtgaacaatgtcagtgatagtggtgctgtagtggcacaagagaccgatattcccgcattacgtcagttagccagcgccgcatttgcgcaaagccgttttcgtgcgccgtggtatgcgcctgacgccagcagacgcttttatgcacagtggattgaaaatgccgtgcgcggcacctttgatcatcaatgtctgattttacgtgcggcgtccggcggtattcgtggttatgtctctttacgggaactcaatgcgacagatgcgcgaattggcctgctggctggacgcggtgtaggtgctgagctgatgcaaacggcgctaaactgggcgtatgctcgcggtaaaacaactttgcgggtggcgacccaaatgggcaacaccgccgcgcttaaacgatacatacaaagtggtgcgaatgtagaaagcaccgcgtactggttatacaggtgatcacatgattccatttaacgcaccgccggtggtgggaaccgaactcgactatatgcagtcggcaatgggtagcggcaaactgtgtggcgatggcggttttacccgtcgctgccagcagtggctggagcaacgttttggcagcgccaaagtgttactgacgccgtcctgcaccgcttcgctggagatggcggcgctgctgctcgatatccagcctggcgatgaagtgatcatgccgagctacacctttgtctccaccgccaatgcctttgtgctgcgtggcgcaaaaatcgtttttgtggatgttcgcccggacaccatgaacatcgacgaaacgctgattgaagcggcgatcaccgacaaaacgcgcgttatcgtgccggtccattacgcgggtgtggcctgcgaaatggacaccattatggcgttggcgaaaaagcataatctgtttgtggtagaagatgccgctcagggcgtgatgtccacttacaaagggcgtgcactgggaaccattggtcatattggctgctttagcttccatgaaaccaaaaactatacggcgggtggtgaaggcggcgcgacgctgattaacgataaagcgttaatcgaacgagccgagatcatccgtgaaaagggcactaaccgcagccagttcttccgtggtcaggtcgataaatatacctggcgcgatattggctccagctatttgatgtccgatctgcaagctgcgtacctgtgggcgcaactggaagcagcggatcgtatcaaccagcaacgtctggcgctgtggcaaaactactacgatgcgttagcgcctctggcgaaagccgggcgtatcgagctgccgtcgattcccgatggctgcgtgcagaacgcgcatatgttctacattaaactgcgggatattgatgaccggagcgcgttgattaactttctgaaagaagcggaaatcatggcggtgttccattacattccgctgcacggttgccctgcgggggaacgctttggtgagttccacggtgaagatcgctacaccaccaaagagagcgagcgcctgctgcgcctgccgctgttctacaacctgtcgcccgtcaatcagcgtacggtaattgcgactttgttgaactacttctcctgatatgtcgttggcaaaagcgtccttgtggacggcggccagtacactggtcaagattggtgccgggttactggtcggtaagttgctggctgtgtcatttggtccggcggggcttgggctggcggcaaatttccgccagttgattaccgtgctcggcgtgcttgccggagctggcatctttaacggtgtaaccaaatacgttgcccagtaccatgataatccgcaacagctgcgccgcgtggtcggcacttcatcagcgatggtacttggtttctctacgctgatggcgctggtttttgtgctggcagctgcgccaatcagccagggattgtttggtaataccgactatcaggggctggtgcgtttagtggcgctggtgcaaatggggatcgcctggggcaacctgttactggcgctgatgaaaggctttcgcgatgccgcaggtaatgcgttatcgctgattgtcggcagcttgattggcgttctcgcgtactacgtcagttaccgtttgggcggttatgaaggggcgttgctgggtctggcgctgattcccgcgctggtggtaattcctgccgccatcatgttgatcaaacgtggtgtcatcccgttaagctatctgaaacccagctgggataacggtctggcagggcagttgagcaaatttacgctcatggcgttgattacgtcggtgaccttgcctgttgcttacatcatgatgcgtaaactgctggcggcgcagtatagctgggatgaggtggggatctggcaaggggtgagcagtatttccgatgcctacctgcaatttattacggcatcgttcagcgtatatttgctgcccacgttgtcgcggctaacggaaaagcgcgatatcacccgggaagtggttaaatcgctgaaattcgtcttaccggcagtggcggcggcgagttttaccgtctggctgctgcgtgattttgctatctggctgctgttgtcgaataaatttaccgctatgcgcgatctctttgcctggcagttagtgggtgatgtgttaaaagtgggcgcttatgtctttggttatctggtgatcgccaaagcgtcattgcggttttatattctggcggaaatcagccagttcactttattgatggtatttgcccactggctaatccctgcgcatggtgcactgggcgcggcgcaggcatatatggcaacttatatcgtctatttttctctttgttgtggcgtgtttttactctggcgtaggcgggcatgactgtactgattcacgtactgggatcggatatccctcaccataaccgaaccgttttgcggtttttcaatgacgcgctggccgcgacgagcgagcacgcgcgcgagtttatggttgttggcaaggacgacggcttaagtgatagctgtccggcgctttctgtgcaatttttccctgggaaaaaatcgctggcggaagcggtcatcgcgaaagcaaaagctaaccgtcagcagcgttttttcttccacggtcagttcaatcccacactgtggctggctctgctgagtggtggcattaagcccagccagtttttctggcatatctggggggcagacctgtatgagctttccagtggcttgagatataagcttttttacccactacgtcgcctggcgcaaaagcgagtcggctgtgtatttgccacccgcggcgatttgagcttttttgccaaaacgcatccaaaggtgcggggcgaactgctgtacttcccgacgcggatggacccttctctcaatacgatggcgaacgatcggcaacgtgaagggaaaatgaccattctggtggggaactccggtgaccgcagcaatgaccatattgctgccttgtgcgccgttcatcagcaatttggcgatacggtaaaagtggtggtgccgatgggatatccgcctaataacgaagcgtacattgaggaagttcgtcaggcggggctggagttattcagcgaagaaaatctgcaaattttgagcgaaaaactggaatttgacgcctatctggcgctacttcgtcagtgcgatcttggttactttatttttgcccgccagcagggcattggtacgctttgcttactgattcaggcgggcattccttgtgtgcttaaccgggaaaatccgttctggcaggatatgacggaacagcatttgccggtgctgtttactaccgacgatctcaacgaggatattgtgcgtgaagcgcagcgccagttggcgtcggtggataaaaacaccattgccttctttagccctaactatctacaaggctggcagcgggcgttggcgattgccgccggggaggtcgcatgagtctgctgcaattcagtggcctgtttgttgtctggctgctctgcacgctgtttattgccacgctgacctggtttgagtttcgccgtgtgcgctttaacttcaatgtcttcttttcattgctgtttttgctcacctttttcttcggcttcccgctgaccagcgtgctggtatttcgctttgatgttggtgtcgcgccgccagaaatcttgttgcaggcgttgctttctgcgggctgcttctacgcggtttactatgtcacctacaaaacccgcctacgcaaacgcgttgctgatgtaccgcgccgtccgctgtttaccatgaaccgcgtggagaccaatcttacgtgggtgatcctgatgggcatcgcgctggtaagcgtcggcatcttcttcatgcacaacggctttttgctgttccggcttaactcctacagtcagatcttctccagtgaagtctccggcgtggcgttaaaacgcttcttttactttttcatcccggcgatgctggtggtctactttctgcgccaggatagcaaagcgtggctgtttttcctcgtcagcacggtcgcctttggcttgctgacttatatgattgtcggcggcactcgcgccaatatcatcatcgcattcgctatcttcctgtttattggcattattcgcggctggatttcgttgtggatgctggcggcggcgggcgtgctggggattgtgggcatgttctggctggcgctaaaacgctatggaatgaatgtgagcggcgatgaagcgttctatacgtttctctatctcactcgcgacaccttctcgccatgggagaatctggcgttgctgttgcagaactacgacaacatcgacttccagggcctggctccaattgtccgcgatttctatgtctttatcccttcctggctgtggccgggtcgcccgagtatggtgctgaactcagccaactactttacctgggaagtgctgaataaccactccggactggcgatctcgcctacgcttataggctcactggtggtgatgggcggcgcgttgttcatcccactcggggcgattgtggttggactgatcatcaaatggttcgactggctgtatgagctgggcaaccgcgagactaatcgctataaggctgcgatattgcacagtttctgctttggggcgatcttcaatatgatcgtgctggcacgtgaagggctggattcgtttgtctcacgcgtagtcttttttatcgtggtcttcggcgcatgtctgatgatcgcaaaactgttgtactggctttttgaaagcgccggactcattcataaacgtacaaaatcatcgctccggacgcaggttgaaggataacaatgaataacaacaccatggcaccgacctatacgctgcgtggcttacagttgattggttggcgtgatatgcagcacgccctcgattatctgtttgctgacgggcatcttaagcagggaacgctggttgccattaatgccgaaaaaatgctgaccattgaagataatgctgaggtcagggagctaattaacgctgccgaatttaaatatgcggatggcatcagcgttgtacgttcagtacgtaaaaagtacccgcaggcgcaggtttcccgcgttgccggtgctgatctctgggaagagctgatggcgcgcgcaggcaaagaagggacgccggtatttcttgtgggcggtaaacctgaagtgctggcgcaaactgaagctaaactgcgcaaccagtggaatgtgaatatcgttggcagtcaggatggttattttaaacccgagcagcgtcaggcgctgtttgaacgcattcatgccagcggagcgcaaatcgtcaccgttgcgatgggatcgccaaagcaggagatcttcatgcgcgactgccgtctggtgcatccagatgcgctgtatatgggcgttggcgggacttacgatgttttcaccggtcacgtaaaacgcgcaccgaaaatctggcaaacgctgggactggagtggctctaccgcctgctttcgcagccgagccgcattaagcgtcagcttcgtttgctgcgttatttacgctggcactacaccggcaacctctgattttcctctctttgtaaagcgacggagtggtcactccgtcgcctgtctgcttttttattacacaaagcattcaaatttttaatgctttatttgccatttctcctgaattacgaaaacattcgcaacactcgatgtacccataacgataaccggtaacaccggaaagcatgcaaacacaacacgaggatttatggcagataacaaaccagagctacagcgtgggctggaagctcgacatatcgaactcatcgccctggggggcaccattggcgtcggcctgtttatgggggccgccagtaccttgaaatgggccgggccatccgtattgttggcctatatcatcgccgggctattcgtctttttcatcatgcgttcaatgggcgaaatgttgttcctcgaaccggttaccggttcgttcgccgtttatgcgcatcgttatatgagcccgttctttggttatctcaccgcctggtcttactggtttatgtggatggccgtggggatctcagaaatcaccgccattggcgtttatgtccagttctggttcccggagatggcgcagtggatacccgcattgatcgcagtggcgctggtggcgttggcgaatctggcggcggtgcggttgtacggcgaaatcgagttctggttcgcgatgatcaaagtcaccacgattatcgtgatgattgtcattggcctgggcgtgattttctttggctttggcaatggcgggcagtcgattggttttagcaatctcacagagcatggcggtttctttgcgggtggctggaaagggttcctgaccgcgctgtgtattgtggtggcgtcctaccagggcgtggagctgattggcattactgccggtgaagcgaagaatccgcaggtgacgctgcgcagtgccgtaggcaaagtgctgtggcggatcctgattttctacgtaggcgcgattttcgttatcgtcaccatcttcccgtggaatgaaattggcagcaacggcagcccgttcgtactgacttttgccaaaatcggtattaccgcagcggcgggcattatcaactttgtggtgctgacggctgcgctctctggctgtaacagcggcatgtacagttgcggacgtatgctctacgcactggcgaaaaaccgtcagttaccggcggcgatggcgaaagtttcccgtcacggcgtaccagttgcgggtgtggcagtatctattgctattctgctaattggctcatgcctgaactacatcattcccaatccgcagcgtgtgtttgtctacgtctacagtgccagcgtgcttccggggatggtgccatggtttgtgatattgataagccagctgcgttttcggcgtgcacataaagcggcgattgccagccatccgttccgctcaatcctgttcccgtgggccaactacgtaacaatggcattcctgatttgcgttttgatcggcatgtactttaatgaagatacgcgtatgtcgctgtttgttggcatcatctttatgctggcggtgacggcgatttataaagtttttggccttaatcgccacgggaaagcgcataaactggaggaataagcagcaaaacgcacaaaccgtaaccaaacgcgcaatttatttaaaaagggactagacagaggggtgggaagtccgtattatccacccccgcaacggcgctaagcgcccgtagctcagctggatagagcgctgccctccggaggcagaggtctcaggttcgaatcctgtcgggcgcgccatttagtcccggcgcttgagctgcggtggtagtaataccgcgtaacaagatttgtagtggtggctatagctcagttggtagagccctggattgtgattccagttgtcgtgggttcgaatcccattagccaccccattattagaagttgtgacaatgcgaaggtggcggaattggtagacgcgctagcttcaggtgttagtgtccttacggacgtgggggttcaagtcccccccctcgcaccacgactttaaagaattgaactaaaaattcaaaaagcagtatttcggcgagtagcgcagcttggtagcgcaactggtttgggaccagtgggtcggaggttcgaatcctctctcgccgaccaattttgaaccccgcttcggcggggttttttgttttctgtgcatttcgtcaccctcccttcgcaataaacgcccgtaataactcattgccccacggtatgatttcgcccttaacgtattgaaggatgacttcaggcaaggagtgaccatgctgcaacaggttccaacgcgtgcttttcatgtgatggcgaaaccgagtggttccgattgtaatctgaactgtgactactgtttttatctcgaaaaacaatccctttaccgcgaaaagccagtcacgcatatggacgatgacacgctggaagcgtatgtccgtcactatatcgctgccagcgaaccgcaaaacgaagtggcttttacctggcagggcggcgaaccaacgttactcgggctggagttttaccgccgtgccgtaaagttacaggcgaaatacggtgctggcaggaagataagtaacagcttccagactaacggcgtgctgctcgatgataaatggtgtgcatttctggcagaaaatcattttcttgttgggttatcgctggacggtccggctgagatccacaatcaatatcgcgtgaccaaaggtggcagaccaacgcataagctggtgatgcgtgccctgacgctgctgcaaaaacatcatgtcgactataacgtgctggtctgcgtcaaccgcaccagcgcgcagcaaccgttgcaggtttatgattttttgtgcgatgcgggagtcgaattcatccagtttattccggtggtcgagcgcctggctgatgaaacagctgccagcgatggactgaaactacatgcgcctggtgatattcagggggaactgacggaatggtcggtgcgccccgatgaatttggtgaatttctggtggcgatattcaaccactggatcaaacgcgacgtcggcaagattttcgtgatgaatatcgaatgggcgtttgccaattttgtcggtgcgccgggtgcggtttgccatcatcagccaacctgtgggcgctcggtgattgttgagcacaacggcgacgtttacgcctgcgatcactatgtttatccgcaatatcggctggggaatatgcatcagcaaacaattgcagaaatgatcgattccccgcaacagcaggtgtttggtgaagataaatttaagcaattaccggcgcagtgtcgcagttgtaacgtgttaaaagcgtgctggggaggctgcccgaaacaccgcttcatgctcgatgccagcggcaaaccggggctgaattatttgtgtgccgggtatcagcgttatttccgccatctaccgccatatcttaaagcaatggctgatttgctggcgcacggtcgcccggccagtgacattatgcaggcacatttgctggtggtgaataagtaaaaaagcggccattttgtggccgcctgcggttgattgccggatgcggcgtaaacgccttatccggcctacatgatcgtgcaaattcaataaattgcagcgttctgtggatactggtttgggtgatcgtatccggcaaagcctttgcgtgcggtggcagttgacggggtatctgctgcgctggccatgagaggaagagcggcggcgacagcaacaacaagaagtttgggtgaaaacgaaaattccatgcaaaatgctccggtttcatgtcatcaaaatgatgacgtaattaagcattgataattgagatccctctccctgacaggatgattacataaataatagtgacaaaaataaattatttatttatccagaaaatgaattggaaaatcaggagagcgttttcaatcctacctctggcgcagttgatatgtaaggcaggtttattatatcgcgttgattattgatgctttttttagttttaacggcaattaatatatgtgttattaattgaatgaattttatcattcataataagtatgtgtaggatcaagctcaggttaaatattcactcaggaagttattactcaggaagcaaagaggattacagaattatctcataacaagtgttaagggatgttatttcccgattctctgtggcataataaacgggtagatgctcattccatctcttatgttcgccttagtgcctcataaactccggaatgacgcagagccgtttacggtgcttatcgtccactgacagatgtcgcttatgcctcatcagacaccatggacacaacgttgagtgaagcacccacttgttgtcatacagacctgttttaacgcctgctccgtaataagagcaggcgtttttttatgcatcagaaaggtcccggaggtgcttgcctccgggtgagaaggaactactgtggtgggtggttctgcaacgttaacatcaaaccgtcgcgacgcatcgctgcagcttcttccggcttgtgcagtctgtccagcgcgtcggcaagccatgcgtaatcgtaggcgtccggacgttgtttcagcgccgcgcggaaggcgagcgatgcttcctgccattctccgtgcttcatcagtgactggcccagtgtgctccacaacagcgggcgatcgccgacgtttttgatctgctggcgcagcactttttccagctgttccggattgttggttttcagtcgaggaatcggcagcagtaggcgatcgtcgtactggcgtttcaggccatcgatgataatttgctgggcagtatcatgatcgtcacattcaataagatgttccgccattgccacctgcaacgctacctgatgacgcgttttccggctttggtttttccaccagttacgcaaaccttcactaccgttatcggcacgcgcctgatccatcaggccaatccatgcctgttgttccagcattgcacgatgttcttcatcaccaacatgggctttcgccattgatgggatgatatccagcagcgaactccatgcacctgtgcggatatacgcctgttccgccagacgtaatacttccggatggcgtggcgtaacttccagcagcttatccacgccgtggcgtgcagcatggttttcattacgggccagttgcagacgtacacgggtgatttctaccggaatggtgtcattgccggccagctctgctgcgcgttccagatgttggttggcgcgtgcttcatcaccacgttgttgcgcggcttcggcagccagtagatagttcaccaccggttgttccgcgtgatcggcatttttcgccatcagcttttcaacttgctgataatcgccttccgccagtttcagcagcgcctgttcggtctgcttacgggcacggcgacgcttacgtccgacaaaccacccacgggtgtgtgcgcctgtgcggaagatccgccgcagtagccactcaatggcaaacagcactaccatcgccagaatcaaaataatcgccaggcccgtgacgctggtttcgatattgtagttgtcagtctggatcagcacgtaaccctgatgaccggcaatcatcgggccaaccactatccccgcaatcagcaaaacaaagagtaataacacttttagcatggttattctccttgcggcgcggctgccggagtatcaccttgcggtgcaggtgcaggtgcaggtgcaggtgcaggtgcaggtttagcttccgttgtccccgctgccggttgtgccagcaggttacgcacgcgggtctgcatcagtttttccagcatcgcctggctttgcagggtttccggaagatccatcgagatattttgctggcttaactggtccacctcgtcgaggaacgctttggtggtggcatcatcagtatcgtagtaagctcgtacccaggtggagacgttctccagcgcctggcgataagtctcttcctggtgacgcggtacagcttgtgctgcgaccagcaggcgagagcgaatattttcgcgcagatagatatcctgatttggcgctaacagcggtacggcggtgtcatcacgacggcgaatcgtaatgaagttgtccataaagttctgccagctttttgcagattgatacgccattcgctgatggaactggaaagctcttcaccgtcggaatccatcggcgaaccatcgctgtcattatcggccagacgcaggttatctacctgatttgaaagctgattaagcttaaggatgatgccgtcataatccacctgcgaaactgcagaaaggctggcgatatcatcggtaattgcccgacgaacggtaatcagactcgggtcattcatatccgccaggctggcatctgcacttttcagcaacgctgcagcggtcgtgacgtcctgatcgctccacagcttccgtccggcgagtttcaccagaaaatcggcctgagccagcagccaggttttagcatcgctgccggaaatggtggcgaccttttgttggacttcatccaactgttttgccagcgtttcttgctgacgattcgcctgcttaagctgtgcagcttgttgcttaataatgccttccagctcggctttttggctctcctgggctttttgcaatgccgtcagttggttagccagggcatcgctggtggcggtctgattgacggcctgttgtttaccccagccatacaaaccgacgcccgccgccagagcaatagcgatagccaccgcgctgagaatcaatgcggtattgttcttactctttttttctgttgcgacaggttgtgacgtggtgtccacggcctccctggtctcttcaaccacggcggaggttttttcttgttccgtcattatggcttcctgttatgagagttattgtaatgcccgtaaaagcgcatcgttgtcagcgttatcggcgaccttaatgtcttgccagcccagttcccgggcgagtttcgccaaacgctcactgacgaccaatagtcgacagtgtagtaaccagtgctcacgataccattgtgggatcagcgaccagagttgctgcaacatttcaccgctggtaacaacgaccatcgtcacctcgcgggattgccagcgcatcgcttcttctgcaccatcgtaatggattgcgcatcgttgataacattcacaaaaagtgacctcagcaccgcgcgctgtcagggtatccccaattagctcacgaccgccattgccacgtaatatcagcgcacgtttgcccgcaatattttgtaattcaggtaattgtagcaagacttcgctgatttcccgatcctgcgggtagagaatcttctgtccgcttacggtatgtagcgccagtgcggtggtgcgtccaatggcgaaataatcaggtagtcggggccatttacgatcttgctgatgcagctgtgattgggcaaaagcaaccgcgtgttgcgagagggcaaacaacagatcgctctcccccagcgccgccagttgatcagcaagttgcggtaattgtcgacccggagaaaactcaatcagcggaaaatgccaggccacctgccccagtgtgcgcagacggctcactaactcttctccagcgggagacgggcgggtgaccaggatactcatgccggggcgtctccgttatagacttcagcgaggatctcgcgcgcgccgttattcagtagctcttctgccagcgaaatccccatttgttcggcattttgcggcgcaccgcggcgttcaccgcgaataatctgcgaaccgtccggcgcgccgaccagcgcacgcagccagatttcaccatcaataagctcggcgtagctaccaattggcacctgacatccaccttcgagacgggtattcatggcgcgttctgcggtaacgcgcagtgcagtttcgtggtgattcagcgcggcaagcagctcgcgagtgcgcgtatcatcaaggcggcattcaataccgactgcaccttgtcctaccgccggaagagaaatctcgggtggtaacgcggcgcgaatgcgggactccagacctaaacgttttagtccggctacggcaagaatgatggcatcgtattcgccgttatctagtttgctcaggcgagtgccgacgttgccgcgcagggagcggataatcagatccgggcggcgttcagccagttggcactggcgacgtaaactggacgtcccgacgatactgcctgccggtaacgcatccagactgtcataattattggacacaaaggcatcgcgaggatcttcacgctcacaaatagtgaccaaccccagaccttgcgggaattcaaccggcacatctttcattgaatgtacggcgatatcggcgcgattctccaggagcgcgacttccagctcttttacaaataagccttttccgcctactttcgccagcggcgtatcaagaatcacatcgccgcgcgtcaccatcggtaccagttcaaccaccaggcccggatgctcgccatcaacttgtctttgacatagtgtgcctgccagagtgcaagtgggctttggcgtgtggcaattcttaaaacattgtctaacatgcttgttaccgtcattatcatccgtggtccatcctaacatccttgccagagtgatgtcagtgttgtggtgaaacgtagacgcctgcgcaaaccgtaaaatgaggtctggcagtggatcctgacaggcgtttcacgccgtcgtaataaggaatttacagagaataaacggtgctacacttgtatgtagcgcatctttctttacggtcaatcagcaaggtgttaaattgatcacgttttagaccattttttcgtcgtgaaactaaaaaaaccaggcgcgaaaagtggtaacggttacctttgacatacgaaatatcccgaatgccgcgtgttaccgttgatgttggcggaatcacagtcatgacgggtagcaaatcaggcgatacgtcttgtacctctatattgagactctgaaacagagactggatgccataaatcaattgcgtgtggatcgcgcgcttgctgctatggggcctgcattccaacaggtctacagtctactgccgacattgttgcactatcaccatccgctaatgccgggttaccttgatggtaacgttcccaaaggcatttgcctttacacgcctgatgaaactcaacgccactacctgaacgagcttgaactgtatcgtggaatgtcagtacaggacccaccgaaaggtgagcttccaattactggtgtatacaccatgggcagcacctcgtccgtagggcaaagttgttcctctgacctggatatctgggtctgtcatcaatcctggctcgatagcgaagagcgccagttactacaacgtaaatgtagtctgctggaaagctgggccgcctcgctgggtgtggaagtcagcttcttcctgattgatgaaaaccgcttccgtcataatgaaagcggcagcctggggggcgaagattgtggctccacccagcatatactgctgcttgacgaattttatcgtaccgccgtgcgtctcgccggtaagcgtattctgtggaatatggtgccgtgcgacgaagaagagcattacgacgactatgtgatgacgctttacgcgcagggcgtgctgacgccaaatgaatggctggatctcggtggcttaagctcgctttctgctgaagagtactttggtgccagcctttggcagctctacaagagtatcgattccccatacaaagcggtactgaaaacactgctgctggaagcctattcctgggaatacccgaacccacgtctgctggcgaaagatatcaaacagcgtttgcacgacggcgagattgtatcgtttggtctcgatccatactgcatgatgctggagcgtgttactgaatacctgacggcgattgaagattttacccgtctggatttagtacgtcgctgcttctatttaaaagtgtgcgaaaagctcagccgtgaacgcgcctgcgtaggctggcgtcgcgcagtgttgagccagttagtgagcgagtggggttgggacgaagctcgtctggcaatgctcgataaccgcgctaactggaagattgatcaggtgcgtgaggcgcacaacgagttgctcgacgcgatgatgcagagctaccgtaatctgatccgctttgcgcgtcgcaataaccttagcgtctccgccagtccgcaggatatcggcgtgctgacgcgtaagctgtatgccgcgtttgaagcattaccaggtaaagtgacgctggtaaacccgcagatttcacccgatctctcggaaccgaatctgacctttatttatgtgccgccgggccgtgctaaccgttcaggttggtatctgtataaccgcgcgccaaatattgagtcgatcatcagccatcagccgctggaatataaccgttacctgaacaaactggtggcgtgggcatggtttaacggcctgctgacctcgcgcacccgtttgtatattaaaggtaacggcattgtcgatttgcctaagttgcaggagatggtcgccgacgtgtcgcaccatttcccgctgcgcttacctgcaccgacaccgaaggcgctctacagcccgtgtgagatccgccatctggcgattatcgttaacctggaatatgacccgacagcggcgttccgcaatcaggtggtgcatttcgatttccgtaagctggatgtcttcagctttggcgagaatcaaaattgcctggtaggtagcgttgacctgctgtaccgcaactcgtggaacgaagtgcgtacgctgcatttcaacggcgagcaatcgatgatcgaagccctgaaaactattctcggcaaaatgcatcaggacgccgcaccgccagatagcgtggaagtcttctgttatagccagcatctgcgcggcttaattcgtactcgcgtgcagcaactggtttctgagtgtattgaattgcgtctttccagcacccgccaggaaaccgggcgtttcaaggcgctgcgcgtttctggtcaaacctgggggttgttcttcgaacgcctgaatgtatcggtacagaaactggaaaacgccatcgagttttatggcgcgatttcgcataacaaactgcacggcctgtcagtgcaggttgaaaccaatcacgtcaaattaccggcggtggtggacggctttgccagcgaagggatcatccagttctttttcgaagaaacgcaagacgagaatggctttaatatctacattctcgacgaaagcaaccgggttgaggtgtatcaccactgcgaaggcagcaaagaggagctggtacgtgacgtcagtcgcttctactcgtcatcgcatgaccgttttacctacggctcaagcttcatcaacttcaacctgccgcagttctatcagattgtgaaggttgatggtcgtgaacaggtgattccgttccgcacaaaatctatcggtaacatgccgcctgccaatcaggatcacgatacgccgctattacagcaatatttttcgtgatgaacgtgccggaaagcgaggcttatccggcatgcaatcttagcggaaactgactgtttcacccgcctgctgcgtcgccgcctgttccagcaaatcccagaaggtttcgccgctgcgatcgcaaatccactcatcgcctttcagatcaaaatggtagccgccttgtttggttgccagccatacctggtgcagcggttcctgtcggttgataatgattttgctgccgttttcaaaggtaatggtcagtacgccgccgttgatttcgcagtcgatatcgctgtcgccatcccagtcgtccaggcgttcttcaatggtcagccagagttgatcagccaggcgatgaaattcactgtcgttcattgttgtatcctgtttttaagtgatggcggcagtatagcggcatggggtcagggcttcaaagtttgcacctctgcggctgcgttccggcatgattcatccgtcaccggaataatgatgtctctgttttgaacttcacgtacgttctcctctctgacacgagttttcgccgggcagggggagggcgtaatccttacctctgtatcggtccatgtataaacattgcgatcgtcataagcgaagcgatcgtttttagttagcggaccgttaactggaataatttgcaagctctttgaccgtaattggcggataaaataagcatgctgtttgccgctattaaatgagcgatcaatgaccaggtctggcgtatccagcgggattatctcaagctggtcttcaccaaatgtcgataattttgttacatacaaccgatctttatattgcgcaatattgccagtaatcagatggaattgttcaggttcaatatctggtaggtctatccacttgctccactgacggtcggacgtgagctgtttacgccagcgaacgcgactttcccctacttcaaaagagacgtcatcatctacgggtatcgctttgtctgataattgaccaaagggataacgatgcatacccttattgtcgcgaaaaaccagcagtgaatgaggtatccagcgaattatctcaaatgagtctgcattcgccgtaaggtgaacgccatttaaataaatattctgcccactgcggataagcagatcattggaatacaaatttctgtttacactcataagacgtggattaataccccaccatcttttttctaatacagtaacattactgctgctcccctgacgtcgaccggacaaatagagatttttactatccaccagcgtggtagagttaccttcgatagcttttagtgtcgccagatcaacacgtgacgcgccgctattactttcggtgcgctgtccgtcaaaatagaggctatatttatcgaccgcgaagcggcccatagcctgaaagctggcaatatcgacagtgggtgttcccggtggattgctaacgattttgccacgccagagaataacgcggccgtctgtcacccagtggtattcctcattttttatgcttatttcatcggtgggtatatagccttccaccaactcccgctccccggatatatttgtcacaaggcgcaaatcggctctgttcatcttcggaaattgggcaatgattttcttatccccccaataacctttaccgtaagacataacaccgtgatcattgtaatagtcgaaccctatggcctgtacagcaggcgtcagaaatatgtgccccaacaggatgagtgcaacagtgattatttgaccattcattttgtcgcctcattgcgcggggcaggaataaattcgccgtcatcggtaatttttccgtccagatatcccgttttgtaatttacgccatagccatatcccgaatgttgttccttccagattaagcgaacttgtttcggatccgcagtgcggtatcgccagagctgcgcgccatcaaagctgtaaatgtagcggttatcgcgggcataccatctgcgcaaaaagggatggtcattaagatgggcttcgcgttcatccggagaacggttatccagtaagatcagcggtccgtcagattcaaacacatgtaaaccggaatggtatggccacccttcggcacgcgtaagtaaatagccgtggcgtttcccggcgttgaaacgtttgttgataataagattgggatcatcaagtttcacgatttccagcttgcggtcaccagactctgtttcgatgatggtataaagcgagtcctgatactgggcgacagcatcactgatgggttgaaactgctccggatcgagtccgggtaattcttcctgtttacaagcaggtcctttacgccagaacactttcttttccagcagagaaaaatccagacagtgctttgttaaatcttcatcccactccagattttccttgtcgaggactttacgctgcagcccgtttttatcacgccaggtcaagagtgagccgggcatccagcgcacgacggaaaaggtgtccgggtcggcatcaagctgttcgccgttgatcaggattttggtccgtgtacgagccagggtatcccaggggccaaatggcatagccacacagggattaaacgcggtagaaaactttcctcgctgatcccatgacttttgtgccagcacacggaaactatcgggatctgcgaggcgatgcccattgatatacaagaaattagcgtcacgtaatatcagccccagtaagtcaggatcccagggaggccggaattccacctgatgcagtgttttgatatctaagcgatttcccccgccattgttatcggtgcgcttgccttcgaaatagagactgtgtttatctgcggcaaaatcaccccacgccttgaacgaggcgacatcgacgggaggtttgtctggcgggttttgcacaacttcacccgcgtagaggatatagcgaccatcgctatgccaggagtaatgaggataccaggcctgtgcgccttcatagaggtagtcggttgtcagatcagtcagaggaggtactttatcccatttgtctagtgttgtcgggtctattaataaattgggtaaacggcgcaaacttttgtaattcacgtcaggaagagaaagatttgtttctttataagggcgcaggtataccacgccttttccctgtttctggtaaatattatgttcaggcggatcaagccgacatccccatgccgacgataaaaacaatgaacaagacaacaaacaaaccacattgcgatagtgcataaagccatcctggcgcgaggtgccgatcacgaaactaccagcagaacataattcctcgcacgtaagcgtaacttttgcggcaaatcgtcacttttcagaatctataaaggccatcgctattttctgatagttgctggggtaaacttgaggttttcattcacgatataaatacgagctactgcgccatggtgtgactgatcacgttaaaatgtgccggattgacgccgggaagggtgtcaacatgcgactctgcccaccgttacctactttattgtctttcgcgtgttgtacttaggtcccaccaccggtatctaacattccccacattattacgctttctgccgaacgtgatttttatagaaatctatcaattcattttccctgtaccataaagtttatctttcacatcctgccgaacgcgggtcttgtaccccccgttgtgaagatcttcatacggagaaaaagaatctttactccaccccagcagcactttatcgccaggcataaaatgcacatgcagaaaatcttctccccattctcttttggggagaggtaacgtcatattccgtttctccagacgcattccagcattatactgtgtacgagtagtacttaatgtccagataacctctgccgtatccccactaacatcaccacaacaggttgttgaaccgccaccatttgcaaaagcattcgcgcccgccacgccgttaacactgaatcccagtatcgcgcggtcaatttcactgtggatttccagaatcactccacctcttggtcctccccatactgcctgtcctatattccacaacacgaccagtaccggaacgacaattaacgtccgccatacccagcgcccccaccgggcataaccgcgcgtaagcttttggtcaaatttttccagttgggtaaatagccccatcagattttattccctcttatcaccaggttggcaaagttgtatgtcactggcgactaaggtcagacaacgaaattgcatggtgcgccactctattaaaagccccatgccgacgataagaacaatgaacaagacaacaaacaaaccacattgcgatagtgcataaagccatcctggcgcgaggtgccgatcacgaaactaccagcaaaacataaatccccacgtgtaagcgttatactcgcagcatttcctcacttttcagacttcataaagagtcgctaaacgcttgcttttacgccttctcctgcgatgatagaaagcagaaagcgatgaactttacaggcaatccataatgaaaaacgtgtttaaggcactcactgtattaattactctcttcagcctgacgggctgcggtctgaaaggtccgctctatttcccgcctgcagataaaaacgcaccgccgccgaccaaaccggtagagacgcaaacgcaatccacggtgccggataaaaacgatcgcgccactggcgatggtccatcccaggtgaattactaaaagtcagtttctgtacccgcgtgattggagtaaatgatgcagttctcgaaaatgcatggccttggcaacgattttatggtcgtcgacgcggtaacgcagaatgtctttttttcaccggagctgattcgtcgcctggctgatcggcacctgggagtagggtttgaccaactgctggtggttgagccgccgtatgatcctgaactggattttcactatcgcattttcaatgctgatggcagtgaagtggcgcagtgcggcaatggtgcgcgctgctttgcccgttttgtgcgtctgaaagggctgaccaataagcgcgatatccgcgtcagcaccgccaacgggcggatggttctgaccgtcaccgatgatgatctggtccgcgtaaatatgggcgaacccaacttcgaaccttccgccgtgccgtttcgcgctaacaaagcggaaaagacctatattatgcgcgccgccgagcagacaatcttatgcggcgtggtgtcgatgggaaatccgcattgcgtgattcaggtcgatgatgtcgataccgcggcggtagaaacgcttggtcctgttctggaaagccacgagcgttttccggagcgagccaatatcggttttatgcaagtggttaagcgcgagcatattcgtttacgcgtttatgagcgtggggcaggagaaacccaggcctgcggcagcggcgcatgtgcggcggtggcggtagggatccagcaaggtttgctggccgaagaagtacgcgtggaactccccggcggtcgtcttgatatcgcctggaaaggtccgggtcacccgttatatatgactggcccggcggtacatgtctacgacggatttattcatctatgaagcaaccaggggaagaactgcaggaaacactcacggagcttgatgaccgggcggttgtcgattatctgattaaaaatcctgagttttttatccgtaatgcgcgcgcagtagaagcgatacgtgtgccgcatccggtacgcggcaccgtttcgttggtcgaatggcacatggcccgcgcacgtaatcatattcatgttctggaagagaacatggcgttgttgatggaacaggctatcgccaacgaaggcctgttttatcgcttactctacctgcagcgcagtctcaccgccgccagcagtctcgacgatatgctgatgcgctttcaccgctgggcgcgcgatctcggtctggctggtgcgagtctgcgcctgtttccggatcgctggcgcttaggtgcgccgtcgaaccacactcatctggcattaagccgtcagtctttcgaaccgctgcgtattcagcgtttggggcaggaacagcactatcttgggccgcttaacggaccagagctgctggtggtgctaccggaagcgaaagcggtgggatcggtggcgatgtcgatgctgggaagcgatgctgatttgggtgttgtgctgtttaccagtcgcgatgccagtcactatcaacaagggcaaggaacgcagttacttcatgaaattgcgctgatgttgccggagcttctggagcgttggattgaacgcgtatgaccgatttacacaccgatgtagaacgctacctacgttatctgagcgtggagcgccagcttagcccgataaccctgcttaactaccagcgtcagcttgaggcgatcatcaattttgccagcgaaaacggcctgcaaagctggcagcaatgtgatgtgacgatggtgcgcaattttgctgtacgcagtcgccgtaaagggctgggagcagcaagcctcgcgttacggctttctgcgctacgtagcttttttgactggctggtcagccagaacgaactcaaagctaacccggcgaaaggagtttcggcaccgaaagcgccgcgtcatctgccgaaaaacatcgacgtcgacgatatgaatcggctgctggatattgatatcaacgatcccctcgctgtacgcgaccgtgcaatgctggaagtgatgtacggcgcgggtctgcgtctttccgagctggtggggctggatatcaaacacctcgacctggagtctggtgaagtgtgggtaatggggaaaggcagcaaagagcgccgcctgccgattggtcgcaacgctgtggcgtggattgagcactggcttgatttgcgcgacctgtttggtagcgaagacgacgcgctttttctgtcgaaactgggcaagcgtatctccgcgcgtaatgtgcagaaacgctttgccgaatggggcataaaacaagggctgaataatcacgttcacccacataaattacgtcactcgttcgctacgcatatgctggagtcgagcggcgatcttcgtggtgtgcaggagctgctgggtcatgccaacctctccaccacgcaaatctatactcatcttgattttcaacaccttgcctcggtgtacgatgcggcgcatccacgcgccaaacgggggaaataatgcgtttttaccggcctttggggcgcatctcggcgctcacctttgacctggatgataccctttacgataaccgtccggtgattttgcgcaccgagcgagaggcgcttacctttgtgcaaaattatcatccggcgctgcgcagcttccagaatgaagatctgcaacgcctgcgccaggcggtacgggaagcggaacccgagatttatcacgacgtgacgcgttggcgttttcgttcgattgaacaagcgatgctcgacgccgggctgagtgccgaagaagccagtgcaggcgcacacgcagcaatgattaactttgccaaatggcgcagccgaatcgacgtcccgcagcaaactcacgacaccttaaaacagctggcgaagaaatggccgctggtggcgatcaccaacggtaacgcccagccggaactgtttggtttgggggattattttgagtttgtgctgcgcgctggcccgcacgggcgctcaaaaccgttcagcgatatgtactttttggctgcggaaaaactcaacgtgccgatcggcgagatcttacatgttggggacgatctcaccactgacgtgggtggggcaattcgcagcggaatgcaggcttgttggatcagaccggaaaatggcgatctgatgcaaacctgggacagccgtttactgccgcatctggaaatttcccggttggcatctctgacctcgctgatataatcagcaaatctgtatatatacccagctttttggcggagggcgttgcgcttctccgcccaacctatttttacgcggcggtgccaatggacgtttcttacctgctcgacagccttaatgacaaacagcgcgaagcggtggccgcgccacgcagcaaccttctggtgctggcgggcgcgggcagtggtaagacgcgcgtactggtgcatcgtatcgcctggctgatgagcgtggaaaactgctcgccatactcgattatggcggtgacgtttaccaacaaagcggcggcggagatgcgtcatcgtatcgggcaactgatgggcaccagccagggcggcatgtgggtcggcaccttccacgggctggcgcaccgcctgctgcgtgcgcaccatatggacgccaatctgccgcaggatttccagatcctcgatagcgaggaccagctgcgcctgcttaagcgtctgatcaaagccatgaacctcgacgagaagcagtggccgccgcgccaggcaatgtggtacatcaacagccagaaagatgaaggcctgcgtccgcatcatattcaaagctacggtaatccggtggagcagacctggcagaaggtgtatcaggcgtatcaggaagcgtgtgaccgcgcgggcctggtggacttcgccgagctgctgctgcgcgctcacgaactgtggcttaacaagccgcatatcctacaacactaccgcgaacgttttaccaatatcctggtggacgaattccaggataccaacaacattcagtacgcgtggatccgcctgctggcgggcgacaccggcaaagtgatgattgtcggtgatgacgaccagtcaatctacggctggcgcggggcgcaggtggagaatattcagcgtttccttaatgatttccccggtgccgaaactattcgtctggagcaaaactaccgctctaccagcaatattctgagcgccgctaacgccctgattgaaaacaataacgggcgtctgggtaaaaaactgtggaccgatggcgcggacggtgagcctatttccctctattgcgcttttaacgaactcgatgaagcgcgttttgtggttaaccgcatcaaaacctggcaggacaacggcggggcgcttgccgagtgcgccattctctaccgcagtaacgcccagtcgcgtgtactggaagaagcactgttgcaggccagtatgccgtaccgtatttacggcgggatgcgcttcttcgaacgccaggaaatcaaagacgcgctctcgtatctgcgtctgattgccaaccgtaacgacgacgcggcgtttgagcgcgtggtgaatacgccaacgcggggtattggtgaccggacgctggacgtggtacgtcagacatcgcgcgatcgccagttaacactctggcaggcatgtcgtgaactgttgcaggaaaaagccctcgccgggcgagctgccagcgccttgcagcgatttatggaattaatcgatgccttagcgcaagaaactgccgatatgccgctgcatgtacagactgaccgggtaattaaagactccggcctgcgcaccatgtacgagcaggagaagggcgaaaaaggccagacgcgtatcgaaaacttagaggaactggtgacggcaacgcgccagttcagctacaacgaagaagatgaagatttaatgccgctgcaggcattcctctcccatgcggcgctggaagcgggcgaggggcaggcggatacctggcaggatgcagtgcagttgatgacgctgcactcggcgaaaggcctggagttcccgcaggtgtttattgtcggtatggaagagggtatgttcccaagccagatgtcgctggatgaaggcgggcgtctggaagaagaacgccgtctggcctacgttggtgtaacccgcgcgatgcagaaactgacgctgacctacgcggaaacccgccgtctgtatggtaaagaggtttaccatcgcccgtcgcgctttatcggcgagctgccggaagagtgtgtggaagaggtgcgcctgcgcgctacggtaagtcgtccggtcagccatcaacggatggggacgccgatggtcgagaacgacagcggctacaagctcggtcagcgtgtacgccacgctaagtttggtgaaggcaccatcgtcaatatggaaggcagcggcgagcatagccgtttgcaggtggcattccagggccagggtattaaatggctggtggcggcatacgcccggctggagtcggtgtaacgttgccggatgcggtgctgcgcaccttatttggcctaaaaaatcattcatattcaataaattgcaacttcatgtaggccggatagggcgtttacgccgcatccggcatctgcgccatcttcagtatctgacacaaaactatcgttttaacctttccgctctacggaaatcatggtgacaaaaggatagcgttgccacgggattgccccgcctttcatatacatatgtgaaatcgtgccatcaagataaagcagctgctcaacgttcagtttcgctttggcataacaggcaaaatcataaaaatttgtcgcctgctggctcaacaaaaacacggcattcccatgtttattaatcccaacaccgttacgaattttacgtgaggcgacgttgggatgaatacgcggattaattacactgttttccatcaacattggccctgactgcaccgcaaactgaatctctttactggttttgaaggcatccagacgaacgatgccgactttatctcccgcgacataaaacacgccgccaggacggataaagaaattcccttcacctgaagcgagatttaacgccaccttctgctgaccgttttcgatgtacaaaccgagcggcgcatagctttcatcatagatgccgccgttcatcgccatctgcacctgaccctgactattcatatccgccagcagagcatgtaaagttccccacgcttcgccattggctttttgccagtacattttcacccgctctgtttgaggattaacggtatacgcctgtacggtcagcgtcggatctgagagtgcgcaatcatcagcggcaacagcaaacaagggaagtaaggtgagggtgagaaaaatccgtttgagattcaaggtgatcattcctttaccaatgagtagccgatgcgccattataggtcctggatgttggattttttatcctgttagcgaccttgacgagtaccaaaaagcgcgaagttcaactattgttctgtggtgttctgttgcgtgttgacggcaaatttgctggcgtaacatgcgcgcacgatcactctaagaggacattcgccttggacacacccagtagatactggctcactatcctgtcatccaggatcaactcctaaggctatccctttttgctgatagccttagcggttgtcagcgacctcaatttttcccgtcgcgctgagtcaggctgtttaatggtctgaaacccaatttgtttctgtgtgcccaccgaactgtccgatattttaagcattgggagtcccggtcatgctgagcgcatttcaactggaaaataaccgactgacccggctggaagtcgaagagtcacaaccccttgtaaatgcagtatggattgatcttgtcgaaccggacgacgacgagcgactgcgcgtacaatctgaacttggccagagcctggcaacccgcccggaactggaagacatcgaagcatcggcacgtttctttgaagacgacgacggcctgcatattcactccttcttcttctttgaagatgcggaagatcacgccggtaactccactgtggcatttaccatccgtgatggtcgtctgtttactctgcgtgagcgtgaactgcctgcattccgtctgtatcgtatgcgcgcccgtagccagtcaatggtggacggtaacgcctacgagctgctgttggatctgttcgaaaccaaaatcgaacagctggcagatgaaattgaaaatatctacagcgatctggagcagttgagccgggtaattatggaagggcatcagggcgatgagtacgatgaggcgctctccacgctggcggaactggaagatatcggctggaaagttcgcctgtgtctgatggatacccagcgtgcgctcaacttcctggtacgcaaggcgcgtttaccgggtgggcaactggagcaggcgcgtgaaatcctgcgagatatcgaatccctgctgccgcataacgaatccctgttccagaaggtgaacttcctgatgcaggcggcgatgggctttatcaacatcgagcagaaccgcatcatcaaaatcttctcggtggtatccgtggtattcctgccgccgacgctcgttgcttccagctatgggatgaactttgagtttatgccagaactgaagtggagtttcggctacccaggcgcgattatctttatgatcctcgcgggcctggcaccgtatctgtactttaagcgcaagaactggctgtaatatgagtgccggataaagctatttttttatccggcttatttctaaaaattgtcgtatttaaagtcatgcggattgaaaactcgctctattttattttcttgtgttaattgatactcagtaaaatcgttaataccaatatgagtgttacgataagggtattcattaataaccattaagtaatttttcacgatgcaattatcattgctcttaattgtcgggaaacagtagagatcttcatacggcccttcgatatattttttatagtcagtgaagccattaccgatatcaatgacataccaggtatgccaactaccttctggtaggggatgttgatttttaatttcattctgatgcttcagataccaatttattttatcgctgtcagtccatggcagatgatcaacgaccagaaagactgaattgccagcatcagagtatgtatacaaaatctgtacaggacgcaatgtccataaattatagatgcagcatagaagaaataaacataatataattttctggagtttgcttttcatagataattttcgattctttcgatagtgttaaaattggtgaaaaaaggtttgaaagcaaagtctttatgccgttgtaaaaagaaccatatgcgaaaaaatctatatttgctgtaagtcttgtttttgatatcagttacatcaagaccgaagtggtcctgtgctacaaaatgaattgttgcactccatcctatagcgtagttttgaaaacttaaaagagatattttttgagctgaaatatcatgaacactgattcctaagccattaaaactgtcctcgaagtcattaaatttatttagtcttgatgaaagtaatttggttttaatgctttgcaggataagaggttggtatcctgtcgagggagttgaattaatgccattttcgatacattctttgattattcgtattggactattataaccatatttatttattttttcatgaaaagataaatttaattgttggctatgaaaattgctgccatttccatatctaaaatgttcaatcagatcttcgataagtgttttattttgtccaaaaaaggaaaacatttttgctagttctttcatttctgcaaataaaatatcagtgcattcacgttgtgatatttttgttccggaacttgaggcactaaaagcaacattaatagaacctgggccagggaaatggtatttaataagtctgtaaggatcaacttttgctgagatatcgcttaggccgagtgagagaaagtcttgttctaccatatcaccatattgcatatcatcagcagaaaaatcatctaataaactaatagtttcgaaaagtgtacagggaatattaattggcggaagtaatatgttattcatttgcatttgccttggttatatttaagctcaatgtcaattcgagaacaaatgctagggtaaaaaaatatttaaaaaagaagtacatttcacattttttcattacatctctgaagagaacctcgttaatgattggtcttgctcattgttaataacaaaatgttgaatttaccgattaggaaactttttcctacgcggattgcctccagctatggcatgaactttgagtttatgccagaactgaagtggagctttggctaccctggcgcgattatctttatgatccttgcgggcctgacaccgtatctgtactttaagcgtaagaactggctgtaactatacgatgtcgctgtgagtaagttagtgtgctgacagcgacattttagccgagggaatcgcagataatataattgttgtgaataatatccatgccacgttgagttggacgcttaatgactcacatctcaccccttcaattgctgcagagataatagaaaaaagtgtcaaacccaatgaaatcaatacaaagtagattgccttacatccagtatctcttattctttttgctccaatattgatatttacataggtattattaataaccagaataaaactcaaagccaggttgatatcattcaaagttattaatattgaccatgatgttaatgtatagattatgaactgaaagcgtgataaatgctcaagcctggatgggtagaatatatttctgatggatgatttgaatattttttacattgttttttatatataattgttttgaatatatatatta

SEQ ID NO: 206 - DNA, 158389 bp, Escherichia coli
catatatatatgcaatatagcagtctttgcattgataactatacagtagtaatttagagtgtgtaagtttttattgatggggtatattttaattaaatataattggaatgtatttttattctataaacaatatcttggggaatggattctatatggggaatggtaacttttggcagttgttcttgggtaaagaaccttacagcaaaaaatctgattttgttaaggcatggttattgtggtgggctattaccatccttgttctatttattttaagcctgactacgacattaaatttaagaagtataggtatagggttaagttttgggttttgtcaaatccttggtagatatacgatgtctctaggatggagtaagtactggggagttttgggggtacttcctgtaacaaatattgttctttttcttatcttaatttttttcaaaaaaagataaataagtcagtgggtaggctcattaaacggcctacccatgttaattcttaactttttctacgctgcgtataaatcgcatccatcacaaaaattgccagcgccacccaaataaaggcgaaagtcaccatcttatcggcacccggtttttcaccataaaacgtcacagccagcaggaacatcagcgtcgggccaatgtactggaaaagcctaacgttgagagacgcaggcgcgtggcagcggcagtaaaacacaacagcggtacggtagtgacaataccggcggcgatcagcagtaaattcagcgacatcgggttttgccccatatggctggttgagctgtcggcaatagcaaacaggtaaatcgccgccacgggcagcagccacatggtttcaattaacatgccggtttgtgcttctaccgcaatcttcttgcgcaccaggccgtagaaggcaaaactaaatgccagccccagcgcgataataggtagcgaaccaaaagtccacagctggaccaacacgccacatatcgccagaatcaccgccagccattgcatccggcggaatcgctcgccgaggaaaatcatccccagcacaatgttcaccagcgggttaataaagtaaccaaggctcgcttccagcatatggtgattgttcaccgcccagataaacagtagccagttgccaccaatcagcacggcagagactgccagcataaaaattttctgtggcgtctgaatcagcgtttttaaataggaccactggcggcaaatgctcatcagcaccaccataaagaaaaacgaccagatcacgcgatgcgtcaggatttcatcggcgggcacgtagtaaatcaacttgaagtacgctggcgcaataccccaaataaaataagcggcaagagcgagtaatacgccctgccgcgtttgttttgcatccatcgggaatactcatttttaattggtaacagcagtttacctgcttttatgtcttcaacctaccatataggtggcggtggcactggcaatataaagctgttcttcattgtgtaattcaacgcgggcgacggcgactttattgcctgcacgcaacaggctactggtagcagtaaaacgctcacccctgcctgggcgcagataatcaacgcgaagatcaatggtccccatccgcgatagccgctggcgtagttcatcttcactgatggtttcgtggcgggttaaggtacttcctacgcacaccagaccggcggcgacatccagcgccgacgcaatgaccccgccgtgcaaaatgctttgcgcccagttgcccaccatcattggctgatttttaaaggccagctgtgcgaactctttttcgtaacgctccagttccatccccaatgcgcggttaaatggcatgtgataaacaaacatctcacccactaatttcagggcttgttcagcggtcagtacggcagacatatcatccttacacttcattggttaatgaaatgttgattttatgcttctttgttgttggtttctactttaggaagggataactaacggcaatggagttaagtatgtaaaatagcccgcagaaaaacattcaccttatcaataattcgttacggagaacacgaccgatgcggactctgcagggctggttgttgccggtgtttatgttgcctatggcagtatatgcacaagaggcaacggtgaaagaggtgcatgacgcgccagcggtgcgtggcagtattatcgccaatatgctgcaggagcatgacaatccgttcacgctctatccttatgacaccaactacctcatctacacccaaaccagcgatctgaacaaagaagcgattgccagttacgactgggcggaaaatgcgcgtaaggatgaagtaaagtttcagttgagcctggcatttccactgtggcgtgggattttaggcccgaactcggtgttgggtgcgtcttatacgcaaaaatcctggtggcaactgtccaatagcgaagagtcttcaccgtttcgtgaaaccaactacgaaccgcaattgttcctcggttttgccaccgattaccgttttgcaggttggacgctgcgcgatgtggagatggggtataaccacgactctaacgggcgttcagacccgacctcccgcagctggaaccgcctttatactcgcctgatggcagaaaacggtaactggctggtagaagtgaagccgtggtatgtggtgggtaatactgacgataacccggatatcaccaaatatatgggttactaccagcttaaaatcggctatcacctcggtgatgcggtgctcagtgcgaaaggacagtacaactggaacaccggctacggcggcgcggaattaggcttaagttacccgatcaccaaacatgtgcgcctttatactcaggtttacagcggctatggcgaatcgctcatcgactataacttcaaccagacccgtgtcggtgtgggggttatgctaaacgatttgttttgatgaacggttgagtggttggcaaatctggaatccagcatccaggattaccctctcagagactaaaagcattgcagtttctcgcgcaggcgctgaaaatagcgcctgtttttatttcaggcaatcggggtgaatgtggcgcaggcggaagtgttgaatctggagtccggagctaaacaggttttacaagaaacctttggctaccaacagtttcgccccggccaggaagaaattatcgacactgtgctttccggtcgcgattgcctggtcgtcatgcccaccggtggcggaaaatccctttgctatcaaattcctgccttattgctaaacggccttaccgtggttgtttcaccgctgatttcgttgatgaaagatcaggtggatcaactgcaagccaacggcgtggcggcggcgtgccttaactcgacgcaaacccgcgaacagcaacttgaagtgatgacaggctgccgcaccgggcaaattcgtctgctttatatcgccccggaacgcctgatgctggataactttcttgagcatctggcgcactggaatccggtgttattagccgttgatgaagcgcactgtatctcccaatggggccacgatttccgcccggaatatgccgcgctcggtcagttgcgccagcggttcccgacgctgccgtttatggcgctgaccgccacagccgacgacaccacgcgccaggatatcgtgcgcctgctggggctgaacgatccgctgattcaaatcagcagttttgaccgtccgaatattcgctacatgctgatggagaaattcaaaccgctcgatcagttgatgcgctacgtgcaggaacagcgcggtaagtccggcattatctactgcaacagccgggcgaaagtagaagacaccgctgcgcgcctgcaaagcaagggtattagcgcggcggcctatcatgccgggctggaaaataatgtccgcgccgacgtgcaggagaaattccagcgcgatgacctgcaaattgtggtggcgacggtggcgttcggcatgggcatcaataaaccaaacgttcgcttcgtggtccactttgatattccgcgcaatatcgaatcctattatcaggaaaccggtcgcgccgggcgtgatggcctgcctgcggaagcgatgctgttttacgatccggctgatatggcgtggctgcgccgttgtctggaagagaagccgcaggggcagttgcaggatatcgagcgccacaaactcaatgcgatgggcgcgtttgccgaagcgcaaacttgccgtcgtctggtattgctgaactattttggcgaagggcgtcaggagccgtgcgggaactgcgatatctgcctcgatccgccgaaacaatacgatggttcaaccgatgctcagattgccctttccaccattggtcgtgtgaatcagcggtttgggatgggttatgtggtggaagtgattcgtggtgctaataaccagcgtatccgcgactatggtcatgacaaactgaaagtctatggcatgggccgtgataaaagccatgaacattgggtgagcgtgatccgccagctgattcacctcggcctggtgacgcaaaatattgcccagcattctgccctacaactgacagaggccgcgcgcccggtgctgcgcggcgaatcctctttgcaacttgccgtgccgcgtatcgtggcgctcaaaccgaaagcgatgcagaaatcgttcggcggcaactatgatcgcaaactgttcgccaaattacgcaaactgcgtaaatcgattgccgatgaaagtaatgtcccgccgtacgtggtgtttaacgacgcaaccttgattgagatggctgaacagatgccgatcaccgccagcgaaatgctcagcgttaacggcgttgggatgcgcaagctggaacgctttggtaaaccgtttatggcgctgattcgtgcgcatgtcgatggcgacgacgaagagtagtcagcagcataaaaaagtgccaggatgaagactccgtaaacgtttcccccgcgagtcaaatgtatgttgatgttatttctcaccgtcgccatggtgcacattgtggcgcttatgagtcccggtcccgatttcttttttgtctctcagaccgctgtcagtcgttcccgtaaagaagcgatgatgggcgtgctgggtattacctgcggcgttatggtttgggcagggattgcgttgcttggcctgcatttgattatcgaaaaaatggcctggctgcatacgctgattatggttggcggtggcctgtatctctgctggatgggttatcagatgctgcgcggcgcgctgaaaaaagaggcggtttctgcacctgcgccacaggtcgagctggcgaaaagtgggcgcagtttcctgaaaggtttactgaccaatctcgctaatccgaaagcgattatctattttggttcggtattctcattgtttgtcggtgataacgttggcactaccgcgcgctggggcatttttgcgctgatcattgtcgaaacactggcgtggtttaccgtcgttgccagcctgtttgccctgccgcaaatgcgccgtggttatcaacgtctggcgaagtggattgatggttttgccggggcgttatttgccggatttggcattcatttgattatttcgcggtgatgccagacgcgtcttcagagtaagtcggataaggcgtttacgccgcatccgacattatttttcacgcatgcctcgccgatgctaacagtgctcccaccagcataaacaacgagccgaaaatcttattcagcgccttcatctgctttggtcctttaatccatagagcaatccgttgagcaagggtggcgtaaccgatcatcacaataatatcgaccacaatagtggtgacgccgagcacgatatactgcatcagttgcggctgttgcggcatgatgaattgcggaaatagcgccgccagaaacacaatacttttgggattggtgagattcacaaaaactgcgcgctgaaacaaatgtcgacgcgattgagtagaggccagcgatttaaggtcaattgcaccagcggcgcgccactgctggattcccagccaaatcaagtaagccgcgcctgcccacttcaacacttcaaacgcaatcactgagcgggaaaatagcgtccccaaccccacgccaaccagcacaatatgaatcgccagtccggtctgaagcccagcaatagacgccaccgcgccgcgataaccgtggttgagcgaggtggtcatagtgttgattgcaccagagcctggcgacaggcttaaaatgatcgatgtcagcaggtaggcaaaccaccattctaaggtcatgatgaactcccggtgtgtctatttttgtgccacaatacgctactgtcgcagcgttgtgtcaggcacgctaaaaaaacgattttacgtggtttaagaggcagattacccgatgtttcagcagcaaaaagactgggaaacaagagaaaacgcgtttgctgcttttaccatgggaccgctgactgatttctggcgtcagcgtgatgaagcagagtttactggtgtggatgacattccggtgcgctttgtccgttttcgcgcacagcaccatgaccgggtggtagtcatctgcccggggcgtattgagagctacgtaaaatatgcggaactggcctatgacctgttccatttggggtttgatgtcttaatcatcgaccatcgcgggcagggacgttccggtcgcctgttagccgatccgcatctcgggcatgttaatcgctttaatgattatgttgatgatctggcggcattctggcagcaggaggttcagcccggtccgtggcgtaaacgctatatactggcacattcgatgggcggtgcgatctccacattatttctgcaacgccatccaggtgtatgtgacgccattgcgctaactgcgccaatgtttgggatcgtgattcgtatgccgtcatttatggcacggcagatcctcaactgggccgaagcgcatccacgtttccgtgatggctatgcaataggcaccgggcgctggcgcgcgttgccgtttgctatcaacgtactgacccacagcagacagcgatatcgacgtaacttacgcttctatgctgatgacccaacgattcgcgtcggtgggccgacctaccattgggtacgcgaaagtattctggctggcgaacaggtgttagccggtgcgggtgatgacgccacgccaacgcttctcttacaagctgaagaggaacgcgtggtggataaccgcatgcatgaccgtttttgtgaactccgcaccgccgcgggccatcctgtcgaaggaggacggccgttggtaattaaaggtgcttaccatgagatcctttttgaaaaggacgcaatgcgctcagtcgcgctccacgccatcgttgattttttcaacaggcataactcacccagcggaaaccgctctacagaggtttaaatttcttatgtaccaggttgttgcgtctgatttagatggcacgttactttctcccgaccatacgttatccccttacgccaaagaaactctgaagctgctcaccgcgcgcggcatcaactttgtgtttgcgaccggtcgtcaccacgttgatgtggggcaaattcgcgataatctggagattaagtcttacatgattacctccaatggtgcgcgcgttcacgatctggatggtaatctgatttttgctcataacctggatcgcgacattgccagcgatctgtttggcgtagtcaacgacaatccggacatcattactaacgtttatcgcgacgacgaatggtttatgaatcgccatcgcccggaagagatgcgcttttttaaagaagcggtgttcaaatatgcgctgtatgagcctggattactggagccggaaggcgtcagcaaagtgtttttcacctgcgattcccatgaacaactgctgccgctggagcaggcgattaacgctcgctggggcgatcgcgtcaacgtcagtttctctaccttaacctgtctggaagtgatggcgggcggcgtgtcgaaaggccatgcgctggaagcagtggcgaagaaactgggctacagcctgaaggattgtattgcgtttggtgacgggatgaacgacgccgaaatgctgtcgatggcggggaaaggctgcattatgggcagtgcgcaccagcgtctgaaagaccttcatcccgagctggaagtgattggtactaacgccgaagacgcggtgccgcattatctgcgtaaactctatttatcgtaatcgttctttatttggtcagttgtcaacctgatacttcgctacaatggatactcgttaatcaaagagttttccattgtggcgctacttatcatcaccacgattctgtgggccttctcctttagcttttatggcgagtaccttgcggggcacgtcgatagctattttgcggtgctggtgcgcgttggcctggcggcactcgtttttctgccgtttctgcgtacccgtggcaatagcctgaaaacagtcggcctgtatatgctggtgggcgcgatgcagctcggcgtgatgtatatgctgagtttccgcgcttatctctacctgacggtttccgagctgctgctgttcaccgtgctgacgccgctctacatcacgctgatttatgacatcatgagtaagcgccgtctgcgctggggctatgcttttagcgccttgctggcggtgattggtgccgggattattcgctatgatcaggtcaccgaccatttctggactggcttgttgctggtgcaactctccaatatcacttttgccatcggcatggtgggttacaaacgcctgatggaaactcgcccgatgccgcagcataacgcctttgcgtggttctatcttggcgcgttcctggtggcggtaattgcatggttcttgctgggaaatgcgcagaaaatgccgcaaaccacgctgcaatggggcattctggtgtttcttggcgtggtggcttccgggattggctactttatgtggaactacggcgcgacgcaggtggacgccggaacgctgggcattatgaataatatgcacgttccggcagggctgctggtaaacctggctatctggcaccaacagccgcactggccaacgttcattacaggcgcgctggtgatcctggcctcactgtgggtgcatcgtaagtgggtcgctccgcgctcttcacaaacggcagatgatcgcaggcgtgattgcgcgctgagcgaataaatgcttctgtaatcggctgacgctgctcgccatcgcgcacggcggcgtacagtcggctccacaagccttcgcccagggttttggtcaccaccagaccctggcgctcaaaactctctactacccaatgcggtagcgcggcaatacccatccgcgcggcaaccatctgaatcaacaataaggtgttatcgacgcttttcagtgacgggctgacgcctgccggctgaagaaaatgccgccagacatccagtcgactacgctgcaccggataaatcaacagcgtctcgctggcgagatcttccggtgtaattcgcgttttcgccgccagtggatggtcaggtgctaacaccagacgcacttcatagtcgaacatcggcgaataatgcaggccactgcgcggcaggatatcggaggtcatcaccagatccagctcgccctgttgcaacgcgggctgcgggtcaaacgtcacgcccgatttaaaatccatctctacctgcggccagttcttatggaaattttctaacgcgggcgtcagccactgaatacagctatggcactcaatggcaatgcgcagacgcgtctgctgcggttcattgcaggcttgcagtgcctggctaatttgcggcagcacctggtttgccagttgcaacaggatttctccctgcggtgtaaagcgtagcggctggctcttacgcacaaatagccggaagccaaggcgttgttccagatcgctaaactggtgagacagggcggattgcgtctgatgcaacgtcgccgcagcggctgcgagagagccgcagttccgcaacgcttgtagcgttttcaggtgttttacttcgatcatgaaagtccttcacttcggcatgaataatttgcgcttgaggaatatacagtaaccgccaattatggatgtgtaaacatctggacggctaaatactaaaaattccataaggggcatataatgacaattcttaatcacaccctcggtttccctcgcgttggcctgcgtcgcgagctgaaaaaagcgcaagaaagttattgggcggggaactccacgcgtgaagaactgctgacagtagggcgtgaactgcgtgctcgtcactgggatcaacaaaagcaagcgggtatcgacctgctgccggtgggcgattttgcctggtacgatcatgttctgaccaccagtctgctgctgggtaacgttccgccacgtcatcagaacaaagacggttcggtagatatcgacaccctgttccgtattggtcgtggacgtgcgccgactggcgaacctgcggcggcagcggaaatgaccaaatggtttaacaccaactatcactacatggtgccggagttcgttaaaggccaacagttcaaactgacctggacgcagctgctggaggaagtggacgaggcgctggcgctgggccacaacgttaagcctgtgctgctggggccggttacttacctgtggctggggaaagtgaaaggtgaacagtttgaccgccttagcctgctgaacgacattctgccggtttatcagcaaatgctggcagaactggcgaaacgcggcatcgagtgggtacagattgatgaacccgcgctggtactggaactaccacaggcgtggctggacgcatacaaacccgcttacgacgcgctccagggccaggtgaaactgctgctgaccacttattttgaaggcgtaacgccaaacctcgacacgattactgcgctgcctgttcaggggctgcatgtggaccttgtacatggtaaagatgacgttgttgaactgcacaagcgcctgccttctgactggttgctgtctgcgggtctgatcaatggtcgtaacgtctggcgtgccgatcttagcgagaaatatgcgcaaattaaggacattgtcggcaaacgtgatttgtgggtggcatcttcctgctcgttgctgcacagccccatcgacctgagcgtggaaacgcgtcttgatgcagaagtgaaaagctggtttgccttcgccctacaaaaatgccatgaactggcactgctgcgcgatgcgctgaacagtggtgacacggcagctctggcagagtggagcgccccgattcaggcgcgtcgtcactctactcgtgtacataatccggcggtagaaaagcgtctggcggcgatcaccgcccaggacagccagcgtgcgaatgtctatgaagtgcgtgctgaagcccagcgtgcgcgttttaaactgccagcgtggccgaccaccacgattggttccttcccgcaaaccacggaaattcgtaccctgcgtctggatttcaaaaagggcaatctcgacgccaacaactaccgcacgggcattgcggaacatatcaagcaggccattgttgagcaggaacgtttgggactggatgtgctggtacatggcgaggccgagcgtaatgacatggtggaatactttggcgagcacctcgacggatttgtctttacgcaaaacggttgggtacagagctacggttcccgctgcgtgaagccaccgattgttattggtgacgtgagccgaccggcaccgattaccgtggagtgggcgaaatatgcgcagtcgctgaccgacaaaccggtgaaagggatgctgactggtccggtgacgattctctgctggtcgttcccgcgtgaagatgtgagccgtgaaaccatcgccaaacagattgcgctggcgctgcgtgatgaagtggcggacctggaagccgctggaattggcatcatccagattgatgaaccggcgctgcgcgaaggtttaccgctgcgtcgtagcgactgggacgcctatctccagtggggcgtagaggccttccgtatcaacgccgccgtggcgaaagatgacacacaaatccacactcacatgtgttattgcgagttcaacgacatcatggattccattgcggcgctggatgcggatgtgattaccatcgaaacttcgcgttctgacatggagttgctggagtcgttcgaagagtttgattatcccaatgaaatcggtccaggcgtctatgatattcactcgccaaacgtaccgagcgtggaatggattgaagccctgctgaagaaagcggcaaaacgcattccggcagagcgcctgtgggttaacccggactgtggcctgaaaacgcgcggctggccagaaacccgcgcggcactggcgaacatggtgcaggcggcgcagaacttgcgtcgggggtaaatccaaaccgggtggtaataccacccggtcttttctcattacagcgacttcttcccaccatactgcttaaaccattccagcatacgctgccagccatctttcgcagattcggcatgatagctcgggcgataatcagcgttgaatgcatgcccggcatccgggtacacgataatctctgctttcgcattagcagcccgcagcgcctggcgcatggtttcaacgctctcctgcggaatgctgttatcctgaccaccatataagccgagaaccggcgcgttaagatcggttgcgatatcaacaggttgtttcggtgaattcagcgacttgtcgcccgtcagtttgccgtaccacgccactgcggcttttagctgtggattatgcgcggcatacagccaggtgatacgtccaccccagcagaatccggtgatcattaaacgatgaacatcgccgccgttgcgggaagcccaactggcgacatgatcgagatcggccagcacctgcgagtcaggcacttttgctaccagaccgctaagcaacgtggggatatcggcaaaatcattcggatcgccttcgcggaagtaaagttcaggtgcgatagccagatacccctccagcgccagacggcgacaaatgtcgcggatatgttcatgcacgccaaaaatttcctgcactacaatgaccactggcagtgggccatcgctttgctttggtctggcatggtaagcaggcatgttatccccttgtgaagggatagaggtgaagcccgccacaatcgcgtcgttcggggtctgaacgatggtcgaagcgagaggcgatgcagcaggtgcaaatccagattgttgtgttgttgccatggtattctccgtacccttataaaaatgttgcgcaatgttaactatagtcagcatgcaacaaatcacattgcctgaatcggctcatcttttatgcagtcctgcagaatgaagagtgatttatgtgatttacatcacttttgatgggtaaatttatgcaacgcgtttgcgtcatggtgatgagtatcacgaaaaaatgttaaacccttcggtaaagtgtctttttgcttcttctgactaaaccgattcacagaggagttgtatatgtccaagtctgatgtttttcatctcggcctcactaaaaacgatttacaaggggctacgcttgccatcgtccctggcgacccggatcgtgtggaaaagatcgccgcgctgatggataagccggttaagctggcatctcaccgcgaattcactacctggcgtgcagagctggatggtaaacctgttatcgtctgttctaccggtatcggcggcccgtctacctctattgctgttgaagagctggcacagctgggcattcgcaccttcctgcgtatcggtacaacgggcgctattcagccgcatattaatgtgggtgatgtcctggttaccacggcgtctgtccgtctggatggcgcgagcctgcacttcgcaccgctggaattcccggctgtcgctgatttcgaatgtacgactgcgctggttgaagctgcgaaatccattggcgcgacaactcacgttggcgtgacagcttcttctgataccttctacccaggtcaggaacgttacgatacttactctggtcgcgtagttcgtcactttaaaggttctatggaagagtggcaggcgatgggcgtaatgaactatgaaatggaatctgcaaccctgctgaccatgtgtgcaagtcagggcctgcgtgccggtatggtagcgggtgttatcgttaaccgcacccagcaagagatcccgaatgctgagacgatgaaacaaaccgaaagccatgcggtgaaaatcgtggtggaagcggcgcgtcgtctgctgtaattctcttctcctgtctgaaggccgacgcgttcggccttttgtatttttgcgtagcgcctcgcaggaaatgcctttccaactggacgtttgtacagcacaattctattttgtgcgggtaagttgttgcgtcaggaggcgttgtggatttctcaatcatggtttacgcagttattgcgttggtgggtgtggcaattggctggctgtttgccagttatcaacatgcgcagcaaaaagccgagcaattagctgaacgtgaagagatggtcgcggagttaagcgcggcaaaacaacaaattacccaaagcgagcactggcgtgcagagtgcgagttactcaataacgaagtgcgcagcctgcaaagtattaacacctctctggaggccgatctgcgtgaagtaaccacgcggatggaagccgcacagcaacatgctgacgataaaattcgccagatgattaacagcgagcagcgcctcagtgagcagtttgaaaacctcgccaaccgtatttttgagcacagcaatcgccgggttgatgagcaaaaccgtcagagtctgaacagcctgttgtcgccgctacgtgaacaactggacggtttccgccgtcaggttcaggacagcttcggtaaagaagcacaagaacgccataccctgacccacgaaattcgcaatctccagcaactcaacgcgcaaatggcccaggaagcgatcaacctgacgcgcgcgctgaaaggcgacaataaaacccagggcaactggggcgaggtagtattgacgcgggtgctggaggcttccggtctgcgtgaagggtatgaatatgaaacccaggtcagcatcgaaaatgacgcccgctcgcggatgcaaccggatgtcatcgtgcggctgccgcagggaaaagatgtggtgatcgacgccaaaatgacgctggtcgcctatgaacgctatttcaacgccgaagatgactacacccgcgaaagcgcgctacaggaacatatcgcgtcggtgcgtaaccatatccgtttgctgggacgcaaagattatcaacagctgccggggctgcgaactctggattacgtgctgatgtttattcccgttgaacccgcttttttactggcgcttgaccgccagccggagctgatcaccgaagcgttgaaaaacaatatcatgctggttagcccgactacgctgctggtggcgttgcgtactattgccaacctgtggcgttatgagcatcaaagccgcaacgcccagcaaatcgccgatcgtgccagcaagctgtacgacaagatgcgtttgttcatcgatgacatgtccgcgattggtcaaagtctcgacaaagcgcaggataactaccgccaggcaatgaaaaaactctcttcaggtcgcggaaatgtgctggcgcaggcagaagcgtttcgcggtttaggagtagaaattaaacgcgagattaatccggatttggctgaacaggcggtgagccaggatgaagagtatcgacttcggtcggttccggagcagccgaatgatgaagcttatcaacgcgatgatgaatataatcagcagtcgcgctagcccattaggggtagttaagccgggtagaaatctagggcatcgacgcccaatctgttacacttctggaacaattttttgatgagcaggcattgagatggtggataagtcacaagaaacgacgcactttggttttcagaccgtcgcgaaggaacaaaaagcggatatggtcgcccacgttttccattccgtggcatcaaaatacgatgtcatgaatgatttgatgtcatttggtattcatcgtttgtggaagcgattcacgattgattgcagcggcgtacgccgtgggcagaccgtgctggatctggctggtggcaccggcgacctgacagcgaaattctcccgcctggtcggagaaactggcaaagtggtccttgctgatatcaatgaatccatgctcaaaatgggacgcgagaagctgcgtaatatcggtgtgattggcaacgttgagtatgttcaggcgaacgctgaggcgctgccgttcccggataacacctttgattgcatcaccatttcgtttggtctgcgtaacgtcaccgacaaagataaagcactgcgttcaatgtatcgcgtgctgaaacccggcggccgcctgctggtgcttgagttctcgaagccaattatcgagccgctgagcaaagcctatgatgcatactccttccatgtgctgccgcgtattggctcactggtcgcgaacgacgccgacagctaccgttatctggcagaatccatccgtatgcatcccgatcaggataccctgaaagccatgatgcaggatgccggattcgaaagtgtcgactactacaatctgacggcaggggttgtggcgctgcatcgtggttataagttctgacaggagaccggaaatgccttttaaacctttagtgacggcaggaattgaaagtctgctcaacaccttcctgtatcgctcacccgcgctgaaaacagcccgctcgcgtctgctgggtaaagtattgcgcgtggaggtaaaaggcttttcgacgtcattgattctggtgttcagcgaacgccaggttgatgtactgggcgaatgggcaggcgatgctgactgcaccgttatcgcctacgccagtgtgttgccgaaacttcgcgatcgccagcagcttaccgcactgattcgcagtggtgagctggaagtgcagggcgatattcaggtggtgcaaaacttcgttgcgctggcagatctggcagagttcgaccctgcggaactgctggccccttataccggtgatatcgccgctgaaggaatcagcaaagccatgcgcggaggcgcaaagttcctgcatcacggcattaagcgccagcaacgttatgtggcggaagccattactgaagagtggcgtatggcacccggtccgcttgaagtggcctggtttgcggaagagacggctgccgtcgagcgtgctgttgatgccctgaccaaacggctggaaaaactggaggctaaatgacgccaggtgaagtacggcgcctatatttcatcattcgcacttttttaagctacggacttgatgaactgatccccaaaatgcgtatcaccctgccgctacggctatggcgatactcattattctggatgccaaatcggcataaagacaaacttttaggtgagcgactacgactggccctgcaagaactggggccggtttggatcaagttcgggcaaatgttatcaacccgccgcgatctttttccaccgcatattgccgatcagctggcgttattgcaggacaaagttgctccgtttgatggcaagctggcgaagcagcagattgaagctgcaatgggcggcttgccggtagaagcgtggtttgacgattttgaaatcaagccgctggcttctgcttctatcgcccaggttcataccgcgcgattgaaatcgaatggtaaagaggtggtgattaaagtcatccgcccggatattttgccggtcattaaagcggatctgaaacttatctaccgtctggctcgctgggtgccgcgtttgctgccggatggtcgccgtctgcgcccaaccgaagtggtgcgcgagtacgaaaagaccttgattgatgaactgaatttgctgcgggaatctgccaacgccattcagcttcggcgcaattttgaagacagcccgatgctctacatcccggaagtttaccctgactattgtagtgaagggatgatggtgatggagcgcatttacggcattccggtgtctgatgttgcggcgctggagaaaaacggcactaacatgaaattgctggcggaacgcggcgtgcaggtgttcttcactcaggtctttcgcgacagctttttccatgccgatatgcaccctggcaacatcttcgtaagctatgaacacccggaaaacccgaaatatatcggcattgattgcgggattgttggctcgctaaacaaagaagataaacgctatctggcagaaaactttatcgccttctttaatcgcgactatcgcaaagtggcagagctacacgtcgattctggctgggtgccaccagataccaacgttgaagagttcgaatttgccattcgtacggtctgtgaacctatctttgagaaaccgctggccgaaatttcgtttggacatgtactgttaaatctgtttaatacggcgcgtcgcttcaatatggaagtgcagccgcaactggtgttactccagaaaaccctgctctatgtcgaaggggtaggacgccagctttatccgcagctcgatttatggaaaacagcgaagcctttcctggagtcgtggattaaagatcaggtcggtattcctgcgctggtgagagcatttaaagaaaaagcgccgttctgggtcgaaaaaatgccagaactgcctgaattggtttacgacagtttgcgccagggcaagtatttacagcacagtgttgataagattgcccgcgagcttcagtcaaatcatgtacgtcagggacaatcgcgttattttctcggaattggcgctacgttagtattaagtggcacattcttgttggtcagccgacctgaatgggggctgatgcccggctggttaatggcaggtggtctgatcgcctggtttgtcggttggcgcaaaacacgctgattttttcatcgctcaaggcgggccgtgtaacgtataatgcggctttgtttaatcatcatctaccacagaggaacatgtatgggtggtatcagtatttggcagttattgattattgccgtcatcgttgtactgctttttggcaccaaaaagctcggctccatcggttccgatcttggtgcgtcgatcaaaggctttaaaaaagcaatgagcgatgatgaaccaaagcaggataaaaccagtcaggatgctgattttactgcgaaaactatcgccgataagcaggcggatacgaatcaggaacaggctaaaacagaagacgcgaagcgccacgataaagagcaggtgtaatccgtgtttgatatcggttttagcgaactgctattggtgttcatcatcggcctcgtcgttctggggccgcaacgactgcctgtggcggtaaaaacggtagcgggctggattcgcgcgttgcgttcactggcgacaacggtgcagaacgaactgacccaggagttaaaactccaggagtttcaggacagtctgaaaaaggttgaaaaggcgagcctcactaacctgacgcccgaactgaaagcgtcgatggatgaactacgccaggccgcggagtcgatgaagcgttcctacgttgcaaacgatcctgaaaaggcgagcgatgaagcgcacaccatccataacccggtggtgaaagataatgaagctgcgcatgagggcgtaacgcctgccgctgcacaaacgcaggccagttcgccggaacagaagccagaaaccacgccagagccggtggtaaaacctgctgcggacgctgaaccgaaaaccgctgcaccttccccttcgtcgagtgataaaccgtaaacatgtctgtagaagatactcaaccgcttatcacgcatctaattgagctgcgtaagcgtctgctgaactgcattatcgcggtgatcgtgatattcctgtgtctggtctatttcgccaatgacatctatcacctggtatccgcgccattgatcaagcagttgccgcaaggttcaacgatgatcgccaccgacgtggcctcgccgttctttacgccgatcaagctgacctttatggtgtcgctgattctgtcagcgccggtgattctctatcaggtgtgggcatttatcgccccagcgctgtataagcatgaacgtcgcctggtggtgccgctgctggtttccagctctctgctgttttatatcggcatggcgttcgcctactttgtggtctttccgctggcatttggcttccttgccaataccgcgccggaaggggtacaggtatccaccgacatcgccagctatttaagcttcgttatggcgttgtttatggcgtttggtgtctcctttgaagtgcctgtggcaattgtgctgctgtgctggatggggattacctcgccagaagacttacgcaaaaaacgcccgtatgtgctggttggtgcattcgttgtcgggatgctgctgacaccgccggatgtcttctcgcaaacgctgttggcgatcccgatgtactgtctgtttgaaatcggtgtcttcttctcacgcttttacgttggtaaagggcgaaatcgggaagaggaaaacgacgctgaagcagaaagcgaaaaaactgaagaataaattcaaccgcccgtcagggcggttgtcatatggagtacaggatgtttgatatcggcgttaatttgaccagttcgcaatttgcgaaagaccgtgatgatgttgtagcgcgcgcttttgacgcgggagttaatgggctactcatcaccggcactaacctgcgtgaaagccagcaggcgcaaaagctggcgcgtcagtattcgtcctgttggtcaacggcgggcgtacatcctcacgacagcagccagtggcaagctgcgactgaagaagcgattattgagctggccgcgcagccagaagtggtggcgattggtgaatgtggtctcgactttaaccgcaacttttcgacgccggaagagcaggaacgcgcttttgttgcccagctacgcattgccgcagatttaaacatgccggtatttatgcactgtcgcgatgcccacgagcggtttatgacattgctggagccgtggctggataaactgcctggtgcggttcttcattgctttaccggcacacgcgaagagatgcaggcgtgcgtggcgcgtggaatttatatcggcattaccggttgggtttgcgatgaacgacgcgggctggagctgcgggaattgttgccgttgattccggcggagaaattgctgatcgaaactgatgcgccgtatctgctcccgcgcgatctcacgccaaagccatcatcccggcgcaacgagccagcccatctgccccatattttgcaacgtattgcgcactggcgtggagaagatgccgcatggctggctgccaccacggatgccaatgtcaaaacactgtttgggattgcgttttagagtttgcggaactcggtgttcttcacactgtgcttaatctctttattaataagattaagcaatagcatggagcgagcctcaccatcgggttcggtgaaaatggcctgaaagccttcgaacgcgccttcggtaataatcaccttatcacccggataaggggttgccggatcgacaatgtctttcggtttatataccgatagctgatgaatcaccgccgatgggactatcgctggcgacgcgccaaagcgcacgaagtggctgacaccgcgggtcgcgttgatagtcgtggtatgaatcacttctggatcaaattcgacaaacaggtagttgggaaacaatggctcactgactgcagtacgttttccacgcacgattttttccagggtgatcatcggtgccaggcaattcacagcctgtctttcgaggtgttcctgggcacgttgaagttgcccgcgcttgcagtacagtaaataccaggattgcataatgactcttatccgtttaatcggggcgcaaggatagcaaaagctttacgctaagttaattatattccccggtttgcgttataccgtcagagttcacgctaatttaacaaatttacagcatcgcaaagatgaacgccgtataatgggcgtagattaagaggctacaatggacgccatgaaatataacgatttacgcgacttcctgacactgcttgaacagcagggtgagctaaaacgtatcacgctcccggtggatccgcatctggaaatcactgaaattgctgaccgcactttgcgtgccggtgggcctgcgctgttgttcgaaaaccctaaaggctactcaatgccggtgctgtgcaacctgttcggtacgccaaagcgcgtggcaatgggcatggggcaggaagatgtttcggcgctacgtgaagttggtaaattattggcgtttctgaaagagccggagccgccaaaaggtttccgcgacctgtttgataaactgccgcagtttaagcaagtattgaacatgccgacaaagcggctgcgtggtgcgccctgccaacaaaaaatcgtctctggcgatgacgtcgatctcaatcgcattcccattatgacctgctggccggaagatgccgcgccgctgattacctgggggctgacagtgacgcgcggcccgcataaagagcggcagaatctgggcatttatcgccagcagctgattggtaaaaacaaactgattatgcgctggctgtcgcatcgcggcggcgcgctggattatcaggagtggtgtgcggcgcatccgggcgaacgtttcccggtttctgtggcgctgggtgccgatcccgccacgattctcggtgcagtcacccccgttccggatacactttcagagtatgcgtttgccggattgctgcgcggtaccaagaccgaagtggtgaagtgtatctccaatgaccttgaagtgcccgccagtgcggagattgtgctggaagggtatatcgaacaaggtgaaacggcgccggaagggccgtatggcgaccacaccggttactataacgaagtcgatagtttcccggtatttaccgtgacgcatattacccagcgtgaagatgcgatttaccattccacctataccgggcgtccgccagatgagcccgcggtactgggcgtggcgttgaacgaagtgtttgtaccgattctgcaaaaacagttcccggaaattgtcgatttttacctgccgccggaaggctgttcttatcgtctggcggtagtgacgatcaaaaaacagtacgccggacacgcgaagcgcgtcatgatgggcgtctggtcgttcttacgccagtttatgtacactaaatttgtgatcgtttgcgatgatgacgtcaacgcacgcgactggaacgatgtgatttgggcgattaccacccgtatggacccggcgcgggatactgttctggtagaaaatacgcctattgattatctggattttgcctcgcctgtctccgggctgggttcaaaaatggggctggatgccacgaataaatggccgggggaaacccagcgtgaatggggacgtcccatcaaaaaagatccagatgttgtcgcgcatattgacgccatctgggatgaactggctatttttaacaacggtaaaagcgcctgatgcgcgtttgttttgccctatttatcgatccgacagagaaagcgcatgacaaccttaagctgtaaagtgacctcggtagaagctatcacggataccgtatatcgtgtccgcatcgtgccagacgcggccttttcttttcgtgctggtcagtatttgatggtagtgatggatgagcgcgacaaacgtccgttctcaatggcctcgacgccggatgaaaaagggtttatcgagctgcatattggcgcttctgaaatcaacctttacgcgaaagcagtcatggaccgcatcctcaaagatcatcaaatcgtggtcgatattccccacggagaagcgtggctgcgcgatgatgaagagcgtccgatgattttgattgcgggcggcaccgggttctcttatgcccgctcgattttgctgacagcgttggcgcgtaacccaaaccgtgatatcaccatttactggggcgggcgtgaagagcagcatctgtatgatctctgcgagcttgaggcgctttcgttaaagcaccctggtctgcaagtggtgccggtggttgaacaaccggaagcaggctggcgtgggcgtactggtaccgtgttaacggcggtattgcaggatcatggtacgctggcagagcatgatatctatattgccggacgttttgagatggcgaaaattgcccgtgacctgttttgcagtgagcgtaatgcgcgggaagatcgcctgtttggcgatgcgtttgcatttatctgagatataaaaaaacccgcccctgacaggcgggaagaacggcaactaaaactttattcagtggcatttagatctatgtcgcatccggcaattggtgcacgacgcctgatgcgacgctggcgcgtcttatcaggcctacattggtgccggatcggtagaccggataaggcgttcacgccgcatccggcaagtggttaaacccgctcaaacaccgtcgcaataccctgacccagaccgatacacatcgtcgccagaccaaactgaacgtctttgcgttccatcagattcagcagcgtggtgctgatacgcgcaccggaacagcccagcggatgacccagcgcgatcgcaccaccattgaggttgatcttctcgtcaatctgctccattagcccgagatctttaatgcacggcaggatctgcgcggcaaaggcttcgttcatctcaaacacgccgatatcgctggcagaaagccccgcttttttcagcgccagcttcgaggccggaaccgggccgtaacccataatcgatgggtcacaaccaacgaccgccatcgaacgcacacgagcgcgcggcttaagacctaattcatgggcgcggctttcactcatcaccagcatggcagctgcgccatcggaaagtgcagaagatgtgcccgccgttaccgtaccgtttactggatcaaacgccggacgcagcgtggcgagggcttccacggtggtttccgggcgaatcacttcgtcgtaattaaactgcttcaggacgccgtcggcatcgtgaccaccggtcgggatgatttcatttttaaatgcgcccgactgcgtggcggcccaggcgcgggcgtgtgaccgcgcggcaaaggcatcctgcatttcacggctgataccgtgcatacgcgccagcatttctgccgttaagcccatcatgcccgccgctttggcgacattgcggctcaggccggggtgaaaatcgacgccgtgactcatcggcacatggcccatatgctccacgccgccaaccagacatgcctgcgcatcgccagtcatgatcattcgtgctgcgtcatgcagtgcctgcatggatgaaccacacaagcgattaacggtaaccgccgggacagagtgtggtacttctgccagcagcgccgcgttacgggcgatattaaaaccctgctccagcgtctgctgcacacaaccccagtaaatatcgtcgagggccgccgcttccagcgccgggttacgcgccagcaggctacgcattaaaggagcggagagatcttctgcacgcacgttacgaaaagcaccgcccttcgaacggcccatcggggtgcgaattgcatcgacaatgacaacctgttccattgtgactccttaagccgttttcaggtcgccaaccggacgggctggctcaaccggaggatagtacggttcgttatgacgcgctttattacgcagaccttccggcacttcatacagcgggccgaggtgctgatattgctgtgccatatcgaggtattttgcgctaccgagggtgtccagccagcggaacgcgccgccgtggaacggagggaagcccaggccgtagaccagcgccatatccgcttccgccggagtggcgataatgccttcctccagacagcgcaccacttcgttgaccatcgggatcatcatgcgggcgataatctcttcttcgctgaaatcgcgcttcggctggctcacttctgccagcaggtcttcaacggcggcgtcttcttctttcttcggcttacctttgctgtcttctttataacgccagaaaccgaggccgttcttctgaccaaagcggttggcatcaaacagcgcgtcgatggcatcgcggtaatctttctgcatccgctgcgggaagcctgctgccatgacagcctgagcgtgatgcgcggtatcaatgcccacgacatccagcagatatgccggacccataggccagccaaactgtttttccatcactttgtcgatcttgcggaaatccgcgccgtcgcgcagcagctggctgaaaccggcgaaatacgggaacagcacgcggttaacaaagaagccggggcagtcgttaaccacaatcggcgtcttgcccatcttgctcgcccaggcgacaactttcgcgatggtttcgtcggagcttttctcgccgcgaataatttctaccaacggcatccggtgtaccgggttaaaaaagtgcattccgcagaagttttccgggcgttccagcgcgttggccagttcgctgataggaatggttgaagtgttagacgccagcacggtatccgggcgtactttttgttcggtttctgccagtacggcttttttcactttcgggttttcgacaaccgcttctaccacaacatccacgcggtcaaacccggcgtagtcgagcgttgggtggattgtggagatcacgccagccagtttcagaccatcgatcttgccgcgctcaagctgcttgttcagcagtttcgcggcttcggtcatgccgagggttaacgacttgtcgttgatatctttcatgacaaccggcacgcctttccacgcagactggtaagcgatgccgccgcccataatgcctgcacccagcaccgcggcctgtttcggggtttcaacgtctttggtgagtttcttcgctttgccttttacatattgatcgttaaggaaaatgccgaccagtgcgcgggcttcgttggtatgcgccagcgggacaaaacttttgttttccaggtttaaggcttcttcacgaccaaaacgggccgcagcttcaatggtttttactgcggtgatgggggccggataatgtttccccgctgtttgtgcgaccatccctttagcgatggtgaagctcatggtggcttcaatcttgctcagttttagtggttccagcttcggctgacgttttgctttccagtcgaggtcgccgttaatggcctggcgtaaaaccgcctttgcgccttcaaccagtttttctgctttgactacgccatccaccagaccgattttcagcgcctgatccgcgccgacatctttaccggcggcaatgatttccagcgcactgtcagcgcccagcatacgtggcatacgtacagaaccgccaaagcccggcatgatgcccagtttggtttccggcagaccgatgcgcagatccggcgtcgccagacgataatcggtcgccagcacgcattcgcagccaccgcccagcgcatagccgttgacggcagcaatggtcggcaccggcagatcttccaggcgattaaacacgctattggcaaagtgcagccactgacttaactgttcttcaggaacgaggaacagggacaaaaattcggtgatatcagcaccgacgataaaggctgctttgttcgaacgcagcagcagcccttttagatctgattgctgttccagcacgccgatggcctcgccgaggctggcgacggtcgcagtgtcgagtttattaactgaacctggggcatcaaataccagttcggcaatgccatcttccagccagtcaaggtacagggtgtcgcctttgtaaagcatgtcagtctcctgaatccgcaaggtgatctggtcgtaccagatgagtcgaagtgtgtattttgtgttaaaaatatgcaaataaaagattaaagaaatgccaatctgatcacgctcggcagaaatcacgctctggatgaacgatgtgctaagatgcggagacttaaggtcaaaaaacagaagggtaaaaaatggaatcactggcctcgctctataaaaatcatatagctaccttacaagaacggactcgcgatgcgctggcgcgcttcaagctggatgcattacttattcactccggcgagctgttcaacgtttttctcgacgatcatccctatccgtttaaagtgaacccgcaattcaaagcgtgggtgccggtaactcaggtgccaaactgctggttgctggtggatggcgtgaacaagccgaaactgtggttctatctgccggttgattactggcacaacgtcgaaccgctgccgacctccttctggactgaagatgtggaagtgatcgcactgccgaaagccgatggcattggtagcctgctgcccgctgcgcgcggcaatatcggttatatcggtccggtgccggaacgtgcgctgcaactgggtattgaggccagcaacatcaacccgaaaggggtgatcgactacctgcattactaccgctccttcaaaaccgagtacgaactggcctgtatgcgtgaagcgcagaaaatggcggtcaacggtcatcgcgcggcagaagaagcgttccgttctggcatgagcgagttcgatatcaacattgcctatctgaccgcgaccggtcatcgtgataccgacgtaccttacagcaacattgtggcgctcaacgaacacgctgcggtgttgcattacaccaaactggaccaccaggcaccggaagagatgcgcagcttcctgctggatgccggggccgaatataacggctatgcggctgacctgacccgtacctggtcggcaaaaagtgacaacgactacgcacagctggtgaaagacgtaaatgatgaacaactggcgctgatcgctaccatgaaagcaggcgtcagctatgtggattaccacatccagttccatcagcgcatcgccaaactgctgcgtaaacatcaaatcatcaccgatatgagtgaagaagcgatggtcgaaaacgatctcaccggaccgtttatgccgcacggtattggccatccgctgggcctgcaggtgcatgacgtagccggttttatgcaggatgatagcggtacgcacctcgcggcaccggcaaaatatccgtacctgcgctgcacccgtattctccagccgggcatggtgttaaccatcgaaccgggtatctacttcattgaatcgctgctggcaccgtggcgtgaagggcagttcagcaagcacttcaactggcagaaaattgaagcactgaaaccgttcggcggcattcgtatcgaagacaacgtggtgatccacgaaaacaacgtggaaaacatgacccgggatctgaaactggcgtgatggaaagctggttaattcctgcggcaccggtcacggtcgttgaagagatcaaaaaaagccgcttcataacgatgttggcgcataccgatggcgttgaggcggcgaaagcgtttgttgaatcggtgcgggcagaacaccccgatgcccgccaccattgcgtggcgtgggtggcgggtgcgccggatgattctcaacagctgggtttctctgacgacggggagccggcgggaacggcaggtaaaccgatgctcgcccagctaatgggcagcggcgtcggggaaattaccgctgtggtagtgcgctactacggcggcatattgcttggcaccggtgggttagtgaaagcgtatggcggcggcgtgaatcaggcgctgcgccagctaacgacccaacgcaagacgccattaaccgaatatactttgcaatgtgaatatagtcagttaaccggcattgaagcgttgctggggcagtgtgacggcaaaattatcaacagtgattatcaggcattcgttctgctgcgggtggcgcttccggcggcgaaagtggctgaattttccgcaaagctggcggattttagccgtggttcattgcaattgttagcgattgaagaataatccccacttcgttttgcagaactaaggaagcggcagagatgcattttcgcgccattacccgaatcgttggactactggtcatcttattttcagggaccatgattatccctgggctggtagcactcatctaccgggatggagcgggccgcgcttttacccagaccttttttgtcgccctcgccattggctctatgctgtggtggccgaaccgcaaagagaagggcgaactgaaatcccgtgaggggtttctgatagtggtgctgttttggaccgtgctgggtagcgtcggtgcgctcccttttatcttctcggaaagcccgaacctcacgattaccgatgcgttttttgaatctttctctggcctgaccaccaccggggccactacgctggtggggctggattcgctccctcatgccatcctcttttatcgccagatgctgcaatggtttggcgggatggggatcatcgtgttagcggttgcgatactgcctatcctcggcgtgggtgggatgcagctctatcgcgcagaaatgcccggcccgctgaaagataacaaaatgcgcccgcgaattgcggaaacggcgaaaaccctgtggttgatttatgtcttgctgaccgtcgcctgtgcgctggcgttgtggtttgccggaatggatgcctttgatgccatcggccatagctttgcgactatcgctattggcggcttctcgacacatgatgccagtatcggttatttcgacagcccgactattaacactatcattgctatcttcctgctgatctccggctgtaactacggtctgcacttttcactgttaagtgggcgtagtctgaaggtttattggcgcgatccggaatttcgcatgtttatcggcgtacagtttacgctggtggttatttgtacactcgtactgtggtttcataatgtctacagttcggcgctgatgacaattaaccaggcgtttttccaggtggtatcgatggcgacaaccgccgggtttacgactgacagcattgcccgctggccgctctttttgccggtactgcttttatgttcagcttttatcggcggttgcgccgggtcaacgggcggtggcctgaaagtgatccgcatcctgctgctgtttaagcaggggaaccgtgagctgaaacgactggtgcatccgaacgccgtctatagcattaagctggggaatcgcgcactgccggaacgtatcctcgaagccgtttggggatttttctccgcctatgcattggtgtttattgtcagtatgctggcgattatcgccacgggcgtggatgacttttctgcctttgcctcagttgttgcgacattgaataacctggggccagggcttggcgtggttgctgataactttaccagtatgaacccggtggctaaatggatcctgattgccaacatgctgtttggtcgtctcgaggtctttacattgctggtgctctttaccccgactttctggcgtgaatgatggagtaatacgtgaaaacattaattcttttctcaacaagggacggacaaacgcgcgagattgcctcctacctggcttcggaactgaaagaactggggatccagacggatgtcgccaatgtgcaccgcattgaagaaccacaatgggaaaattatgaccgtgtggtcattggtgcttctattcgctatggtcactaccactctgcgttccaggaatttgtcaaaaaacatgcgacgcgactgaattcgatgccgagcgccttttattccgtaaacctggtggcgcgcaaaccggagaagcgtactccacagaccaacagctacgcgcggaagtttctgatgaactcgcaatggcgtcccgatcactgcgcggtcattgccggggcgctgcgttacccacgttatcgctggtacgatcgttttatgatcaagctaattatgaagatgtcaggcggtgaaacggatacgcgcaaagaagttgtctataccgattgggagcaggtggcgaatttcgcccgagaaatcgcccatttaaccgacaaaccgacgctgaaataagcataaagaataaaaaatgcgcggtcagaaaattattttaaatttcctcttgtcaggccggaataactccctataatgcgccaccactgacacggaacaacggcaaacacgccgccgggtcggcggrgttctcctgagaactccgacagagaaagcaaaaataaatgcttgactctgtagcgggaaagcgtattatgcacaccccgcgccgctgagaaaaagcgaggcggcactgctctttaacaatttatcagacaatctgtgtgggcactcgaagatacggattcttaacgtcgcaagacgaaaaatgaataccaagtctcaagagtgaacacgtaattcattacgaagtttaattctttgagcatcaaacttttaaattgaagagtttgatcatggctcagattgaacgctggcggcaggcctaacacatgcaagtcgaacggtaacaggaaacagcttgctgtttcgctgacgagtggcggacgggtgagtaatgtctgggaaactgcctgatggggggggataactactggaaacggtagctaataccgcataacgtcgcaagaccaaagagggggaccttcgggcctcttgccatcggatgtgcccagatgggattagcttgttggtggggtaacggctcaccaaggcgacgatccctagctggtctgagaggatgaccagccacactggaactgagacacggtccagactcctacgggaggcagcagtggggaatattgcacaatgggcgcaagcctgatgcagccatgccgcgtgtatgaagaaggccttcgggttgtaaagtactttcagcggggaggaagggagtaaagttaatacctttactcattgacgttacccgcagaagaagcaccggctaactccgtgccagcagccgcggtaatacggagggtgcaagcgttaatcggaattactgggcgtaaagcgcacgcaggcggtttgttaagtcagatgtgaaatccccgggctcaacctgggaactgcatctgatactggcaagcttgagtctcgtagaggggggtagaattccaggtgtagcggtgaaatgcgtagagatctggaggaataccggtggcgaaggcggccccctggacgaagactgacgctcaggtgcgaaagcgtggggagcaaacaggattagataccctggtagtccacgccgtaaacgatgtcgacttggaggttgtgcccttgaggcgtggcttccggagctaacgcgttaagtcgaccgcctggggagtacggccgcaaggttaaaactcaaatgaattgacgggggcccgcacaagcggtggagcatgtggtttaattcgatgcaacgcgaagaaccttacctggtcttgacatccacggaagttttcagagatgagaatgtgccttcgggaaccgtgagacaggtgctgcatggctgtcgtcagctcgtgttgtgaaatgttgggttaagtcccgcaacgagcgcaacccttatcctttgttgccagcggtccggccgggaactcaaaggagactgccagtgataaactggaggaaggtggggatgacgtcaagtcatcatggcccttacgaccagggctacacacgtgctacaatggcgcatacaaagagaagcgacctcgcgagagcaagcggacctcataaagtgcgtcgtagtccggattggagtctgcaactcgactccatgaagtcggaatcgctagtaatcgtggatcagaatgccacggtgaatacgttcccgggccttgtacacaccgcccgtcacaccatgggagtgggttgcaaaagaagtaggtagcttaaccttcgggagggcgcttaccactttgtgattcatgactggggtgaagtcgtaacaaggtaaccgtaggggaacctgcggttggatcacctccttaccttaaagaagcgttctttgaagtgctcacacagattgtctgatgaaaatgagcagtaaaacctctacaggcttgtagctcaggtggttagagcgcacccctgataagggtgaggtcggtggttcaagtccactcaggcctaccaaatttgcacggcaaatttgaagaggttttaactacatgttatggggctatagctcagctgggagagcgcctgctttgcacgcaggaggtctgcggttcgatcccgcatagctccaccatctctgtagtgattaaataaaaaatacttcagagtgtacctgcaaaggttcactgcgaagttttgctctttaaaaatctggatcaagctgaaaattgaaacactgaacaacgaaagttgttcgtgagtctctcaaattttcgcaacacgatgatgaatcgcaagaaacatcttcgggttgtgaggttaagcgactaagcgtacacggtggatgccctggcagtcagaggcgatgaaggacgtgctaatctgcgataagcgtcggtaaggtgatatgaaccgttataaccggcgatttccgaatggggaaacccagtgtgattcgacacactatcattaactgaatccataggttaatgaggcgaaccgggggaactgaaacatctaagtaccccgaggaaaagaaatcaaccgagattcccccagtagcggcgagcgaacggggagcagcccagagcctgaatcagtgtgtgtgttagtggaagcgtctggaaaggcgcgcgatacagggtgacagccccgtacacaaaaatgcacatgctgtgagctcgatgagtagggcgggacacgtggtatcctgtctgaatatggggggaccatcctccaaggctaaatactcctgactgaccgatagtgaaccagtaccgtgagggaaaggcgaaaagaaccccggcgaggggagtgaaaaagaacctgaaaccgtgtacgtacaagcagtgggagcacgcttaggcgtgtgactgcgtaccttttgtataatgggtcagcgacttatattctgtagcaaggttaaccgaataggggagccgaagggaaaccgagtcttaactgggcgttaagttgcagggtatagacccgaaacccggtgatctagccatgggcaggttgaaggttgggtaacactaactggaggaccgaaccgactaatgttgaaaaattagcggatgacttgtggctgggggtgaaaggccaatcaaaccgggagatagctggttctccccgaaagctatttaggtagcgcctcgtgaattcatctccgggggtagagcactgtttcggcaagggggtcatcccgacttaccaacccgatgcaaactgcgaataccggagaatgttatcacgggagacacacggcgggtgctaacgtccgtcgtgaagagggaaacaacccagaccgccagctaaggtcccaaagtcatggttaagtgggaaacgatgtgggaaggcccagacagccaggatgttggcttagaagcagccatcatttaaagaaagcgtaatagctcactggtcgagtcggcctgcgcggaagatgtaacggggctaaaccatgcaccgaagctgcggcagcgacactatgtgttgttgggtaggggagcgttctgtaagcctgtgaaggtgtactgtgaggtatgctggaggtatcagaagtgcgaatgctgacataagtaacgataaagcgggtgaaaagcccgctcgccggaagaccaagggttcctgtccaacgttaatcggggcagggtgagtcgacccctaaggcgaggccgaaaggcgtagtcgatgggaaacaggttaatattcctgtacttggtgttactgcgaaggggggacggagaaggctatgttggccgggcgacggttgtcccggtttaagcgtgtaggctggttttccaggcaaatccggaaaatcaaggctgaggcgtgatgacgaggcactacggtgctgaagcaacaaatgccctgcttccaggaaaagcctctaagcatcaggtaacatcaaatcgtaccccaaaccgacacaggtggtcaggtagagaataccaaggcgcttgagagaactcgggtgaaggaactaggcaaaatggtgccgtaacttcgggagaaggcacgctgatatgtaggtgaagcgacttgctcgtggagctgaaatcagtcgaagataccagctggctgcaactgtttattaaaaacacagcactgtgcaaacacgaaagtggacgtatacggtgtgacgcctgcccggtgccggaaggttaattgatggggtcagcgcaagcgaagctcttgatcgaagccccggtaaacggcggccgtaactataacggtcctaaggtagcgaaattccttgtcgggtaagttccgacctgcacgaatggcgtaatgatggccaggctgtctccacccgagactcagtgaaattgaactcgctgtgaagatgcagtgtacccgcggcaagacggaaagaccccgtgaacctttactatagcttgacactgaacattgagccttgatgtgtaggataggtgggaggctttgaagtgtggacgccagtctgcatggagccgaccttgaaataccaccctttaatgtttgatgttctaacgttgacccgtgatccgggttgcggacagtgtctggtgggtagtttgactggggcggtctcctcctaaagagtaacggaggagcacgaaggttggctaatcctggtcggacatcaggaggttagtgcaatggcataagccagcttgactgcgagcgtgacggcgcgagcaggtgcgaaagcaggtcatagtgatccggtggttctgaatggaagggccatcgctcaacggataaaaggtactccggggataacaggctgataccgcccaagagttcatatcgacggcggtgtttggcacctcgatgtcggctcatcacatcctggggctgaagtaggtcccaagggtatggctgttcgccatttaaagtggtacgcgagctgggtttagaacgtcgtgagacagttcggtccctatctgccgtgggcgctggagaactgaggggggctgctcctagtacgagaggaccggagtggacgcatcactggtgttcgggttgtcatgccaatggcactgcccggtagctaaatgcggaagagataagtgctgaaagcatctaagcacgaaacttgccccgagatgagttctccctgactccttgagagtcctgaaggaacgttgaagacgacgacgttgataggccgggtgtgtaagcgcagcgatgcgttgagctaaccggtactaatgaaccgtgaggcttaaccttacaacgccgaagctgttttggcggatgagagaaagattttcagcctgatacagattaaatcagaacgcagaagcggtctgataaaacagaatttgcctggcggccgtagcgcggtggtcccacctgaccccatgccgaactcagaagtgaaacgccgtagcgccgatggtagtgtggggtctccccatgcgagagtagggaactgccaggcatcaaattaagcagaaggcccagtcggaagattgggcctttttgcgctggtgcagaaaaaggtcggatgcgacactggctgcgtctgatccagcctactcttgcttatccgttctgcttttgcatccactccaccacaaaatcagccagcccctcaacatcattaatatccagtaatgcgacatcaagattaagcggcacatcactggctacagcaataacatgcctgtctatcactaattcttcaggtcgatgtccggctccatcgcgaaacagcacaatctttgcgatctcttcatgcttaaacccttcgaccagaatcaaatccagctttgaggtatccattcgacttgcgagaaactgtagatccagctcttcttcgtctggtgtttccgtcatcaaggcccatcgttgctggctggcaacgatggtttgtgccgcgccagccttgcgcagctcatagctatctttgcctggcttatcaacatccatatcatggtgcgtatgcttaatcagccctggacggatccctctggcgcataatgccgggatcagttgtttcaaaagcgtagtttttccggtaccactccacgcggcaaaggcgagtaacggtatcatcgtttttcctgccatcgggcaagctcctctggcgtattcacgttaataaatgcatctttattatcgctgaaatcaaccgcatgaccgccagccagacgcataaatgccattacccggcgttctcctgcttgcagatattccagtaataaaggctcaattgcgcggtttaccagagcaatagtcgggtgatcgcgttcaccgtcgtggacccacacgacaggcgcatctttgcgctgatgattaagccgggctgctaaatcctcgggaatataaggagtatcgcacggacaaaacaaaaaccactcgcctgcttcctgctgcattactgaaagcattcctgccagagggcctgggtaatccgccagtgaatcttcaatcactttcagaccgcttgcctgatagatttcctgatggcgattggcattaaccacgacgtgagagagctgcgtcataagcgcgtcagcgacatgttgccataatggtttgccgtttaattcaagcaatcctttatctacgccgcccattcgtctggctttaccgcctgccagcacaacgcctgttatcgtcgtcatcagattcaccgatatcgcctcttttattgtgggattgaccctgctaacgtgtctgtctcaagagtaaggagcattactatgaaatgtaaacgtctgaatgaagttattgaactcctccagccagcctggcaaaaagagccagaccttaacctgttgcaatttttgcagaaactggcgaaagagtcaggttttgacggcgaactggcggatttgacggatgacattctgatctatcacctgaaaatgcgtgattccgcgaaagatgcggtgatcccgggtttgcagaaagattatgaagaagacttcaaaacggcgctgttacgcgctcgcggcgtaattaaagagtaaaagcttgtaagcggtgccaccaaaatcatcgtgaaatgatatccttcatcattcgtaatgttttccggatgatgggatgaacaacagcgcttttactttccagacactacacccggataccatcatggatgctctatttgagcaagggatccgggtggattccggtcttaccccgcttaacagctatgaaaaccgtgtctatcaatttcaggacgaagatcgtcgacgttttgtcgtcaaattttatcgccctgaacgttggacagccgatcaaatcctcgaagaacatcaatttgcgttgcagttggtaaatgatgaagttccggtcgcagcacctgtggcctttaacggtcagactttattgaatcatcagggattttatttcgctgtttttccaagcgtcggtggtcgccagttcgaagctgataatatcgatcagatggaagcggttgggcgttatttagggcgtatgcaccagacggggcgcaaacagctttttatccatcgcccgaccatcggtctgaatgaatatctcattgagccacgcaagctgtttgaggacgctacactgatgccttccgggttgaaagcggcattcctgaaagcgacagatgagctgatcgccgccgttacagcacactggcgggaagacttcaccgttctgcggctacatggagactgccacgccgggaatattctctggcgcgatggtccaatgtttgttgatctggatgatgcacgtaatggtccagctattcaggatttgtggatgttgctcaatggcgataaagccgagcagcggatgcaactggaaactattattgaagcttatgaagaatttagcgagttcgacaccgctgaaatcggactgattgaacctttacgcgccatgcgtttggtttattatcttgcctggctaatgcggcgttgggctgatcccgcgttcccgaaaaatttcccgtggttaaccggggaagattactggctgcgacaaacggcgacttttatagaacaggcaaaagttctacaagaaccccctttacaattaacacctatgtattaatcggagagagtagatcatgaaaaagatttggctggcgctggctggtttagttttagcgtttagcgcatcggcggcgcagtatgaagatggtaaacagtacactaccctggaaaaaccggtagctggcgcgccgcaagtgctggagtttttctctttcttctgcccgcactgctatcagtttgaagaagttctgcatatttctgataatgtgaagaaaaaactgccggaaggcgtgaagatgactaaataccacgtcaacttcatgggtggtgacctgggcaaagatctgactcaggcatgggctgtggcgatggcgctgggcgtggaagacaaagtgactgttccgctgtttgaaggcgtacagaaaacccagaccattcgttcagcatctgatatccgcgatgtatttatcaacgcaggtattaaaggtgaagagtacgacgcggcgtggaacagcttcgtggtgaaatctctggtcgctcagcaggaaaaagctgcagctgacgtgcaattgcgtggtgttccggcgatgtttgttaacggtaaatatcagctgaatccgcagggcatggataccagcaatatggatgtttttgttcagcagtatgctgatacagtgaaatatctgtccgagaaaaaataattaaatgtaaattacataaagcccgtgaatattcacgggctttttttattatttaataaatataaatacattctgataatgcatcctgccgctggacattatttcagcataagcggatatttaaagttttgctgttttatcagggaatatttatatgatacataagtcagctacaggtgttattgttgcgttagccgtaatctggggtggtggcacatggtacacaggtacgcaaattcagcctggtgtcgaaaagtttattaaagattttaacgatgctaaaaagaaaggtgaacatgcctacgatatgacgttaagttataaaaattttgacaaaggtttttttaattctcgttttcaaatgcaaatgacattcgataacggtgcacccgatctcaatatcaagccaggccagaaagttgtatttgatgtggatgttgagcacggtccgttgcccatcacaatgttaatgcatggtaatgtcatcccagcactggcagcggcaaaagtgaacttagtgaataatgaactgacacaaccgctatttatcgccgcgaaaaataaatcgcccgtggaagcgacattgcgattcgcgtttggtggctcattctctacgacattagatgttgcccctgcagagtatggaaagttttcttttggtgagggccagtttacttttaatggtgatggtagttcattgtctaacctggatattgaaggcaaagtcgaagatattgttctgcaattatcaccaatgaacaaagtaacggcaaaaagttttaccattgattctctggcgcgattagaagaaaagaaatttccggttggtgaaagcgagtcgaaatttaatcagattaacattatcaatcacggggaagacgttgcccaaatcgatgctttcgttgcaaaaaccatgctggatcgcgttaaagacaaagattatatcaatgtcaatctgacctacgaacttgataagttaacaaaagggaatcagcaactcggtagtggtgagtggtcattgattgctgaatctattgatccctcagcggtgcgccaatttatcatccagtataacattgcaatgcagaagcagcttgctgcacaccctgagttagcaaacgatgaagttgctctgcaagaagtgaatgctgcattgttcaaagagtatttaccgttattacaaaaaagtgagccgaccattaaacaaccggtaaaatggaagaacgcactcggcgaactaaatgccaatctggatatcagtattgccgacccagccaaatcttcatcatccacaaacaaagatattaaatcgctcaattttgatgtgaagttaccgcttaatgtcgtcacagaaaccgcaaaacagcttaatttatctgaaggaatggatgcggaaaaagcgcaaaagcgggctgataaacaaatcagcgggatgatgaccttaggtcagatgtttcagttaatcacgattgacaacaataccgcctcgctgcaactgcgttatacaccgggtaaagttgtttttaacggacaggagatgagcgaagaagaatttatgtctcgtgccggacgttttgttcattaaaatactcactcgcctctgctcattcagaggcgagcaaaatttacttgtcctgccgctgtgatgacatcaacgacgtcagaagtcggtctttttcctgccacagtgagttcagccattgctgaaaatggcgcttaaagcttttgtcattgatgtagtcgccatgtaactcatcggcaataggctgtaaatccacatgaacgacaattcgcgtcagtttaccgcttaacatatcgaagaacggctgacggttattgtccggataacacagcgtaacattaagcagtttatcgaattgtttacccagtacatttagcgccatcgcaatgcctgccgcctttggtggcaacaagttttgaaaagtggagtgggtttgctgatgtttttcttgcgtgaaacgggagccttcaacgaaattgacaatggtggtgggatgcaggcgaaacttttcacaagaacgccgagtggtttcaacatctttaccacgtcgctccggatgacgtaataaataagcgcgggaataacgcttcataaacggcatatccagcgcccagcacgccaggccaagaaatggcacccaggccagctgttgcttgaggaaatatttattcatcggaatgtgcttacgaaacagcacgcacagtacgacaatatctgcccaactacggtggttacaaataagcagataccagttcttcttacttaacccttccagcccgtgaacttcccattgcaggtgtgggttcagatgcagtaataccgccagaccttcacaccagcaatacatcataaaatcacaaaaacgcgaaacctttcgccaaatgactggcacaggtagcaatagttttacaatcccggcaatgatgatcgggacggaacaaaaaatagtgaccaaaatggtcaatacgatactcagcaaaagggttatcgcagcgagtattctcgtcataatgaatttattcaaaaggttagccatagacagtgcgctaaagaagcgcaaggcgcagattttagcagaaaacgacccaaataacggatgatccttaaggagaaaaataattcatatctatccacattagaaaaaatcccattatctcaattattagggatggctttatttttaactacatgaaaaacaaagacaaacatcatactgtaaaaagcatgataataaattaaaagcgatgtaaataatttatgcacaaagttatccacatgacgatttgcgagcgatccagaagatctacaaaagattttcacgaaaagcggtgaaaaactcatgtttttatcctgtctgtggcatcctttacccataatctgataaacaggcacggacattatggttcagatcccccaaaatccacttatccttgtagatggttcatcttatctttatcgcgcatatcacgcgtttcccccgctgactaacagcgcaggcgagccgaccggtgcgatgtatggtgtcctcaacatgctgcgcagtctgatcatgcaatataaaccgacgcatgcagcggtggtctttgacgccaagggaaaaacctttcgtgatgaactgtttgaacattacaaatcacatcgcccgccaatgccggacgatctgcgagcacaaatcgaacctctgcacgcgatggttaaagcgatgggactgccgctgctggcggtttctggcgtagaagcggacgacgttatcggtactctggcgcgcgaagccgaaaaagccgggcgtccggtgctgatcagcactggcgataaagatatggcgcagctggtgacgccaaatattacgcttatcaataccatgacgaataccatcctcggaccggaagaggtggtgaataagtacggcgtgccgccagaactgatcatcgatttcctggcgctgatgggtgactcctccgataacatccctggcgtaccgggcgtcggtgaaaaaaccgcgcaggcattgctgcaaggtctgggcgggctggatacgctgtatgccgagccagaaaaaattgctgggttgagcttccgtggcgcgaaaacaatggcagcgaagctcgagcaaaacaaagaagttgcttatctctcataccagctggcgacgattaaaaccgacgttgaactggagctgacctgtgaacaactggaagtgcagcaaccggcagcggaagagttgttggggctgttcaaaaagtatgagttcaaacgctggactgctgatgtcgaagcgggcaaatggttacaggccaaaggggcaaaaccagccgcgaagccgcaggaaaccagtgttgcagacgaagcgccagaagtgacggcaacggtgatttcttatgacaactacgtcaccatccttgatgaagaaacactgaaagcgtggattgcgaagctggaaaaagcgccggtatttgcatttgataccgaaaccgacagccttgataacatctctgctaacctggtcgggctttcttttgctatcgagccaagcgtagcggcatatattccggttgctcatgattatcttgatgcgcccgatcaaatctctcgcgagcgtgcactcgagttgctaaaaccgctgctggaagatgaaaaggcgctgaaggtcgggcaaaacctgaaatacgatcgcggtattctggcgaattacggcattgagctgcgtgggattgcgtttgataccatgctggagtcctacattctcaatagcgttgccgggcgtcacgatatggacagcctcgcggaacgttggttgaagcacaaaaccatcacttttgaagagattgcgggtaaaggcaaaaatcaactgacctttaaccagattgccctcgaagaggccggacgttacgccgccgaagatgctgatgtcaccttgcagttgcatctgaaaatgtggccggacctgcaaaaacacaaagggccgttgaacgtcttcgagaatatcgaaatgccgctggtgccggtgctttcacgcattgaacgtaacggtgtgaagatcgatccgaaagtgctgcacaatcattctgaagagctcaccttgcgtctggctgagctggaaaagaaagcgcatgaaattgcaggtgaagaatttaacctttcttccaccaagcagttgcaaaccattctgtttgaaaaacagggtattaaaccgctgaagaaaacgccgggtggcgcgccgtcaacgtcggaagaggtactggaagaactggcgctggactatccgttgccaaaagtgattctggagtatcgtggtctggcgaagctgaaatcgacctacaccgacaagctgccgctgatgatcaacccgaaaaccgggcgtgtgcatacctcttatcaccaggcagtaactgcaacgggacgtttatcgtcaaccgatcctaacctgcaaaacattccggtgcgtaacgaagaaggtcgtcgtatccgccaggcgtttattgcgccagaggattatgtgattgtctcagcggactactcgcagattgaactgcgcattatggcgcatctctcgcgtgacaaaggcttgctgaccgcattcgcggaaggaaaagatatccaccgggcaacggcggcagaagtgtttggtttgccactggaaaccgtcaccagcgagcaacgccgtagcgcgaaagcgatcaactttggtctgatttatggcatgagtgctttcggtctggcgcggcaattgaacattccacgtaaagaagcgcagaagtacatggacctttacttcgaacgctaccctggcgtgctggagtatatggaacgcacccgtgctcaggcgaaagagcagggctacgttgaaacgctggacggacgccgtctgtatctgccggatatcaaatccagcaatggtgctcgtcgtgcagcggctgaacgtgcagccattaacgcgccaatgcagggaaccgccgccgacattatcaaacgggcgatgattgccgttgatgcgtggttacaggctgagcaaccgcgtgtacgtatgatcatgcaggtacacgatgaactggtatttgaagttcataaagatgatgttgatgccgtcgcgaagcagattcatcaactgatggaaaactgtacccgtctggatgtgccgttgctggtggaagtggggagtggcgaaaactgggatcaggcgcactaagattcgcctgaacatgcccttttttcgtaagtaagcaacataagctgtcacgttttgtgatggctattagaaattcctatgcaacaactgaaaaaaaattacaaaaagtgctttctgaactgaacaaaaaagagtaaagttagtcgcgtagggtacagaggtaagatgttctatctttcagaccttttacttcacgtaatcggatttggctgaatattttagccgccccagtcagtaatgactggggcgttttttattgggcgaaagaaaagatccgtaatgcctgatgcgctatgtttatcaggccaacggtagaattgtaatctattgaatttacgggccggatacgccacatccggcacaagcattaaggcaagaaaattattcgccgtcctgcgtttcttctacaggctgcatctcgctaaaccaggtatccagtttctgccgcagcttgtccacgccttgtttcttcaacgaagaaaacgtttcaacctgcacatcaccgttaaacgccagtacagcttcacgcaccatattcaattgcgctttacgtgcgccgcttgccagtttgtccgctttggtcagcagcaccagaacggcgatattgctgtctaccgcccactcaatcatctgctgatccaaatctttcagcggatggcgaatatccattagcaccaccagaccttgcaggctctgacgtttttctaggtattcgccgagcgcacgctgccatttgcgcttcatctcttccgggacttccgcataaccgtacccaggcaagtcaaccagacgcttgccgtcagccacttcaaacaggttgataagctgggtgcgccctggggtttttgaggtacgagccaggcttttctggttagtcagcgtgttcagcgcgctggatttacctgcgttggaacggcctgcaaaagccacttcaattccggtatcggaaggtaggtggcgaatatcaggcgcactcatcacaaaatgcgtctgttgataattcaaattagtcaaagcggtcgtctccgtcagtcaaagctttgtggcgattatacctgaaccataataaaaggcggatttttcggcgtgagcgttgtaagtaaaagccatacgctttgtgagacattgccgatagtctttatgcgaaatagcagagaaaattctgcgatgcatgtcaaataagctatataaatcagtgaattgcttttatataaaactctgaaaatgtgcaaatactgatggcggttgattgtttgtttaaagcaaaggcgtaaagtagcacccatagagcgaggacgctaacaggaacaatgactcaggatgagggtcaggagcgccaggaggcgaagacagaggattgtcaggaagacaaacgtccggagacgtaattaaacggaaatggaatcaacacggattgttccggctaaaggaaaaacagggtgtgttggcggcctgcaaggattgtaagacccgttaagggttatgagtcaggaaaaaaggcgacagagtaatctgtcgccttttttctttgcttgctttctgttagattccgccgcaaatctatactgaataaaacggctaaaagacgaaccattatgaaaccatcatcttcaaactcacgcagcaaaggtcatgcaaaagcgcgtcgaaaaacacgcgaggagctggatcaggaagctcgtgatcgcaagcgtcagaaaaaacgtcgtggtcatgcgccgggcagccgcgcagcgggcggaaacaccacgtcaggcagcaaaggccagaacgcaccaaaagatccacgtattggcagtaaaacccctattccattgggcgtgattgaaaaagtcaccaaacagcacaaaccgaagagtgagaaacctatgctttcaccgcaggcggagttggaattactggaaacggatgagcgtctggatgcgctgctggaacgtctggaagcaggcgaaaccctgagcgccgaagagcaatcctgggtggatgctaaactggatcgtattgatgagttgatgcagaaactcggcctctcttatgacgatgacgaagaagaggaagaagacgagaagcaagaagacatgatgcgtctgctgcggggcaactaacggattgccgccgtgggccttcccgttctgctgataacccttccggttatatgttatctggtgtggttattcgttaaactacagcggttgtcgcggcgacaaaagtggctgcgcaaccggctgatgacccgaaacgggcatccgccggtacgccgtagccgccagagacgccatcggaaggagtgagcatgtctgtacagcaaatcgactgggatctggccctgatccagaaatataactattccgggccacgatacacctcgtacccgaccgcgctggagttttcagaagacttcggcgaacaggcgtttttacaagccgtggcgcgctatcctgagcgtccattatctctctacgtacatatcccgttctgccataagctttgttacttctgcggttgcaataagattgttactcgccagcagcacaaggccgatcagtatctggacgcgctggagcaagaaatcgtccatcgtgcaccgctgttcgccgggcgtcacgtcagccaattgcactggggcggcggaacgccgacgtatctgaataaagcgcaaatcagccgcctgatgaagctgctgcgcgaaaacttccagttcaatgccgatgcggagatttcgatcgaagtcgatccgcgggaaatcgaactggatgtactcgatcatttacgcgccgaaggctttaatcgcctgagcatgggcgtgcaggacttcaacaaagaagtgcaacgtctggttaaccgcgagcaggatgaagagttcatctttgcactgcttaaccatgcgcgtgagattggttttacctccaccaacatcgacctgatttacggcctgccgaaacagacgccggagagtttcgcctttaccctgaaacgcgtggcggagctaaaccctgaccgtctgagcgtctttaactatgcgcatctgccgaccatttttgctgctcagcgcaaaataaaagatgctgacctgccgagtccgcagcaaaaactcgatatcttgcaggaaaccatcgccttcctgacacaatcgggctatcagtttatcggtatggatcactttgcccgcccggatgacgagctggcggtggcccagcgtgaaggcgtgctgcatcgtaacttccagggctacaccactcagggcgataccgatctgctggggatgggcgtttccgccatcagcatgattggcgactgctacgcgcagaaccagaaagagttgaagcagtactatcagcaagtggatgaacaaggcaatgcgctgtggcgtggtattgcgctaacgcgtgatgactgtattcgccgcgatgtgattaagtcgctcatctgcaacttccgtctggattacgcccctattgagaaacagtgggatttgcacttcgctgattactttgcggaagatctcaagctgctcgccccgttagcaaaagatgggctggtggatgtggatgagaagggaatacaggtgacggcgaaaggtcgcttgctgatccgcaacatttgcatgtgctttgatacctatctgcgccagaaagcgcggatgcagcagttctcacgggtgatttaaatagtgaatggcgcttcgtttacaaagtagaaaacgaaagcgccatcaatgtgctgagaacaagattgcctgatgcgctacgcttatcaggcctacaaaacctgttgaaaatattgcttttgtaggccggataaggcgttcacgccgcatccggcatgaacaaagagcacttcatcagcaatctgaaactcaactaaacagcccaatcattgcggcacacagcacggcagcaacggcagtttgcggtgtgtggctgtcaactgcgccactcgataccagattaattattgattccagcataatgactctccccgttttccgggcaagatcatactgaacttatcggaacagtaaagcgtaaaataccagcaatttgcgctcaataatcaatctttacacacacgccgtgaatcactccatccccagctcttttaacttacgcgtcagggtgttgcggccccagccgagtagccgcgccgcttcctgtttatgcccctgcgtatgtcgcaacgcggtcgtcagtaacgtccgctccagctctggctgcgcttcggaaagcagattttgatgaccggaacgcagcgctctgtctgcccactgcgcaagaagcgtcgcccagctgtccggttgcatttgcgaagtactctccgcaaccgttgattcaaacagttcgccgggcaaatcctgaatcaacacttcctgcccggcggccatcaccgttagccagcggcaggtgttttccagctggcgcacgttgcctggccacgccagacgcgtcagagcagcttcggtttccggatgcagtaacttcgcttctacgcccagttcgcgcgcggcaacctgtaaaaaatggcgcgccagacggggaatatcttcccgacgttcgcgcagcggcggcagatgaacgcggataacgttcaggcggtggaacagatcctcacggaacttaccttcctgcactcgctgttcgagattctggtgagtggcagcgataatccgcacatccactttcaccggcgcatagccgccaacgcggtaaaactgaccgtctgccagcacgcgcagcaaacgcgtctgcacatccagcggcatatcaccaatttcgtcgaggaataatgtaccgccatcggcctgttcaaaacgcccctgacgaatggtattcgcgccagtaaacgcgcctttctcgtggccaaacagttctgattcgatcaaatcttttgggatagctgccatattcagcgcgataaacggcgctttggcgcgcggactgtggcgatgcagggcatgagcgaccagttctttaccggtgccggattcgccgttaatcagcacgctaatagaagaacgcgaaagccgaccgataatacggaacacgtcctgcatggctggcgcttcgccgatgatatcggtcgttgggccgttaagctgaatattacgcggctgctgctgttcctggtaatgactgatggcgcgctcaaccagcgcgacggcttcgtcgatatcaaacggtttgggcagataatcaaacgccccttgttgataggcgctgacggcagcatccagatcggaatgtgcggtcataatgatgaccggaagcatcggatggcgctgtttaatctgcttgagcagtgccagcccgtccattcccggcatacggatatctgaaagcagcacatccggcgttttgctcgccagcgcctccagtacctccgcgccgttctcaaatgtcgtacaggttaaacccgctccagcgagcgcacgttcaagcacccaacggatggaactatcgtcatcgactacccagactatccctcgttgcataaacgtcacctttatttcctgataggcaggtaaaccgagaactcggtatgccctggccaactggtaaattcaattttgcctgaatgctgatcaatcaaattacgagcgatggataagccaagcccggtgccaccttcgcggccgctgaccatcgggtaaaacagcgtatcctgcaaatgaggcggaatgcctggcccgttatcttccacatcaatccgcgccgccagccggtagcgttcgccgtgtaaggtcagttgaaacgcggtgcgggtacgcagaatgatttcaccgccttccggccccagcgcctgtagcgcattgcgcacaatattcagcaagacctgttcaatttgatccgggtcgtgcgccagttccggcaggctgggatcgtaatcacgaatcaaccgcacgttgtccggcagttccatcgacaccagcgttaccacgcgttcagctactttgtgaatactttcggtaacgcgcgtaccgggcagctgcggccccaacagacggtcgaccagatttcgcagccggtccgcctgttcgataatcactttggtatattcgagtagtgatgggtcaggtaacgctttgctgagcagctgcgccgcgccacgtaaaccgccaagcggatttttaatctcatgtgccaggccgcgcactaaatcacgggcagcaacctgctgggcgtgctgtagctgttcctgacttaagcggcgctggttatccatcggagccatctccagcaggatcatgccgtccggcatacgctgggccgtcacagaaaggatatgcgagcgcccgtcgatgaccagcgtcacttcgttatcggtaaaaccttgccccgcctccagactttcttgcatcagctcgatatttaatgagaagtagctcaacagttccggtaacggtgtaccaaacaatttgcgggagctttgggcgagcagttgttgcgcggcggggttggcgtaatggatcgccaggttgtcatcgattaacaaaatactgttaatcagcgagttgaggatctgcccagcatcgggctgcgtgcctgttgccataaagcagtctcctgaacaggttgcaccattttagtgcattatagctttttacggataaaaagcgcgaagcatcagagaattgacggagaaaaaagcccatgcagagatgggctacagatagctgacaaacttcacgttggagagcgactcacctgctccggcctaccacatcatcaccgtgtaggccggataagacgcatttgcgtcgcatccggcgtgatgtgcttgccaccgatcccaggcctgccagagacaggcgaaaagtttccacggcaactaaaacacttagacgctgtagtacagctcaaactctaccggatgcggagtcatacgcacgcggtcatcttcttcgcgacgcagtgcgatgtacgcatcaattgcttcgtcagtgaacacgccaccggctttcaggaactcgcggtccagatccagttcgttcagtgcttcttccagagagcctgcaacctgtgggatctctttcgcttcttctggcggcaggtcatacaggtttttgtccatggcttcgcccggatggatcttgttcttgataccatcaagaccggccatcagcagggcagcaaagcacaggtacgggttagctgccggatccgggaaacgtacttcgatacgacgtgctttcggagaagaaaccaccggaatacggatagacgcagaacggttacgcgcagagtaagccagcattaccggtgcttcatagcccgggaccagacgcttataagagttggtggtcgggtttgccagggcgttaatcgctttagcgtgtttgattacgccgccaatgtagtacagcgcctgctcagacagacctgcgtatttgtcgcctgcgaacaggttaacgccgtttttagacagagacatgtggcagtgcataccggagccgttatcaccgaacatcggttttggcataaaggtcgcggttttaccgaagcggtgcgctacgttgtgcacaacatatttgtagatctgaatttcgtcagcttttttggtcatggtattgaagcgggtagccacttcgttctgaccagcagtcgctacttcgtggtgatgggcttcaaccaccagacccatctgttccatcaccagacacatttcagaacgaatatcctgagcagagtctaccggcggaaccgggaagtaaccgcctttcactgccggacggtgacctttgttaccaccttcgtattgggtggaggagttccatgcgccttcgatatcgtcgatagcaacgtgggaaccagagatagatgatccgaaacggatgtcatcgaacaggaagaattcaggttctggcccgaacagtacggtgtcggcaatgccagtggaacgcaggtaatcttcggcgcgcttcgcaatagagcgcgggtcacggtcatagccttgcagggtgccaggttcaaggatgtcgcaacggataatcagggtggagtcggcgaagaacgggtcaatcactgcggtggatgcgtctggcatcagcaccatgtcggattcgttaatgcctttccagccgccaatcgaggagccgtcaaacattttgccttcttcgaagaattcagcattcacctgatgagcagggatagtgacgtgctgttctttacctttagtatcggtgaagcgcaaatcaacaaacttcacttcgtgctcgttcagcatcgtcagtacgtgttcagcggacatactttaactctcctggattggtcatggtcgtcgtggtaacgaaatctgcaattattttggccgtgtcgccgtaaaaaagataaagcgaaatctgtgccaacttttaaattgcccctaaaaggcgttatcatgcgcaccatcgtgcaaaagggctgcaccacgatgtgaatgttgcaccaatatagtgcttcaatggaaacattaagcaccatgttggtgcaatgacctttggataaccctttttatgctccgtgaaagcgatcacaaagggactctgcaatacttgtttgcggaggatgtttgtgatcctgttttgtagtgcgattaatccgtgtacaataacgcgctatttctaatgcctgaggcaaagttgtgatcgaaaaattgcgtaatatcgccatcatcgcgcacgtagaccatggtaaaaccaccctggtagacaagctgctccaacaatccggtacgttcgactctcgtgccgaaacccaagagcgcgtgatggactccaacgatttggagaaagagcgtgggattaccatcctcgcgaaaaacaccgctatcaaatggaatgattaccgtatcaacatcgttgataccccggggcacgccgacttcggtggtgaagttgaacgtgtaatgtccatggtagactcagtgctgctggtggttgacgcatttgacggcccgatgccgcaaacgcgcttcgtaaccaaaaaagcgtttgcttacggcctgaagccgattgttgttatcaacaaagttgaccgccctggcgcgcgtcctgattgggttgtggatcaggtattcgatctgttcgttaacctcgacgcgaccgacgagcagctggacttcccgatcgtttacgcttctgcgctgaacggtatcgcgggtctggaccacgaagatatggcggaagacatgaccccgctgtaccaggcgattgttgaccacgttcctgcgccggacgttgaccttgacggtccgttccagatgcagatttctcagctcgattacaacagctatgttggcgttatcggcattggccgcatcaagcgcggtaaagtgaagccgaaccagcaggtcactatcatcgatagcgaaggcaaaacccgcaacgcgaaagtcggtaaagtgctgggccacctcggtctggaacgtatcgaaaccgatctggcggaagctggcgatatcgttgcgatcacgggccttggcgaactgaacatttctgacaccgtttgcgacacgcaaaacgttgaagcgctgccggcactctccgttgatgagccgaccgtttctatgttcttctgcgttaacacctcgccgttctgcggtaaagaaggtaagttcgtaacgtctcgtcagatcctggatcgtctgaacaaagaactggtacacaacgttgcgctgcgcgtagaagaaaccgaagacgccgatgcgttccgcgtttctggtcgtggcgaactgcacctgtctgttctgatcgaaaacatgcgtcgtgaaggtttcgaactggcggtatcccgtccgaaagttatcttccgtgaaatcgacggtcgtaaacaagagccatatgaaaacgtgactctggacgttgaagaacagcatcagggttctgtaatgcaggcgctgggcgaacgtaaaggcgacctgaaaaacatgaatccagacggtaaaggccgcgtacgtctcgactacgtgatcccaagccgtggtctgattggcttccgttctgagttcatgaccatgacttccggtactggtctgctgtactccaccttcagccactacgacgacgtacgtccgggtgaagtgggtcagcgtcagaacggcgtactgatctctaacggtcagggtaaagcggtcgcgttcgcgctgttcggtctgcaggatcgcggtaagctgttcctcggtcacggtgcagaagtttacgaaggtcagattatcggtattcatagccgctctaacgacctgactgtaaactgcctgaccggtaagaaactgaccaacatgcgtgcttccggtactgacgaagccgttgttctggttccgcctatccgcatgactctggaacaagctctggagttcatcgatgatgacgaactggtagaagtgaccccgacctctatccgtattcgtaaacgtcacctgacggaaaacgatcgtcgtcgcgccaaccgcgcaccgaaagacgattaatttcgttttttagttataaaaaacctgccatcgctggcaggttttttttacctgtcgtgagcgcacaccaatgcgagtatctcccttataagtctgggattacgtcaatagagagctttgtcacaattatctgcaaagtcatacgccgttaattgctttcttttttggcgtaagcgtaagatgcctcatctggtttaaaccaaaaggattaaacaatggcggagaatcaatccaccgtagaaaatgcaaaagagaaactggatcggtggttgaaagatggcatcaccacgccgggtggaaaactcccttcagaaagagagctgggagaactgctgggcattaaacgtatgacgctgcgccaggcgttgttgaacctcgaggcagaatccaaaatcttccgtaaggatcgtaaggggtggttcgtgacccagccgcgatttaattacagtccggagttgtcggcgagctttcagcgggccgcaattgagcaaggacgagagccttcctgggggtttaccgagaaaaaccgtaccagcgatattcccgagacgctcgcgccactgattgcagtgacaccatcaactgaactctatcgcatcaccggctggggggcgctggaaggacataaagttttctatcacgaaacatatattaatcctgaagttgctccgggttttattgaacaacttgaaaaccactcattttctgcagtctgggaaaagtgctaccaaaaagagacggtagtaaaaaaattgattttcaaacccgtcagaatgccgggcgatatcagcaagtatcttggcggttctgcgggtatgccagcgatcttaattgaaaagcatcgcgccgaccagcaaggcaatattgtccagatagatattgaatattggcgatttgaggccgtagacctcatcattaatctgtaggtgttttatggtgacaataaataacgcaagaaagattctacaacgtgtcgacactcttcctctttatttacatgcttatgcctttcatttaaatatgcggctggaaagagtgttgcctgctgatttacttgatatcgcaagtgaaaataatctacgtggcgtcaaaatccatgttctggatggcgagcgtttttctcttggtaatatggacgataaagaactctctgcctttggggataaagcccgccgtctgaaccttgatattcatattgaaaccagcgcttcagataaggcatctattgacgaagccgtcgccattgcgttgaaaactggggcatcgtccgtacgtttttatccacgttatgaaggtaatttgcgcgacgtattatcgatcatcgctaacgacattgcctatgtacgggaaacgtatcaggacagcggcctgacttttacgatcgaacagcatgaagatttaaaaagccatgagctggtgtcgctggtcaaagaaagtgagatggaatctctttccttactgtttgattttgcgaacatgatcaatgcaaatgagcatcccatcgacgctttaaaaacgatggcgccgcatattacccaggtccatatcaaagatgccttgatcgttaaagaaccgggtggcctgggtcataaagcctgtatttcaggtcagggtgatatgccgttcaaagcgttattaacgcaccttatatgcctgggtgatgatgagccgcaggtgacggcatatggcctggaagaagaggttgattactatgcgccggcgttccgctttgaagacgaagatgataatccgtggatcccttatcgccagatgagtgaaacaccattgccagaaaatcatttactggatgcgcggttacgtaaagaaaaagaagatgcaattaatcagataaatcatgtgcgtaacgtactacaacaaatcaaacaagaggcaaaccatcttctgaaccactaataagttttaactcatacgcagttaataaaaccattccatatgaatggtcggtatcttattgcctttaaaacagtgattttaaaaatcgcttaggggatgttatgctcacaaaaaagaaatgggcgttatttagtctattaacattgtgtggcggtacaatttataaattaccgtcgctgaaagatgcgttttatatcccgatgcaggaatatttccatttgaccaatggtcaaattggtaatgctatgtcggtaaactcatttgtcacgacagtgggtttttttctgtctatttattttgccgataaactaccgcgcagatacaccatgtcattctcactcattgcgacaggattactgggtgtttatttgacgacaatgccggggtattggggcatcctctttgtctgggcgctatttggcgttacttgcgacatgatgaactggccggtcttgctcaagtcggtaagtcgattgggcaatagcgaacaacaaggtcggttgtttggcttcttcgaaacagggcgtggcattgtcgataccgtggtggcattttctgcgttggcagtatttacctggtttggcagtggcttattgggttttaaagcaggcatctggttctattctcttattgtgattgccgtaggcattattattttctttgtcctgaatgacaaagaagaggcaccgtccgttgaggtgaaaaaagaagacggagcatcgcaaaacaccagtatgacctcggtgctgagagacaaaaccatctggcttatcgcttttaacgtcttcttcgtttacgcggtttactgtggcctgacattcttcattccattcctgaaaaacatctatctattgcccgttgcgctggtgggggcttacggcatcattaaccaatactgtctgaaaatgattggtggaccgattggtggcatgatttcagataagatcctgaaatcgccgagtaaatatctatgctacacctttatcatcagtaccgctgcgctcgtactgttgattatgctgccgcacgaaagtatgccggtctatttagggatggcatgtacgctgggctttggcgcgatagtctttacacagcgagccgtattttttgcacctatcggcgaagcaaaaattgctgaaaataaaacaggcgcggcgatggcgttgggtagctttattggttacgctccggcgatgttctgcttcagtctgtatggctacattctggatttaaatccggggattattggctacaaaatcgtgtttggcattatggcctgcttcgcattctgtggtgcggtggtttccgtaatgctggttaagcgtattagccaacgtaagaaagagatgctggcggctgaagcttaattaatggccggatgtgcttaatccggccaacgaaaaccgtatcaaccgtaggccgcatccggcaaaataaaatccgctgaatccccagcggatttttcgaagtttcaatttcaggaaacttcctgctcggcaaccaccagttcaacattctcttcacttaacaactggcagaaagaattgggaggcggggcatctgtaaaaaaagccctgacattccgtgcattgccaattgaaacggcagcagacgcggcaaacttcgtatgatcggccactaacaatgtattccgcgcatgtttaatcatcgttctcgcgactaacgcttcatttacatcaaattccagtagggtgccgtcatgttcaatggcacctatactggtgattaaataatctgcgcggaagccttcaataaaatccacggctcctgggccgataatcccgccgttatgagcgcgtaaagtgcctcccggcaccatcacttcaatatcctgattcttataaagaatctgtgccacacgtaggctgttagtgataatgcgtaaatcacgccggttgagtaatgccctggcaacggcttctacggttgtaccgatggtgataaagacggtacagcgttcgggaaggtaatcggcgactgcctcagcgatcgcccgtttctcggcggtgagcgaaagttcccgttgctcaaaagcggtattcatgacgctggagacgcgcccggcccctccatgatgacgggtgatcaagccctgctcactgagttttcggatatcccggcgcacggtttgcgttgaaacatccagcagttgtgccagttcttcaatattcatataaccgcgttctgcgattagatgaacgagttggtcatggcgtggattacctgtcacttcgatgatactcatgaatactcccttgcccctcctcggtagatgtttaccattttacgcataaagtgacaaaaatgattcggtttgctcacgattaggaatgccggcccgaccgccaggctgggtacatttcatcgcggcaaccgcactggcaaaacgaatagcctcttttgttggcattttttctgccaacgctactgcgagtgcgccgtgaaaaacatcgcctgctccagtggtatcaaccacattgacagaaaatgcctcctgttgacacaaatgaccatcttcaatccacaacgatccttcagaacccagcgtaacatacactttacctgctgtttgtgtcgttgcctggaacaaaccttcttcaggtgactgcaggccagtcatgcgtttcagccctggtgttgagaacacggcgtgatcggcaagcgcgacaagtggagaaatatcctgcggtgtcatatcggcgtctaaaagcgttgtcacacccgcaagacgcgctagcgagaatgctttttcagtaccgctatgccagcgaacatcggccagaatcagatcataacgagagaaatcgatcgcttctaaccattcggcatcagtaccgagatcgggacttggataattaacgataatccgttcgccatgctgatcaacgaggatcgctgattgcgatgaacgggcgttaggatatcggcggcaaaatgcggtattgacgccccaaccctcaagttctgcaagtaaggtatttccacaactgtcatcgccgacgcgaccgatgaaatcaacctctacgccaagctttgcgattgcaacagcggctgttgctgccgggccgccaccaatctcaagataatgatttgcctgatattttccgccgccatccggcagagtgagcaaagaataaatcctgtcctgaactgtgatacccacgcatgcaattttggtcatatttgtcttgtcctgtttaattttgtcgtcttcggtcaatttaaatgacgcaaatgatcaaattagtgatgcgtgtcgtgtttttgaacataaattacaaatatgctcaaaaacagacgaaaacgaattttcaattgtcattattttgtcaatgtcagacaggagagtattcatggcaaccattgcatttctcgggctggggcagatgggtagcccaatggctaacaatctattgcaaaaagggcattcattgcaggtatttgatgtcaatgcacaggccgtcgatgcgctagttacgcagggggccactgcggcacaaaccccagcggaagcggcagcaggcgctgaatttatcatcactatgcttcccaatggtgacattgttcgacaggttctgttgggggaaaaaggcgtctgtgaggctgtttcatctgacgcgttattgattgatatgtcgactattcatcccttacagaccgatgcattaatacgggagttacaagaaaaggcatcagtatgatggacgcccccgtgggcagaacgtccgtgaatgcgattgatggcacattgctgattttagcgggtggcactgatgagcagattgcacgtgcacgcccgattctcatgtgcatgggtaatgagctggtcgaggctggcggcccaggaatggggatccgcgtgaagctaattaacaactatatgagcattgcgcttaatgcgctgtcctccgaggccgctgtgttatgtgagtcactgggattaaatcttgatgtcgcaattaaggtgatgagtggtacggcagcagggaaaggacattttacgaccacctggccttgcaaagtgctgaaaggcgatctttcacccgccttcatggtggatctggcgttgaaagatctgcgtattgcagttgacgtcgctcgggagacgggggcaccgctcaatatggggattgcagcagaaagttattacgctgcagcaagtcaagacggcaaagggcggcaggactggagtgccctgctaaatcaggttcgccagcaggctggtctttaattttatctattaacaggagtttctatgtcatcccacttcaccccatttacgctgaaagatatctcccgcccaggtggtggatttgccatgttagctgtcgatcagcgtgaggccatgcgcttgatgtttgcggcagcagggcagccaaaacccatcgccgacagtgtactcaccgattttaaagttgccgcgacccgaatcctttctccttatgcttctgccgttctggcggataaacaattttgtcttgagcaaatagtcgagcagggcgctgttgctaattcttgcggcctgattgtcgctgccgatctttttatcccaggtaatggcatcccggttgatagcgttgaaatagatatgtccgtcgacccgcataaagcccgtgaaatgggggctaaggcaatgaaattacttgtactctggcgtgaagatgaacccgcagaggaacgtctggcaatggttgataaatttgttcgtcgctgccgtagtgccgggctggttagcattattgaacctgtggtgcgtccacctcgtcgcggttgggactttgatcgtgaaagcgccattgttgccgccgccgcagagcttggtggaacagaggctgatctttacaaagccgagatgccattagggggcaaaggcgatgaaaaaaccttacttgccgcctgtcagcaacttaacgatcagatgaagatgccgtgggtaattctttcttctggcgttgatgccgatatttttggccgtgcagtaagtattgccatgaaaggtggtgcgtcaggcttcctggctggacgagcggtttgggcgtcggttgttggtgcacaagatccacaaactatgctgcgcgatgtctctgttcctcgtttacaacggttggcagaaattgtcgatgaaggtatcgcgcaacgctaatcccctatggatatcgattctggagaataacaatggataaaattacccaggttttattttcagatattgggaaagtcaccactcaatatgttgaagtaccacaccaggaacttaaaccgcacgaagtgcggattgcgcctgtgttctatgggatatgcggttcggatctgcatgttctgaaaggcggtcatccgtttgctaaaccacctgtcgtccccggtcatgaaattgcagcgcgcgttacggaagttggcagcgacgttaaaaatgtacagccgggcgatcatgttgtggtcgatcccatcatggcttgcatggaatgccgagcctgcaaagcaggacgttttaatctttgtgaaccaccgcaggttgctggttttcgcgcaccgggctttgctcgctcacaacacattgttcctgcgcgtaattgccatgtcgcaccagcctctttaccgctaaaagtgttggcctttgccgaaccggcggcttgtgcccgtcactgcgttaaccgaatgccgaaagcttctctggaaagcgtactggtgattggtgccggaacgataggcttatccatcgtgcaggcactgcgcattatgggggcaggtaagattaccgtgattgaacctgacgctgccaaacgcgcgctggcgttaaagctgggcgcagcagaagtttgggcaccaggtgagctggccgcagatgtgcgatttacgggggcgattgatgtcgttgcagcgcaggccacgcttaacgatgcatgtacccgtgtatatgccggaggcaccgtcgtgtgcatgggcgtaccaagtgggccgcgtgaaataccattaccgatgatgcaacgtttcgagcgtgacttgctcaactctggcatgtacatccctgaagatttcgatgctgttatcgaatggctggcggatgggcggtttgataccagtgaactggttaccgatttatttgccattgaggatgcagcggcggcattcgaacgcgcgcagcaaaatgactccataaaggtcatgctgcaatttgcgccggaatgattttctaaatctctgtctggcgctgcgtcacgtcagcgccaccctacaacaattaaaaaggacactgcgatgagtcaaatcaccagtcctgcaacttattcaattagtcggccacaggacgtaattgatattgttaataagaactctgcaatcaacaccagtatcggcgttatttttattgctttgggcggcatattgattgatgcctaccaggcggcgatggtggggtttggtaataaatacattgccgctcaatttggcatttctccaggccttgccgcaaccgttaatgcgtcagtattaatcgccgcgttaattggcggtttattagcgaaccgagtaataaaccgctttgggcaaaagcgagcatttattattggcatggggctgtgcaccatcggggctgctgcggtagctattgcgcccagtatctggtgggtgctggtgtgccgcgtcatcatgggctttggtttaggcatcgacttccctttggcaaccaatgccgtggcagagcttcgtggttcaacgtcgaagaaaaccggaacgtcggtcaacctctggcaaatggcctggtatgtttcgacaactgttgtttatttggtgctcttgccgctgcttctgtcgggtatcgctgaagaacaattgtggcgttacggaatattcatcggagctatttttgcagtcatcttcatgattttgcgttacttctttattggtgaatccgcaatgtgggccgcacgcgtcgggcgttaccaggaagcgtgcgacattctgggaaaacgttatggtgttcaggctcgcgttgcggcatcgagtacaacagaagcgaaattctcggaaaaagcagagaataaatacagtggtggatatggcatcttatttaatgatcgttaccgcaaacgcaccattcttggctgtgtcgtggcaaccatgcaggcgtggcaatataacgccgtaggtgtttatcttcctcttacgttggcgggaataataagtggcgggcttactggtgcgttgacgggttctgccgtcgtgaatgccctttgtggggtgacaggcgggatgatcggctcgtttattctccaacgactgggtactcgccgacagtcgatgtatggatttgctgttgtgaccttagcattgctgtcgttaggcgcactggcaacgactaatccatggctgtctttagggttattgggatcaattattttcttccattcagcgggtcctggtgggctgggcatgaccattgccacactctcttatcctcccgctattcgccctactggggtcggatttgcccgcgctattatgcgcacaggggcaattgcaggactcattttctggccgatgctgtggggggcgttgaaaactgaagcgttttactggttggcaatcgtgccattcttggggttcctgacctgcgtattgattaattgggaaccactgggtgcaaatgttgatgctgaggatgcagaggttctggctgaattgaagaaataaattaatgcgcatcggcttaaaccgatgcgcattaattcaaactgcccacgtttagtggttcgtatcccagatttctcgcctaccaggagaggaaaattatgtctgaaaagttacccgcaccgcgtgaagggctttccggtaaagccatgagacgtgtcgttatgggcagtttcgcaggcgcgttaatggaatggtatgacttctttatttttggcacggcagcaggactggtatttgcaccgctgttttatccagacagcgatccttttataggtcttatagccgcctttgctacctttggcgttggttttttgacccgtcctttaggtggtatcgtctttggccattttggcgataaaattgggcgaaaaataacacttatctggacactggctattgtcggttgctccacatttttgattggttttattccgacgtatcaggaaattgggatctgggcaccgctcatattaatggcgctgcgtttaattcagggctttggtcttggtggcgagtatggcggagcggcattgatgaccatagaatcagcgcccgaatcccgacgcggatttttaggttcactcccgcaaacggctgcgtctgtgggtattatgctggcaaccggtatttttgctctctgtaaccattttcttacttcggagcagtttctctcctggggatggcgcattccgttttggctttctgcggtgatgttgatcgttgggctgtttatccgcctgcataccgaagaaacgctggattttcaaaagcaaaaaacgacgaataataaagaaaagtccgttcctccgttgattgaattattcaaaaaacatccacgaaatattttattggcactgggtgcgaggctggcggaaagtgtctcctctaatattattaacgcctttggtattgtctatatttccagccaattagcattgtcgcgagatattcccctgacgggtatgttgattgcctcggcgatcggtattttcagttgtccattggttggatggttatcagatcgtataggtcaaaaaagtctgtatttgtcgggagcaggattttgtgtcctgttcgcgtttcctttcttcttattactggatagcaaaagtacgctcatcatctggtgcagtatgatcctcggctacaacttaggtccgacgatgatgtttgccgtgcagccaacacttttcacccgcatgttcggtaccaaagtacgatataccggcctttcttttgcttatcaattttccgcgattcttggcggactaagcccccttatcgcctcaagtttgctggcgctagggggaggaaaaccgtggtatgtcgctctgtttttatttgctgtctcatttctttcctttgtttgcgtctggctgattgagccgaccgatgaacaagaaaccgcttcttaccgctacatcagggaacaatctcatgaaaactgaacgaaaaaacgagcattacctggcgctacaacaggcgtttgacgcgccatggcctgggcctgtaggagagttagtgacgctggaaaaaggcaatattcacctgcagatttatccgcatgatggtgccaggataacctcgttaaaggcatttggttctgaagtattacgccaatggcagccgcagcgcagagcttttcagtatggctgtttcccaatggtgccgtgggcagggcgactggggaatgcgacgctgaatgctggtgggcaatgttattctttacccgccaataaaccaccacatgcgttgcatggtatggcttgttactcaacgtgggaaatcatcgacaaaacagcagattccctgactttacgtatgcccctggcttcaccgtggccctggcaaggggaagtgattcagacttttttgctggagaacgatgcgctggttttgcaactggaagtccattcatatgccgatacattcccggcctccgcaggctggcatccgtggtttgcgaaaaagctgactccgcaaaatacagaatcgttgcaggtgctttttgatgcggactggcaagaagaagcgggtagtgatgaactgccaactggaaatcgtatctctcctcaagccggtccctgggatgactgttttggtttttatgacggggtgaaggttaagttactgtggcctggtaaactcgcgatgaccatgatctcttctgcaaacagtctggtggtatttgataaacagcccgatgccacctgtattaacccgctgactcaggcacctaacgcaataaatctaacgccggaattggtgacaccagataggccgctggtcatcgaaactcgttggcaatttacacctgaatcttaaccattcatctattgcgaaaaagccagtgaaattactctgctttttcgcaatcagcatcacaagattacccttattgccacatagccaaacccatcctttcccgctacagttaatttcttgtggcgcgaaaggaggcaaaaatgctctatatctttgatttaggtaatgtgattgtcgatatcgactttaaccgtgtgctgggagcctggagcgatttaacgcgtattccgctggcatcgcttaagaagagttttcatatgggggaggcgtttcatcagcatgagcgtggggaaattagcgacgaagcgttcgcagaggcgctgtgtcatgagatggctctaccgctaagctacgagcagttctctcacggctggcaggcggtgtttgttgcgctgcgcccggaagtgatcgccatcatgcataaactgcgtgagcaggggcatcgcgtggtggtgctttccaataccaaccgcctgcataccaccttctggccggaagaatacccggaaattcgtgatgctgctgaccatatctatctgtcgcaagatctggggatgcgcaaacctgaagcacgaatttaccagcatgttttgcaggcggaaggtttttcacccagcgatacggtctttttcgacgataacgccgataatatagaaggagccaatcagctgggcattaccagtattctggtgaaagataaaaccaccatcccggactatttcgcgaaggtgttatgctaaaaaccattcaggacaaagccaggcaccgtactcgtccactatgggcctggctaaaactactctggcaacgtattgatgaggacaacatgacaaccctggcaggtaaccttgcctatgtgtctttgctctcattagtgccgctggttgccgttgtttttgcgcttttcgccgcttttcccatgttttccgacgtcagcattcagttgcgtcactttatttttgccaactttctgcctgctactggcgatgttattcagcggtatatcgaacaatttgttgccaattccaacaagatgaccgccgttggcgcgtgcgggctgatcgtcaccgcattattgttgatgtactccatcgatagcgcgttgaataccatctggcgcagtaaacgagcgcgaccaaaaatttactcgtttgccgtgtactggatgattttaacgctggggccgctgctggcaggggccagtctggcgatcagttcctatttgctctccctgcgctgggcgagcgatctcaatactgtcatcgacaacgtgctgcgtatttttccgctgctgttgtcgtggatctccttctggttgctgtacagcattgttcctaccatccgcgtacctaaccgcgacgcgattgtcggcgcgtttgtcgctgcactcctgttcgaagcaggaaagaaaggtttcgcgctttatatcaccatgttcccgtcatatcagctcatttacggcgtgctggcggtgatccccattctctttgtttgggtctactggacatggtgtatcgtcttgcttggcgcggaaattactgtcactctcggggaataccgcaaactaaaacaagcagctgaacaagaagaagacgacgaaccatgattgcattaattcaacgcgtaacccgtgccagcgtcaccgtggagggagaagtgacgggcgaaattggcgcgggacttttggtgttattgggtgtcgaaaaggatgacgacgaacagaaagcaaaccgtctgtgcgagcgtgtgctcggctaccgcatctttagcgatgccgaaggcaagatgaatctcaacgtgcaacaggcgggcggcagtgtactggtggtttcccagtttaccctcgccgcagataccgaacgagggatgcgcccaagtttctccaaaggcgcatcaccggatcgcgcagaggcgttatatgactatttcgtcgaacgctgccgccagcaagagatgaacacgcaaacaggacgcttcgctgccgatatgcaggtatcgctggtcaatgatggccccgtgacattctggttgcaggtatgagccagcttccagggttgtcacgggaaacaagagagagtatcgctatgtatcaccttcgggttccacaaacagaagaagaattagagcgttactatcagtttcgctgggaaatgttgcgtaagcccctgcatcaaccaaaaggttcggaacgcgacgcgtgggatgcgatggcgcatcaccagatggtcgtcgacgagcagggtaatctggtggcggtaggccgactgtatattaatgccgacaatgaagcgtccattcgctttatggccgttcacccggacgtgcaggacaaagggttaggaacgctgatggcgatgaccctggagtcggtggcgcgtcaggaaggcgttaagcgcgtgacctgtagcgcccgtgaagacgcggtggagtttttcgccaagctggggtttgttaatcagggagaaatcaccacgccaaccaccacgccgattcgccattttttgatgattaagcccgtcgccactctggatgatattttgcatcgcggcgactggtgcgcgcagctgcaacaggcgtggtacgaacatatcccgcttagtgaaaaaatgggcgtgcgtattcaacaatataccgggcaaaaatttatcaccaccatgccggaaaccggcaatcagaatccgcaccatacgctgtttgccgggagtttattctcgctggcgacgctcaccggttgggggcttatctggctgatgctgcgcgaacgccatctcggcggaacgattattctggcggatgcgcatatccgctacagcaagccgattagcggtaaacctcatgcggtagccgaccttggtgccttaagcggcgatctcgaccgtctggcgcgcggacgaaaagcacgggtgcagatgcaagttgaaatctttggcgacgagacgccgggtgcagtgtttgaaggcacgtatatcgttctgcccgcgaagccatttggcccgtatgaagagggcgggaacgaagaagagtaggggcgttttacttgactgaaaaggttttcaatctgaaaaccttttcagggcccaggtccgaagttaccttcccgctctccaggcaacatcccgtagtgccgatcgcgcggcctcgctgataccacctaactgaaaaaatccgtggataacgccaaggtagcgttggcaggtgcattgcactccttgccctgtcatgcggtgatacaacgcttcaccttcatcgcaaagtgggtcgtattcagcggtaatgatatgtacaggtggcaagccattgaaatcatcgcgccaaagagggctggcttcaggatgcctgcgttcaatgcctggcagatacatctcaaagccgctcagtaaagtgtcgcgtgtgatgatgtaatcgtgaccattgcgtatgtagctttcgaaatgcgcagtcgcatcaagcataggataaattaagatgagttgtgccggttgccactcgccagcacgctttaatcgcaaagcagttaccagcgccagatgtccgcccgcactgtcaccggcaagagttatacgttgtttatcaacgccgagtcgttcggcgtgttgccagactatttctgcacctcgttgcgcatcatcatgggcggcggggaaagtatgttccggtgccagccgatactggacggcaataacccgacattgcccgtaataggctaactggcgcagctggttgtcgtgagttgcgaacccgccgctaacaaaacagccaccgtagtaataaattatcgtcgggagtaatgtcggggcattcagcggcgacactattcgtaaggccatcccttcaagttcgatagtctgaatatctaccgcgtttctgtctcacccgcaaggacagcgctggcgatatagccctccctgcgctgcgcaatactttgttgacgcgatgaggggcgacccgcagcgataaacttttcgactaactctgcaattcctttttccagtgccatagtagaacttattttgctgtatgaatgtacagtcttatacacccgtttttgctggatggatacagggaaattcacgggcgtgaaaaatctggaaagcgcctcgcaaatctaaagacaaacccggcagagacgtggttttgctggagcactatcagtaagctagtggtttcaagggtacgtcaatgacgtacaaaaaggattgttactctaagccaatggcgtataattatgctcttcatcgaaacggaaatttttactgaagatgttcaaaaactgctgaccgacgatgaattcagtcgttttcagtttttcctggccttgaatcctgactatggtgaggtaatacctgaaactggtgggttaagaaaggttcgatgggtgtcaggaggaaaggggaaacgtgctggtgtcagggttatttactttcatcaggttaaacattatgagatcagattactgcttatttatcgtaagggtattaaagatgatctgtctccccaggaaaaagcaatgctccggttgttaaatacgaggtggtaaatggataaggcactttttgagcggttgactcacagcatggcccagatgaatgaaattattgaaggaacgcgacagccttcgcggacttttgaagttgatgctatgaaaatcaaagaaatacgccgcgcttcagggttgtcacaatctaaatttgccgatcttatttctgtcagcgtagacacgttgcgtaactgggagcaggggcgacgttcaccgaccgggcctgcaaaggctttgctgcgagcgattgccaatgatccgcaacatgtgctgcaagcacttaaccgttagaggcatggttatgccatacagaaagcactagcattcagaactcctgtgaaagcggcatagtggtcgcctgcccaggagttttgctatgacccgtaatcgtgctgaacgtcgccaccctatgatgcgattaaaaaactcatcgtcgtgctgatgattgacgtcaatgctatcggatgataccggggggttccggaaggaattccttgtttcccgaactgttaccaacaaaattataacgatgagcaagtaaagaccggttggtggcagtactgaccggtctgtgatggatgattaatttcaccttaaatcctggtgctgttaggatgctgacgtttttcggctacaccattcagattatgcaaataaatatctctgaatataatatattcatagcatccataactcatcctgggcgataactaaaccatttttgagtaataaatgaaacaactgcaacactcttattatttctggaaaacacctcgcaaaaacaaaacaacatgcaaaaatccgctttttttaaatgattttccggcgtaattttcgcacatacattaatgagtaatatatgtaaggtggtggtaatggcgatgaatacggtttttcttcatttatcagaagaggcaattaaacggctgaacaagcttcggggctggcgtaaggtttcacgatctgcaattttacgcgaagcggttgagcaatatctggagcggcagcaatttccggtgcgtaaagcaaagagaggcaggcaaaggggtgagacagtaggtgtttatgatcagtgtaaggatcataaggaatgacaaaaatttttttattcttgaatataaaaaaccagatgcccttattctggtattaatacaaggttgttttacttgaacttataataactgcaactgttacatcatatctggaaaacgcctcgcaaaataaaaatgattcgtaaatgagctttctttaaagattcgacaagggtacttttctctccatagattcaaaaatgatattggcgagatatttatgaactctctggtaggtatagatatgggcagaattttactcgatttatcgaatgaggtgattaagcaacttgatgatctcgaggtgcagcgtaatcttcctcgtgcggacctattaagggaagcggtagatcaatacctgataaatcaatcgcaaacagcaagaaccagtgttcctggcatctggcaagggtgtgaggaagatggtgtcgaatatcagcgtaagctgcgcgaggaatggtaatgggaaaaaatgatgtcaatcagattgctgacaacgtgcgcgttgttcatgccggatgcggcgtgaacgccttatccggcctacaaagtcatgcaaattcaatatattgaagtttattggtagggctgataagcgcagcgcatcaggcaatcatacgcttgtcatcagtgacatacccataaccttatcgatgtgttggagggaagaacgaggcaaacagacaattgcggcatgatcttgaatgggtaacgcggaatacgagagatggtgtcgtcacaccctatgagctgtaatccgggcgaccagcgccacccggaaaacgtcagagattactccccttcacccggaaacaggaacgggttgatggaactgcgggcatagccttcttgctccattcgcgcgtccagtaccagagaagcgaggtcatctgccacggcttcaactttcggttctttttcctgataaagaatcttcaggtaagtgccacagtcatcgcagctttcggctttaatcgcggcctgttcgtcatccagcgaccagtaatgcagtttgccgctctgctcgcagttgctgcattttacgcgcactacgtgccattcggtttcacacaggttgcagtgcaggtaacgcagaccctgagtggtgccaatttgcaccatgctggacaccggcatagaaccacaaaccgggcaatattgacgttgctcgccgtattcagcgcgggctttgccggggatcagattggccatctgcgcccagtagagcgacagtgcagcccagataaacggcgctttatcgctgctgacggatgagaaatcagaggcaaacagtgcgctggccatatcttccagctcctgagttgatgccttctccagattctcaatcactgccagcgccgggccgctcatttcaggtttcagctcagcaatcagcgccatcagcagcttttgccagtgcttatcacgcggcagaacgtgaatatccagcgggggcttgccctgtgcgctggcttctttaatgcgcgcggtcagatccatctccagcggatggtcgtacagcaccacttcctgggcgtgggcgataagcgcagcaaagcgcaggtaatcacccagcggattattttctgccagctcgcgcagacgctcggcgcggcggttgtataaattcttgagccgagggaacaataacggcggaatcatatccgccgtacgtttctcgctcgaacccagctcatcttgcgggattatgcgaatactcattcagctttcttttccgttgtcttgcggacctcacggtaccagcgcgggtgatgtttcttcgcccaggcgctggtaacccatccttccaccatggcggtaatcgtgcctttcacccaaagggcggcgtagatatgcaccatgataaccacaattaacgccactgcggcaaatgaatgcagcattaacgcgaatcggatcaccgggattgagaaagcaggcgcaaaataaggacgccagataatcacgccgctcaccagcagcagaaccaggaaaataatcgccgcccagaaaacgcatttctgaccgaagttataacgcccggtgtcacctacttcctcgttgacgacgatcttacgaatattcttcgcccaaaagatatcatcccgattgattaggttgtgatgccagtaacggaaaaacatgatgatgaacgaggcaaacataaccacgccgacaaacgggtgcagaattcgcgccagctgcggtgtgcccatgatttgcatcaaccagttgaaggacgggaacaaaaagcccagcccgctcaccgccgccaggatgaagcagaaggcggtgatccagtggttgatacgttccggcgcggtgtagcgcacgatggtgtcacgtcgtttcatttgcgctcctcgtctttctcttcgtgcagattattctcttcctcatccgcacggttcggaccgacacccacgtagtggaagatactggccgcaaaggtagccgcaaagccaacagccgcgagcggtttccagatgcctttccagaatttcacggtttcgctgatttccgggttctccggcaagccatgatacagatttggcttgtcagcatggtgcagcacgtacatgacgtgtgtaccaccgacgcctgccggatcgtacagacccgcattgtcgtaaccgcgggttttcagctcagcaacgcgctcgctcgccagcgttttcatcgactctttcgtaccgaagtgaatcgcgcccgttgggcaggtcttcacgcaggctggttcttgcccaaccaccacgcggtcaacgcacagcgtacatttgtagacgcggttgtcttccgggttgaggcgcggaatgtcgaacggacagcccgcaatgcaataaccgcagccaatgcactgctcggactggaagtcgacgataccgttggcatactgaataattgcaccttccgccgggcacgctttcaggcagcctggatcggaacagtgcatacagccgtctttgcggatcagccattccagtttgtcgttctgctccacttccgagaagcgcattaccgtccacgatttggcgcttaaatcattggggttgtcgtacaccccaatgttattgccgacggtatcgcgaatgtcgttccactctgaacacgccacctgacaggctttacagccgatacaggtggtgacgtcgatgagtttcgccacttcttcctggaagtcccgcgcctgaggcgcgggggtcagaccgttagtcgcggaacgacgaatgatatcttgagattgataagccatatgtcgtctccgttacaccttttccacattcacaaggaaggacttaaactccggcgtctgcgtgttcgcatcaccaacgaatggcgttaacgtattggcaataaagccttttttagctacgccttcataaccccagtgaatcggaataccgatggtatcgatatctttgccgttcgctttcagcgtacgaatacgtttggtcaccaccgctttggctttgatatagccacggttggaggagactttcacggtatcgccctgggcaatgccaagtttattcgccagcgactccccgatttccacaaactgctctggttgcaaaatcgcgttcaacagcgcgtgtttggtccagtagtggaagtgctcggtcagacgataggtggttccgacatacgggaacttatcggctttacccaatgcttcggcgtcgtctttaaagatacgtgcagccgggttcgagataacgtttggatgcagcgggttagttcccagcggcgtttcaaacggctcgtagtgttccgggaacggaccttccgccatcttatcgagggcaaacagacgccccatgccttcctgctgcatgataaacggcccgacgccgctacccggaggcgctgcgctgtagtccggaatatcccagccggtccacttagtgccgtcccatttcagcaactgacgcttcggatcccacgggttaccctgcggatctgcggaggcgcggttatacagaatgcggcggttaagcggccatgcccatgcccagcccagcgtgttaccgaggccagacggatcggcgttatcacgacgcgccatctggttgccttccggcgtccagctaccggcgaaaatccagcagccacaggaggttgtaccgtcatcgcgcaattgggcgaacgagctaagttgttggcctttcttgacgataaccgcaccggttgccggatcggtaatatcggccagcgccttaccgttgctctccatcgctacttcttccgacttcggctcatgcggaatggcgtagttccaggtcatgttcagcacctggtccgggttcgcgccaccctgttcggcatacatcttgcgcaagcgcaggaagataccggagaggatctcgccatcagtcagcgcaatccccggggcgtccgcacctttccagtgccactgcaaccagcgacctgagttaacgattgaaccgttctcttctgcgaagcaggtcgatggcagacggaacacttcggtctggatcttcgacgagtcaacttcgttcagctcaccgtggttctgccagaagttagaggtttcagtgttcagtgggtcgatggtgacgaggaacttcagtttcgacagacaaccgatcactttgtttttgttcgggaatgaggcaacagggttaaagccctggcagatatagccattgaccttgccctctttcatcatctcgaagtactgcaggacgtcgtagcctttatcccacttcggcaaccagtcaaagccccagctattttccgccgtcgctttatcaccaaagaaggccttcatcatagagacgaagaatttcgggtagttgccccagtagtttacctggccttccagcagcggttttggcgtgttggcggtaaggtaggtttgcagatcggtctgcttctcgcttggcagcgtcatgtaacctggcagactctgcgacagtagccccaggtccgtcagcccctgaatattggagtgaccgcgcagggcgttaacgccgccgccggccatccccatattgccgagcagcagctggatcatcgccatcgtacgaatgttttgcgcaccaacggagtgttgcgtccagccgagggcatacaggaacgaggcagttttatcgtgagcactggtttctgcgatgtattcgcagactttcaggaacgcgtcttttggcgtaccacagatgttttcaaccacatctggcgtgtagcgggaaacgtgctgtttcagcaagttccacacgcagcgcggatgttgcagcgtggtatcgcgtttggcgaagccgttttcgtccagttcataagtccaggaggatttatcgtacttgcgtttttccgcgtcgtagccggtgaacaggccatcttcaaagccgtaatcctcacgcactatcaggctggcgttggtataggcttcggtgtattcgcggttgaatttttcattgttcagcaggtacagcaatacgcctgacaggaaagcaatgtcagtaccggaacgaataggggcatagtagtcagctaccgccgccgtacgcgtaaagcgaggatcgatcacaatcagcttcgcgccgttgtgaattttggcttccatcgcccagcggaacccgaccgggtgagcttcagcggcgttaccgcccatcaccacgacgaggttggcgttcttgatgtcgacccagtggttggtcatcgcaccgcgaccaaatgttggagcaagacttgctaccgttggtccgtgtcagacacgcgcctggttgtcgaccgcgagcatacccagcgcgcgggagaatttttgcgttaaatagccggtttcgttactcgacgcggaagcacacagcatcccggtggagagccagcggttaacagtcacgccttcggcgttttgcgcaatgtagttagcatcgcggtcttctttcatcagtttggcgatgcgatcaaacgcctcttcccaactgatttgctgccatttatcagaacctggcgcacggtattccggaaacttcagacggctttcggagtggatgaaatccaccaggccagcgcctttcggacaaagtgcaccgcggttgaccggggtgatccggatcgccttcgatatggaagatagatgctttggcgttttttgctccgtcaccgaggctgtacatcaacagcccacagcctacggaacaataggtgcaggtattacgggtttcgcgggtgcgcagcagtttatactgccgggtttccgcgagcgctacgctgggtgcaaaacccagtgccgctgccgtggtgcctgccataccgccagcgcagatcttaaagaactgccttctgctgacctgcatggattgctccttgtttcgacattgtcacgtcccatttacattcgcttgctgcgtgtgcagggagtgggagttatttttctttgcggaaggggccgcaaaggtccagaattggctcaatttccctccatccaggaagggtttgtaacagaataccataatgttggtgtgtgtgttcttatctggttaagagaaagtgaaaaaaacacagcaaaaagaaatcgaaaatgtgacaaatatcacaggtgttcgtcaaattgagttatggcggcgtgatgatttacaacacccacggttagatgaggtcgcggaagaagttcccgttgcgctggtctacaacggcatttcgcatgtggtgatgatggcgtcgcccaaagaccttgagtactttgcgctcggtttttcgctttccgaggggataatagaaagtccgcgcgatatcttcggcatggatgtcgttccttcctgtaatggtcttgaagtacaaattgagctttccagccgccgctttatggggttgaaggagcgccgccgggcgctggcgggacgtacgggctgtggcgtatgcggcgtggagcaacttaatgacatcggaaaaccggtgcagccgctaccgttcacccagacgtttgatctcaacaaactggatgatgcattacgtcatctcaacgattttcagccagtggggcaactgactggttgtactcacgccgctgcctggatgttgccatctggcgaactggtcggcgggcatgaagacgtgggtcgccatgtggcgctggacaaactgttaggccgccggtcacaagaaggggaaagctggcagcaaggtgcggtactggtttccagtcgtgccagttatgaaatggtgcaaaagtcggcgatgtgcggcgtagagattttgtttgcggtgtctgccgcgaccacgcttgctgtagaagtggctgagcgttgtaatctgacgctggtgggtttttgtaagccgggtcgggcaacggtttatacccatccgcagcgtttgagcaattaattaaaataagtcctgcgatatatattaaattgcaggacttattcatttcgtgaattttattattttatttataaataaaacgcgtgtagtggcgttttcttttttcatttattatgttcactctcttatctatatatttataaggcaattaaatgaaaaggaatttattatcttccgctattatagtcgccatcatggccctcggtctgacgggttgtgatgataaaaaagccgaaacagaaacgccccgcctgccaatagtcaacctgccgcaccagctcctgaagctcccgttgcaaaagcagaagctaaacctgaaacacctgcgcaaccggtggtcgatgaacaagcggttttcgacgaaaaaatggatgtctatatcaagtgctataacaagttacagatccctgtacagagcagtctggcgcgttatgctgactggctgaaagattttaaacaggggcctaccggtgaagagcgtactgtttatggcatctacggcattagtgaatccaacctcgctgagtgtgaaaaaggcgtaaaaagtgctgtggcgttaacgcctgcgctgcaacctattgatggcgtggcggtgagttatatcgatgctgccgtggcgttgggtaataccattaacgaaatggataaatattacacccaggaaaattataaagacgatgcgtttgcgaaagggaaaacgctgcaccagacattcttaaaaaatctggaagcctttgaagctgtagcagaatcttatcatgcggcgattcaggaaattaacgataagcgccagcttgcggaactgaaaaatattgaagaaagagaagggaaaacattccactattactctctggcagtcatgatttcagcgaaacaaattaataacctgatatcgcaagataagtttgatgcagaagcggcaatgaagaaagtgtctgaactggaaacgctggtggcgcaggccaaagaagcggataaaggcggcatgaatttctcgtttattaattcggcaggccagtatcaactcgaggctaaaaaatacgttcgccgcgtcagaaataaagtcccgtactctgactgggataaagagcaactgcaggacgcaaactcaagctggatggtcgacgactctttcccgagagcattacgcgagtacaacgaaatggttgatgactataatagcctgcgttaaacgtttttgatgataaatgcagtgtcggatgcggcgcatccgacacagttcaccccttgtgaagtaactccataaatgcctcatatcctgttaacccggcaataacctctgccggatgctgacacaatacgcttgccagatagctaaatatttttagctcatgacgcgcatcggcggcggcgcaggcgatcaagacatggttaatgacttcgttattcacctcaactggttgggcgagggtaataaaaaatccacgaaaacgtcgctcctgttcgctccagcaatgtgggatggcgaggcgattaacaatcaggttttcaccttcgccttcgcgggcgatgatgcgttgtgcttcatcggcggtaatatggtgttgtgccactaattgcgcacaaatttgccgggtaatatgttgccagctttcaccgcgtacattcgaataatgaaaacttccgggggcagagaaaaaacgctccggctgttggcgaataaatgccgtcgccagaaaatgttttatttgttcgataccggcagccgtaatgatattttttacggtgatgtaattatttaccgcgtcatccagtaaataatggctgttgttaatgatcaataacggctcaatctcttcgcgaatggcaacaagttcgcttaagctacgggcaataatcacccgacaatgtaaaacatcgcgctcaatggcgagctgattaatagtggcaatcgcgttctggtccgagagcaaaatgatcggctggcgttcgttttgatgccgttccagcgcacaggcaaaatacaaaccgatcagatcgctgtcgaaaaggggaatatcgagctgttcacgcagtagcgtaataaagtgcagactcatatcaaaggccgcaggccaggcggctttcaggttattcatgctgctttggcggtgctcagcaatccacaccggtgcggcaaggcaacgtaataaatgcccggtaatgttctcaaccagctgcgtatcaataatattcaatgacgcgatgcccggcaccctttgcagcaaccgctgcacattatcggcagaaattatctgcgcttgctgatgctgtttctctatcaaacccgtcagggttcttacagcgttataaccaagaaacagaccgctatgttcaacgatttgttttatctcgtcaccgggatattgcggccactcatcggtcagttgattacgcagggcgtaaatcgccagaatcaggctggagagataatcaccctgcatgagcggccagcggtgttggttgtcgcaggccgtggataaatgctgaaggttgtctcgtgttatgcccgccagcggaattaaaaacggatctttgcgcagcaagttcgccagcaagataacgcgtttctcttctgtctcatcaatgaaatggcccaaaccagggcggctggccaggcaacaagtgcgttcataacgctgttttaaccggggcagacgctctgctacccacgtttctggcaaattaagcgccgaggcgagttgcgcacggggagtgaaagtattcagtaataacagcgccagcagccgatcgtcgttatcgtgcttttgcagcaactgaaaaaagctgcggcgctcgaagatttccagctgatagcccgcactaccactggcgaaaatgcgggctttgccgttaagggtgaagttgagatagtcaatatcacgcaggatggtcctgcctgaaacgccagtctgttgcgccagctctccaggcgtgcgcggctgttgctccagcagatcgacaatctttaactggcgttcgtttagcattaatccacctgacggaactggctaaacgcgttgactttctccgcagttaaggtcgtcagaaaatcccgtatcagcgtgagcagagcatcgtaatcggcttttgaaatcatgccgctgttagcgtgcagataacgggttggcagacacagcgcgacaaccggacgcccgccgcccatcacgttgtagcgcccgccatccgtcgctccggttttcatggtggaaaattgcagcggtaaatcgttatgtgcggcacagttttttaacactgctaccagtttctggttggggaagtagcgcttgtcaaacagcatcagccccggcccctggcccagtttcagcgggtatttaatgttatcaatgcccggaacatcacctgcgacagcggtatccagcacaatcaccacatccggtttaatgtgttccgccgaggtttgtgccccgcgtagcccaacttcttcttccacactgccaacgccgtacagcgtaatttctgggttatttactgtctgtagtagctccgccatcatcgcgcagccgatgcggttatccagcgcctttccgacaaatttatcttcgccccagcaggcaaaattggcttccgggctaataaaatcgccaatttcaacgccgcgcttttccgcttcttcgcgactgttcgcgccaatatcaatgaacatctcatcaaatgacagcggttgttgcttttgcttttccgttaacgcatgaggcgcgacggaaccaatcacaccagggattttaaatcccttgtgtgtgcgtatggttacccggtggttgagcatcgactgattccaccagccgccaatggtggtgaagcgcagaaaaccgctctcgtcgatgtgggtgaccataaagccgacttcatccatatgcccgacaatggcaacttttggacctttattccccttacgggcaacaaagctgcccagaccatcaaaggtgatttcattaacgcaaggttccagcgtgtttatcaggatgtcgcgaacttcctgttcatcgccgctgacggcgctggcttcgcacaactgttgcagtaactcaatgttcatggacaagctcctgttgcgcggctttcgctttgcggcgtaaccacaatcctttcaggacgataatgaatgaaatgtttagcgcgaggccaatcgccagcaccagataaaacgaacctaccggcgacatcaggccgatcagcgggtcaaagatacccaaaccaggtgccagacgtttgattccgaaagcgatcaccagcacgccggtaataccgcccgccagcgtattggcggtaatcatcggtaacggagctgccagagcgtaaggaatagcaggttcggttgcgactgtggcaccgaccacaatggcactactggcagcctctttttcctgtcgggtaaacagtttgggcgcaatgaacgtcgcaagacccgccgcgacgggcggcatcagcgcgacaacgccgacgatggcgtaccagtcataaatgtgtttttccagcagtgagaagcagaagaaccaggcggttttattgatggggccgcccatatcgaacgccagcatcgcaccgaccagaaacgctgccgcaaatttcattgatggaggaatggtgttcaggaagtgcagcaacccgcccatgaggtcggacattaccggtccgataacgtagtaagtgagcacgccgaaaaccagcagagtaacgaacgggatcagcattgaaccgagcagcggttgtaatgcttttccaaggcgcactttacggaaccagaagacgaaatagccaatcgccagccccagcaccaccgcgccgaggaatcccgcacctgactgggtgccgagcagggctttgtcattcgccagatagcaaaccagaaacgccggagcgaaagcgggtttatcggcaatcgacgaggcaatataagcgcccatgatggggatcataaaggtgaagccgagataaccgatggattcaaccacccaggtaaacgacggcgcgcctttcgacatatcggtatacggcaggccgaactgtaccagcatgttggcaagcgccaccaggataccgccaccgataacaaacggcagcgccgcagagacgcccgccatcaggtggctcattacgctgccgctttgtacttcctgtttgccgagcttcacgccgctatctgcggcaaaaagctgcgagtttgttggtaattcactgaaaatctggtcgatatttttcaacgcctgggagatggcaatctcataaaccttcttcccggcaaaccgcgcccggtcatcgccgctcaggccacgcccggtagcgagaatgacgtaatcggcagcggcaatctcttcgctggataagcggttttcaacgccactggacccttgagtttccacttttatggtatggccgagagaacgggctttctgttccagggcttccgccaccatgtaggtgtgagcgatcccggcggggcagttggtgatcgcgacaatacgtaaggatgactccatcgccacttccttatgagctgagggtttgatttaacaaggcaaacacctggtcggcgtcgcctcgtcgcagttggtgaataaaatcctggtggataattttgcgacacagtgtaccgatgattttgacctgatcctcttcgccgctttgcggcacgccgaggcagatccagcaattgacgtcttcgccatcgctggctttccagtcaatagcctgcgctttgcgggcgaataacacgaacggttgtttaacgcaggcgcttttaccgtgcggcacggcgatgccggaaccaaatccagtagagtgcattttttcgcgcagcagcagggtttgcaggaactggtgtgagtcggtgataaaaccgttttgtaacgccattgtcgccaactgcttcagaatggaataagcgccattgccctgaatattcaggtcaatacagcttgcagtaagagctgccattaatcggactccatgaaatatattttaatcaattgtaatggtggagcgattaagtgatgagaggcgatatgtcggtaaacaatgacaatttgagacagagtgaaaggtcagatttgcggagtaatgcacataatggttatttaaataaaccacatgaatcattaatgagttattcattatttttgtgatttactcacaatgcatcggggaaatataagttaccgggatatattaactgaaggtgtaatatgtttatttttcaaatcgaaattaaaaatattgtgccggaggcgtctccggcacattaggcaattacggcaggtaaaacacttcttgcagttcgctactcaccgggctgttatccgggttcgcgggcatgacgtcggtcatatatttccaccaacgttggcaaacatcagtactggcaaccgcattccagcgctcttcagattcaatctctaccgtggcaaacagcagattacgcgctttgtcgaggtaaatggcgtagttatgcgcaccgtgagatttcaacactgcttccagttccggccagatggggttatgccgacgctgatactcttcgtgagcgtcggggttaacctgcatgacaaaggctttgcggatcatgtttgctccttacagcgccagcgcactggctagtggtgtaacgccgaagcgcttgccgagcgctatcaactcttcacggctgatggtctgtttcatgccgcccatcgaataaaccttcactaatacttgtgctgatttttctgcggtgtcgattaaaccgaatgtttcatccaacgtcgacccgctgccgaagacgccgtggaagggccacaacaccagcgaatgtttttgcatctcttgtgcggtcgcctggccgatttcgtccgtgccgggcaccatccacggcagaatgccaacgccatccgggaataccaccagacactcggtgctgccttcccacagttggcgagtaaagaccgcggtgtcgttttccagtacataggtgagggcgatcaggttggtggcgtggcagtgcatgatcacccgatctttaccgttggtggctttaatgcgctcgcagtgggagagaaagtgagccggaagttcagaagttggaacggcttcgttggttaacccccagagaatatggtagcccgcgccgtcgctgtcgacttttacgacgcctaagttagctgcaggatcaagctggacgttacggaagaatttgccggagccggtgacaataaacggtgtatttgccagtaaaggcatgggctggctgagcgggatatagcgcggttgtgcatggaagttgtctttataaggcgcgatatcggcgtcatccaggcgcagcgtcaggttgccgccgttgcgctcgtcccagcctttcagccaggcatcggtggtggctttgatcattccctggacaaaccaggactgggtaatgttttgcatgttctgtgttcctgtaaattaggttgccttgtttagacatggtgcggcttgttcccctcaccctaaccctctccccgtaggggcgaggggactgtccggagcagtgttcagctccgttgccgcacgaggctatgtttttctccctcgccctttcagggagagggccggggtgagggtgacagcccgcatggacattcgacccgtaggccggataaggcgctcgtgccgcatccggcagtgtttacccacgctggctcaaaatcgctttctcataagcccgcacgctctccagccattcgctacccgttggggtatcgtgacgttggcaatacatttcccagaccgcctgccacggcaacgatttctgctcttccagcagtgccagacgcgcagtgtaatcgcccgccgcttccaacttgcgcagctcggcggtaggttccagcaacgcacgcagcagggcttttttcatattgcgtgtaccaatgacccacgcggcaatgcggttgatagaggcatcgaagaagtcaaggccgatatgcacccggtcaaacagatcgtgacgcacaatctcactggcaattgcctgggtttcatcatccagcagcactacgtgatcgctgtcccagcgaaccggacggctgacgtgcagcagcaactgcggcacatacagcatggcggcggaaatcttgtcggaaatcacttcagtcgggtggaagtgcccggcgtccaggcacagcgcagtctggcggctggtggcataccccatgtaaaactcattggagccaaccgtgtagctctctgcgccaatgccaaacaatttgctctcaacggcgtcgatatggtgcgcagggtttagcttctcgctgatcacctcatccagtgctgccagcagacgctgacgcggggcgagacggtcaacggtgatatctttcataccatccgggatccagatgttcatcaccgatggtgtgccgagttgctcgccaaaataggccgaaacgcgacggctggctttgcagtgatcaatccagaactggcgaatgctgtcgtcggcatgggaaagcgtaaagccatcggcgcttagcggatgcgaaaagcaggaggggttaaaatccagaccgagctgattggctttcgcccattcaacccagtttttgaagtgctctggtttgatctgatcgcgcgagactggcgtatctgattccagatagatggcatgtaaattaagccgtttcggccccggaatcagccgcatagcctgttccagatcggtacgtagctcactggcattacgcgctttgcccggataattaccagtagcttgaatcccaccggtcagcgaaccttccgggttttcaaaaccggaaacatcatcgccttgccagcagtgcattgaaacgggtaaacgatcaagttggcgcagcgcctcctcgacatcaatccccaccgccgcgaaacgctgtttcgccagctcccaggcctgttccagttgagtggtcatgcgcaaagctcctttgtctgtcgtgtagagtgaatctgcgccacatagtgggcaatttcactgtcaggattaggggtaaaggtggtcagattcgcggtggtgctgacgacctgacggaaatcatccacattgttgagttcatccagcgtcattaactggatgccgatattgccgagcgttgaggcttcaacaggctcggcgatcacccgaataccgcaggcatcggcgcatagctggttgagcagcgtgttctggcagccgccgccgacaatatgcagttgcgagaaatcttcaccgcgcagctgcgccagctcatgcaacacatcggcatacagcagcgccagactgtcgaaaatacagcgcgccagttcagcatcactttccgggatcggttgcgccgtttcccgacacgcagcctgaatttcgctgcacatcgcttcaggattaataaagcgatcgtcattgggattgatgatgaagcgacaggccggaagtgcctgtgtcgcggcgataagcgccgggagatcgttgatttgccgttcctgaagcactcgctgaagcagccataagcccataatatttttcagcacccgatagcgaccttccgccccgccttcattggtgatgttggctgccagcgccgtgtcattggtaaatggcgtctggctttcgaagcccatcaatgaccaggtgccagaagagagataagcggcgcgtgaaccgtttaacggcgaggcgataaccgcgctggcggtatcatggctggcaacggcgaccaccggaatctcattaccctgcgggcaaatccagtgcccaatgacattacccggatgcgtcgggcgaccaaaccaggctttgttggccccgctccacgccagtagcgactcgtcccagtcgtcgctattgatattgaccagttgtgtggtggtggcattggtgtactcccagttcatcttgccggtcaggcgatagctgaagtaatccggcatcagcagagcgtgagcaatgtgtggaataagttcaggttgttgctccgtcagcgcacgcagttgataaagcgtattgaagggcagaaactggatgccgctacgttgataaatatcgcgtttgccgagttgttgctgtgcctgcgccattaggccattggagcggctatcgcgataagcaacgggcaggcccacacgctgaccctgttggtcgagcagcacaaagtccacgccccaggtatcaatcccaatgctatcgatacgaatcccttcctcgcacaccttgtttaatccaaggcgaatggcactttccaggctatccacattccaggtgacataaccgttctggctatgcagcccatttttaaaacgatggatttcgcgcagcgtcaggctgcggcattcacgctggtaacgcgccagcatcacgcgcccactggatgcgccgagatcgacggcgacacaattgcgaaaggtcataatgtgatcctgctgaatttcattacgaccagtctaaaaagcgcctgaattcgcgaccttctcgctactgacaggaaaatgggccattggcaaccagggaaagatgaacgtgatgatgttcacaaattgctgaattgtggtggtgtgatgctcaccgcatttcctgaaaattcatgctgtatcttgaaaaatcgacgttttttacgtggtttcccgtcgaaaatttaaggtaagaacctgacctcgtgattactatttcgccgtgtttacgacatcaggaggccagtatgaccgtattacatagtgtggatttttttccgtctggtaacgcgtccgtggcgatagaaccccggctcccgcaggcggattttcctgaacatcatcatgattttcatgaaattgtgattgtcgaacatggcacgggtattcatgtgtttaatgggcagccctataccatcaccggtggcacggtctgtttcgtacgcgatcatgatcggcatctgtatgaacataccgataatctgtgtctgaccaatgtgctgtatcgctcgccggatcgatttcagtttctcgccgggctgaatcagttgctgccacaagagctggatgggcagtatccgtctcactggcgcgttaaccacagcgtattgcagcaggtgcgacagctggttgcacagatggaacagcaggaaggggaaaatgatttaccctcgaccgccagtcgcgagatcttgtttatgcaattactgctcttgctgcgtaaaagcagtttgcaggagaacctggaaaacagcgcatcacgtctcaacttgcttctggcctggctggaggaccattttgccgatgaggtgaattgggatgccgtggcggatcaattttctctttcactgcgtacgctacatcggcagcttaagcagcaaacgggactgacgcctcagcgatacctgaaccgcctgcgactgatgaaagcccgacatctgctacgccacagcgaggccagcgttactgacatcgcctatcgctgtggattcagcgacagtaaccacttttcgacgctttttcgccgagagtttaactggtcaccgcgtgatattcgtcagggacgggatggttttctgcaataacgcgaatcttctcaacgtatttgtacgccatattgcgaataatcaacttcgttctctggccgaggtagccacggtggcgcatcagttaaaacttctcaaagatgattttttgccagcgaccagcaggcagtcgctgtggctgaccgttatccgcaagatgtctttgctgaacatacacatgatttttgtgagctggtgattgtctggcgcggtaatggcctgcatgtactcaacgatcgcccttatcgcattacccgtggcgatctcttttacattcatgctgacgataaacactcctacgcttccgttaacgatctggttttgcagaatattatttattgcccggagcgtctgaagctgaatcttgactggcagggggcgattccgggatttagcgccagcgcagggcaaccacactggcgcttaggtagcgtggggatggcgcaggcgcggcaggttatcggtcagcttgagcatgaaagtagtcagcatgtgccgtttgctaacgaaatggctgagttgctgttcgggcagttggtgatgttgctgaatcgccatcgttacaccagtgattcgttgccgccaacatccagcgaaacgttgctggataagctgattacccggctggcggctagcctgaaaagtccctttgcgctggataaattttgtgatgaggcatcgtgcagtgagcgcgttttgcgtcagcaatttcgccagcagactggaatgaccatcaatcaatatctgcgacaggtcagagtgtgtcatgcgcaatatcttctccagcatagccgcctgttaatcagtgatatttcgaccgaatgtggctttgaagatagtaactatttttcggtggtgtttacccgggaaaccgggatgacgcccagccagtggcgtcatctcaattcgcagaaagattaattcgccatgccgatgccgacgatgttagcggcgacaataatcaccacacaaccgaggctcaacaccgttaccggacggcgtcctgcattgttccactctttcagcaccagcccgacgataccgccgcacaatacatagaagctcatatgcagcatccaactgatgtagtcatattgcgccggaatgcgggcgtggccccaggcatagaaaaagaattgcagataccacatcaacccgcccagtgctgagagtaacacattgtgagtgatcagcggttttgccagcgagaagtcggcttttagcgacaaatccttcacttttgccagacgaataaaacagaaaccgaggttgatgatcgcgccgccgcccatgatgatgacatagcttggcagagcgacatacagtggatcgacgcctagtgcggcagcggcttcatgcatcggttttgcggcgttcatcgcaaaggacatcccggcagagaaaatgccgcacatcaccgccagcaccagcccttttttcagattgaactcttcggctttaatgcccatcttgcgctctttcaactgcccggctcgagttacaatccctacgccaatcagcgccaccagaacgccgagcaacgtcatgcgtccgccttcggtgttaatcagcacatcgaaattgccgttgataattggcgtcatcagcgtaccgacaatcaacgtaatgccaatggcgatgccaattcccatcgacatgccgagataacgcatggtcaggccatagttgatattaccgatcccccacatagcgccgaacagaaaaacaggcagcagcgtagagagactaaacgagctgtaatacgcccagaaattcggtagtaacagggcgctgatggcccacggcagaataatccacgaaacaatcccaccgactgaccacatggtttcccatgaccatttttttacttttttgaacggagcgtaaaaacaggctgcactggccgcgccgatcaaatgccaaaatatccccatcgtaatcgcgttactcatcttcttatcctcatcatttttcgtcgcttcacatctccgacgagatgagtgtaaaaatcgtgctgtcgattaacctttcgcctgttgccgccgttgtcgatttactggcaatcacggcattaagtgggtgatttgcttcacatctcgggcattttcctgcaaaaccatacccttacgaaaagtacggcattgataatcattttcaatatcatttaattaactataatgaaccaactgcttacgcggcattaacaatcggccgcccgacaatactggagatgaatatgagctataccctgccatccctgccgtatgcttacgatgccctggaaccgcacttcgataagcagaccatggaaatccaccacaccaaacaccatcagacctacgtaaacaacgccaacgcggcgctggaaagcctgccagaatttgccaacctgccggttgaagagctgatcaccaaactggaccagctgccagcagacaagaaaaccgtactgcgcaacaacgctggcggtcacgctaaccacagcctgttctggaaaggtctgaaaaaaggcaccaccctgcagggtgacctgaaagcggctatcgaacgtgacttcggctccgttgataacttcaaagcagaatttgaaaaagcggcagcttcccgctttggttccggctgggcatggctggtgctgaaaggcgataaactggcggtggtttctactgctaaccaggattctccgctgatgggtgaagctatttctggcgcttccggcttcccgattctgggcctggatgtgtgggaacatgcttactacctgaaattccagaaccgccgtccggactacattaaagagttctggaacgtggtgaactgggacgaagcagcggcacgttttgcggcgaaaaaataatcatttgccgcctgctgcaatgaggcgtataggccgcatatcagcttaaaaaatgaaccatcgccaacggcggtggttttttgtgatcaatttcaaaataaaaacaatgatccgataaaaataaaacagtgtttcaattgatgtggttttgatcacttttattgattaaatgaatgtctatcttcgtttccatcaacactgatgctccattgaggaatgacgcatcagcccttaaaaatatgccgacaggtgatggaaatgcagataaaacgctcgattgagaaaatcccgggggggatgatgctcgtcccgctattccttggcgcactgtgccacaccttctcgccgggggcggggaaatattttggatcattcaccaacgggatgattaccggtacggtgcccattctggcggtgtggtttttttgcatgggggcgtcaataaaattaagcgcgacgggaacggtattgcgtaaatccggtacgctggtggtaacaaaaattgccgtcgcgtgggtggttgcggcaattgcctcgcgcattattccggaacatggtgttgaagttggattctttgccggactttcaacgctggcgctggtggcggcgatggatatgaccaatggcggactttacgcttccatcatgcagcagtacggcacaaaagaagaagctggggcatttgtgttgatgtcgttggagtccgggccgctcatgacgatgattattctgggcactgcagggattgcctcgtttgaaccgcatgttttcgtcggcgcagtattaccgttcctggtgggctttgccctggggaaccttgaccctgaattacgagaatttttcagcaaagcggtgcaaacgctgattccattctttgccttcgcgctgggcaataccattgatttgactgtgattgcccagactggtttgctggggatcctgttgggtgtggcagtaattatcgtgaccggtattccgttgattatcgccgataaattgattggcggtggcgatggcactgccggaattgccgcttccagttccgcaggggccgcggtagcgacacctgtgctgattgcagaaatggtgcctgcgtttaaaccgatggctccggcagcaacttcgctggtagcgacggcggtcattgtgacttcgattctggtgccaattcttacctctatctggtcacgtaaagtcaaagccagagcagcgaaaatcgaaattttaggtacggtgaaataaacctgcttccttaatccccacagccggatgaactaacgttcgtccggtttgctattgagttcctgcctggatacttaccgcgaaaacagcacgcctgacataaaataaatatggtctaatggggaaatttctcgtggagagggaacagatgcgatatccggttgatgtatacacaggcaagattcaggcttatcccgaaggcaaacccagcgcaattgccaaaatccaggttgatggtgagttgatgctgacggagctggggctggaaggtgacgagcaggcggagaaaaaggttcacggcggaccagacagagcgctgtgtcattatcctcgtgagcattatctctactgggcgcgggaatttccggaacaggcggagttgtttgttgcgcctgcgtttggcgaaaatctctcaaccgacggtctcacggaaagtaatgtttatatgggcgatattttccgctggggagaggcattaattcaggtcagccagccgcgctcgccttgctataaactcaattaccattttgatatcagcgatatagcgcagttgatgcaaaacacaggtaaggtggggtggttgtatagcgtgatagcgccagggaaagtgtctgcggacgcgccgctggagttggtttcccgtgtcagcgatgtgaccgtgcaggaggctgccgccatcgcatggcatatgccgtttgatgacgatcaatatcaccgtttactctccgccgccgggttatcgaaaagctggacgcggacgatgcaaaagcgccgactgagcggcaagatcgaagatttttcccgccggttgtggggaaaataacccccggagtgtaggcctgataagacgctatcagcgtcgcatcaggcatcctgctcaaatgccggatgcggcgtaaacgccttatcctgcctacaaatgcggagtttaactccgcttatacagcggcaaccaaatcaccagccgtaaaccgcccagcgggctgtcttctgccttcacccagccacgatgctgctgaatggcggtttcaacaatcgccagccccaatcctgtaccgccagattcacgatcgcgtgcttcatcggtccgatagaacggacggaaaatctgttcgcgatcttccgggctaacgccaggaccatcgtcgtccaccgtaatggtgataccgtctttatctaccgcaaagcccacttcaatcttcgtatgggaataacgcagagcattacgaacaatgttttccagcgcactttccagtgcgttcggattgccgtacagcggccacggcccaggcgggaagttaaccgtcaacgacttgcccatctgctcggcttcgaacgccgcgttatccagcacttcactccacaactggttggctttgatggtttcgctaaccagcgcgtttttttgctgattacgggacatcaccaacagatcgttgatcatgctgtccagacgttgcgcttcggtttcaatacgctccagttccttgctttcaccactacgacggcgcagtaacgccgtacccagttgcagacgcgtcagcggggtgcgcagctcgtgagagatatcagaaagcagacgctgctgagaggtcatcatgcgctccagcgcggtgaccatctggttaaaactggcacctgcggcaaggaattcctgtggccccgcttccagttccgggtgctggcgtaagtttccctgggcaacttcatcggcagcgtttttcagcttacgcgccggttttgccagactccaggccaaccacaacagcagcggcgtactgaccaacatggtgacaatcagcagtaatagcgggcggtcaaacagtaagttaatgaaatcggattgagaactgctggccggacgaatcagataaagttggtaattatcttcgccatcacgcacggagaacggaccgaccagttccacgcggccatactttttcttctgcggatgatcggcgttatcggcctgaccaataaagttacgaatgatctgcatttcgctgcgttcagcgccgatcacgcggccttcggtggtcaccaataacaaacgctgtcctggcggtgcccacttatcaatcgcccggaacagacgccgccaccacattaaatcgttgggcggatcgttcgccagctccgcttcgacatgctgctcaatcatcagcccctgacgctgttcgctatccagaagctcggtcatctggcgtgaatcgagcttgggtaacatcaaaaccaacatcaacaccagcgccagcgtcagccagaagatggcgaagatgcgcgcggttaagctgcctatcatgaagcagaaaccatcagatagccgcgaccacgcaaggttttaaaccacgggtgaccatctttacgatccggcagtttacgacgcaggttggaaatgtgcatatcaatagcgcggtcgaaaggcgtcaggcgtttgcccaacacttcctggcttaaatgttcacgggaaaccacctgacccagatgctgtgccagcaaatagagcagggtaaactcagtaccggttaactccagcgtttgcccgtcgaagctggcttcctgacggcctggattcagcactaaggcatcaacttccagtgtcggtgaaccgttgtcgttgttttgctgttgctcgctccagtgcgaacggcgcaggatcgcgcgaatacgtgccaccagctcacgatcattaaacggtttcgggagatagtcatctgcgcccagctcaaggccgagaacgcgatcaagttcactgccgcgcgccgtcaacataatgacaggcgtctggtgtgtctggcgaagtgcttttaatgtgtcgataccatttttcttcggcatcattacgtcaagcaaaagtaaatcaatgctgtcgtccagaagatcaagcgcctgttccccatcgtgggcaacaatcacgttgaagccttccatctcgagcagctcctttaatagggaagtcagctctcggtcatcatcaactaacaggattttattcattgtttaaatacctccgaggcagaaattacgtcatcagacgtcgctaatccatgactttacgttgttttacaccccctgacgcatgtttgcagcctgaatcgtaaactctctatcgttgaatcgcgacagaaagattttgggagcaaatgatgcgcatagttaccgctgccgtcatggcctcaacgctggcagtcagttcattaagccacgctgctgaagtcggttcaggcgataactggcatccgggtgaagaacttacgcagcgcagtacgcagagccatatgttcgacggcataagtttaaccgaacatcagcgtcagcagatgcgagatcttatgcaacaggcccggcacgaacagcctcctgttaatgttagcgaactggagacaatgcatcgccttgtcaccgcagaaaattttgatgaaaacgctgtgcgcgcacaggcagaaaaaatggcgaatgagcaaattgctcgtcaggttgagatggcaaaagtccgcaaccaaatgtatcgcctgttaacgccggagcagcaagcggttttaaacgagaaacatcaacaacgaatggagcagttgcgtgacgtgacgcaatggcaaaaaagttcatcgttgaagctattgagtagtagcaactcacgttcccagtagtaaaccctgttttccttgccatagacaccatccctgtcttcccccacatgatgtgggggttttttttatcctcaatttgcctgctgcttaatgcattgcagatgatttgcttccgttatactagcgtcagttgatagcgggagtatttatgaatcaatcttatggacggctggtcagtcgggcggcgattgctgcgacggcgatggcttcgttgctattgctgattaaaatttttgcatggtggtataccgggtcggtgagtattctcgccgcgctggtggattcgctggtggatatcggcgcgtcgttgacgaatttactggtggtgcgatattccctgcaacctgccgacgataatcactcgtttggtcacggtaaagcagagtccctcgcggcgctggcgcaaagtatgtttatctccggttcggcactattcctgtttttgacgggtattcaacatctgatatctccaacaccgatgacagatccaggcgtcggggttatcgtgacaattgtggcgctaatttgtacgattatccttgtctcgtttcagcgttgggtggtgcgccggacgcaaagccaggcggtgcgggctgatatgctacattaccagtctgatgttatgatgaacggcgcaattctgctggcgctggggttgtcctggtacggctggcatcgcgccgatgctctgtttgcattgggaatcggcatctatattttatatagcgcgttacgcatgggatatgaggcggtacagtcattactggatcgcgcattgcctgatgaggaacggcaagaaattattgatatcgtgacttcctggccgggtgttagcggcgctcacgatcttcgcacgcggcagtcagggccgacccgctttattcagattcatttggaaatggaagactctctgcctttggttcaggcacatatggtggcggatcaggtagagcaggctattttacggcgttttccgggatcggatgtaattatccatcaggacccctgttccgtcgtacccagggagggtaaacggtctatgctttcataatcagtataaaagagagccagacccgcattttgtgtataaaataccgccatttggcctgacctgaatcaattcagcaggaagtgattgttatactatttgcacattcgttggatcacttcgatgtgcaagaagacttccggcaacagattttattttgcattccaaagttcagaggtagtcatgattaagaaaatcggtgtgttgacaagcggcggtgatgcgccaggcatgaacgccgcaattcgcggggttgttcgttctgcgctgacagaaggtctggaagtaatgggcatttatgacggctatctgggtctgtatgaagaccgtatggtacagctagaccgttacagcgtttctgacatgatcaaccgtggcggtacgttcctcggttctgcgcgcttcccggaattccgcgacgagaacatccgcgccgtggctatcgaaaacctgaaaaaacgtgggatcgacgcgctggtggttatcggcggtgacggttcctacatgggtgcaatgcgtctgaccgaaatgggcttcccgtgcatcggtctgccgggcactatcgacaacgacatcaaaggcactgactacactatcggtttcttcactgcgctgagcaccgttgtagaagcgatcgaccgtctgcgtgacacctcttcttctcaccagcgtatttccgtggtggaagtgatgggccgttattgtggcgatctgacgttggctgcggccattgccggtggctgtgaattcgttgtggttccggaagttgaattcagccgtgaagacctggtaaacgaaatcaaagcgggtatcgcgaaaggtaaaaaacacgcgatcgtggcgattaccgaacatatgtgtgatgttgacgaactggcgcatttcatcgagaaagaaaccggtcgtgaaacccgcgcaactgtgctgggccacatccagcgcggtggttctccggtgccttacgaccgtattctggcttcccgtatgggcgcttacgctatcgatctgctgctggcaggttacggcggtcgttgtgtaggtatccagaacgaacagctggttcaccacgacatcatcgacgctatcgaaaacatgaagcgtccgttcaaaggtgactggctggactgcgcgaaaaaactgtattaatgatttcggaaaaaggcagattcatttagcctgaaaccgatgacagaagcaaaaatgcctgatgcgcttcgcttatcaggcctacattaattctgcaatttattgaatttgcaaacttttgtaggccggataaggcgttcgcgccgcatccggcatggacaaagcgcactttgtcagcaatatgaggcggatttcttccgcctttttaatccttcaacatatacccgcaagttatagccaatctttttttattctttaatgtttggttaaccttctggcacgctttgctcatcacaacacaacataagagagtcgggcgatgaacaagtggggcgtagggttaacatttttgctggcggcaaccagcgttatggcaaaggatattcagcttcttaacgtttcatatgatccaacgcgcgaattgtacgaacagtacaacaaggcattcagcgcccactggaaacagcaaactggtgataacgtggtgattcgtcagtcacacggtggttcaggtaaacaagcgacgtcggtaatcaacggtattgaagctgatgttgtcacgctggctctggcctatgacgtggacgcaattgcggaacgcgggcggattgataaagagtggatcaaacgtctgccggataactccgcaccgtacacttccaccattgttttcctggtgcgtaagggcaatccgaagcagatccatgactggaacgatctgattaaaccgggtgtttcggtgatcacgcctaatccgaaaagctctggtggcgcacgctggaactacctggctgcctggggctacgcgctgcatcacaacaacaacgatcaggcaaaagcacaggattttgttcgggcactgtataaaaacgtcgaagttctggattctggcgcgcgcggctccactaacacctttgtcgagcgcgggattggcgatgtactgatcgcctgggaaaacgaagctctgctggcagcgaatgaactggggaaagataaattcgaaatcgtcacgccgagtgagtctatcctcgcagagccaaccgtgtcggtggtcgataaagtggtcgagaaaaaaggcaccaaagaggtggcggaagcctacctgaaatatctctactcgccagaaggtcaggaaattgccgcgaaaaactactaccgtccgcgcgacgctgaggtggcgaaaaagtacgaaaatgcgtttccaaagctgaagttattcaccattgatgaagagttcggcggctggacgaaagcgcaaaaagagcattttgctaacggcggtacgttcgatcagatcagcaaacgctgatttccccaggataattatcaaacccggtggtttctcgcgaccgggttttttatttgtcacgattttgcgttacccttgcatctctttgagatacagggaaaaaaagatgaaaaaagcgggtcttctttttttggtgatgatagttatcgccgttgtggctgccggtattggttactggaaattaaccggtgaagagtcggatacattacgtaagattgtccttgaggaatgtttgcccaatcagcagcaaaatcaaaatccttcgccatgtgcggaagtcaaacccaatgccggatacgtggttttaaaagatcttaatggtccactgcaatatctgttgatgccaacgtatcgtattaacggtactgaaagtcctttgttgaccgatccttcaacgccgaacttcttttggttggcctggcaggcgcgtgattttatgagcaaaaaatacggccagccggttcccgatcgcgcggtttctttggcgatcaactcccgcaccgggcgtacgcaaaaccattttcatattcatatctcttgtattcgtcctgatgtgcgcgaacaactggataacaatctggcgaacatcagcagccgctggttgccactgccaggtggtttgcgcgggcatgaatacctggcgcgtcgggtaacggaaagcgaactggtacaacgcagcccatttatgatgctggcagaagaagtacctgaggcgcgggaacatatgggaagctacgggctggcgatggtacggcagagtgataactcatttgtattgctggcgacacaacgaaatctactgacgcttaaccgtgcttcagccgaggaaattcaggatcatcagtgtgagattttgcgttaaggcgaagagttaaggaaagtaagtgccggatatgaaatccggcacctgtcagacttaagcctgtttagccgcttctgcagctttaacgatcactgcgaaagcgtcagctttcagagaagcaccgccaaccagcgcgccgtcgatatctggctgagcaaacagttctgcagcgttagacgcgtttacagagccgccgtactgaatgatcacttgttcagcgatgttagcgtcaactttagcgatgtggtcacggatgaatttgtgaacagcctgtgcctgagccggagttgcagatttgccagtaccgattgcccatacaggttcgtaagcgataaccgcaccttcgaatgccgcagcaccctgagttttcagtaccgcgtcgatctgacgtgcgcaaacttcttcagttttgcccgcttcgttttcagcttcggtttcaccgatgcacagaaccggagtcaggccctgctctttcagcaccgcgaattttttcgcgatcagttcgtcagactctttgtggtaagtacgacgttcagagtggccgatgatgatgtactgagcgccgatgtctttcagcatagcggcagaagtttcaccggtgaatgcgccggacaggttcaggtccacgttttgcgcacccagcatgatgtggctgccttcagcttcgcgcttcgccatatcgatgtacatttccggtggtgcgattgcaaccgcacagccagcaacacctgccagctctttacgcaggttagaaaccagctcgtgaaccatgtggcggctgccgttcagtttccagttacccatcactaaaggatgtcgcattttaattctccacgcttataagcgaataaaggaagatggccgccccgcagggcagcaggtctgtgaaacagtatagagattcatcggcacaaaggctttgctttttgtcatttattcaaaccttcaagcgattcagatagcgccagcttaatcggttcaacagcgaaggtcagccccttttcgccgttgtccgcgacaacataacgcagtgcaccttctgtctcggtgtaataacgtttgtttttccccgccgttagtagcgactgcagttttttctggctttgtgttttggtcattaatggggtgagtgtgcggatcactgctgccatgtattcctgagctttcgctttcgctgctttttgctctggcccctggatgggtagccaggtcatttgaatgcttttgatttttaaggtaccgcgctccagcgctgtagaagcatacaagttctcgttaattttacttgcagcacgagtgagattggctttgtcgggactgctgtcgatggcacgaaattcgttcagtggcaggctaggattctggctgttaaagtcttctcgaaactggctgatggagagatcgaaagtaggggctccagccagcagataaggcgcggtcgttgccgtatctggtgtttgtgcatgcgccgttgttgtaacggttaatgcagaacataagagaaaaaacagcgtacaccctggcttcattgacagtaccttttgttatgactggctccgattaaaacgatatctgtcgcccttgtcaaaagggtagaatcctggaaaagacaaccatcaaggaacttacatgaccatacagcaatggttattctcatttaaagggcgtattggacgccgtgatttctggatttggataggcctgtggttcgcaggcatgctggtgcttttctcactggcgggtaaaaatttactcgatattcagaccgcggcgttttgccttgtgtgcttgctttggccaacagcggcagtaactgttaagcgcttgcatgatcgcgggcgttccggcgcatgggcatttctgatgattgtggcgtggatgctgctggcgagtaactgggcgattttaccgggtgtctggcaatgggcggtggggcgttttgtcccgacgttgattctggtgatgatgcttatcgatcttggtgcgtttgttggcacacaaggcgaaaataaatatggtaaagatactcaggatgtgaagtataaagccgacaataaatcaagtaattaacctttaatatatctcttactgctattttttccgggattgttatttccacgatgcaaatgacaatacccggaaaatccttctgaactcttcaccttaagcaatatcaaaaaaaatggtaatccataagatcattacttgtttgttcttcccttaacggcgcattattcttaagtcgtaatcgacagagaggcgaatatacagaggtgccctatgaaagatgtcgtagataaatgcagtactaaaggatgtgcgattgatatcggtacggtgattgataacgacaactgtaccagtaagttttcgcgcttttttgccacccgcgaagaagcagagtcttttatgaccaaactgaaagagcttgccgccgctgcatcctctgcagatgaaggggccagcgtggcctacaagattaaggatctggaggggcaagttgagcttgatgcggccttcactttctcatgccaggccgagatgattatttttgagttatcactgcgttcgttagcttgatggagttgctttagaaggagttaaacatggcttataaacacattggcgtggcaatttccgggaatgaagaagatgccttactggtgaataaagctctggagctcgccagacataatgacgctcacctgacgttaattcatattgatgatggcttaagcgagttgtatccgggtatctacttccctgcaacagaagatattcttcaattgttgaagaataagtcggataacaagctgtataaactgacgaaaaatattcaatggccgaagacaaaactgcgtattgaacgcggagaaatgccggaaacactgctggaaattatgcaaaaagagcagtgcgacctccttgtctgtggtcatcatcactcatttatcaaccgtttgatgccggcatatcgcgggatgatcaataagatgagtgcggatttgctcatcgtgccgtttatcgataagtaaccgcttaccagtaatgctccgctgtcatatggcccggtcggcgacgtaaatgtttcgtcatctgccgggtctctttcagcaactgttgtgtatcgcgcaccatctgtggattgccgcacagcatcacatggctggtttctttattcatcggcaggccaatcgcgctttccagttccccactttcaattaacgccggtatccgcccggtgagcgaccccgctgccgtttcccgactgaccaccgtctgaatgcgcagtttcccttcgtagcgtttttccagttcttgcatcagtggcaaatagcttaagtcggcggcataacgtgcggcgtgaaccaggaccagatttttgaagcgatctaaatctttgcctagttgcagaatcgataaataagggccaatcgctgtaccggttgccagcatccatagcgtttcgcagtccggtacttcatccagaacaaagaagccagctgcttcgctaaccacctgcacttcatcgcctggtttcagtgccgccaatcgtgggcttaatttgccatcggggacggtgaccaggtaaaactccagatcgggattatcgggcgagttaacataggagtaggcgcgctggacgcgttcgccgtcgatttcaaggccaagcttggtgaattgcccggcggtaaacggaagcacgggggcgtgaacggtgagactaaacagggcgtcggtccagttctgcactttagtgactttgcctgttacccaatcagccatgtttttctcctgttttgattgacttgccttatcttcgttctccgaacaaaaaaattccagtcccgaaggactggaaggctcaatcgatcaaatcaatcagaggatgtgcacctgcatttccgggtctttgcgatccagatagtggatggactgaatgcggcgaatggtgcgtgacttgccgcggatcagcagcgtttcggtagtcgcgatattgcctttgcggctaatgccttccagcagatcgcctttggtaataccggtggcagagaagatgacgttatcgctgcgcgccatatcgcccaggcgcaatactttaccggcttcgatgcccatcgctttgcagcgtgccagctcctgctcgccaatgcgacgattctcttcgttgtcgcctttgacgtcatgacgcgccagcagacgaccgttcatgtcgccatctaatgcgcggatcaccgccgcagaaactacgccttccggcgcgccaccaataccgtacagcacgtcaacttcgctgtctggcatacaggtgagaattgaggccgcaacgtcgccatccggaatagcaaatacgcgtacgccgagttgctgcatttcagcgataacggcatcgtggcgtggtttagccagtatcgttaccgtcagttcgctcaacggtttgccgagcgccgccgctacattgcgcaggttatccgccagcggcaggttcagatcaatggtgcctttggctcccggcccgacaatcagcttctccatatacatatccggcgcattgaggaagcagcctttatcgcctactgccagcaccgccagcgcgttagcctggcccatcgccgtcatgcgcgtgccttcaatcggatcaacagcaatatctaccgcgtcgccgcgaccagtaccgactttttcaccaatgtagagcatcggtgcttcgtcgatttcaccttcaccaatgacgatggtgccgtcaatgttgacctggttgagcataatacgcatggcgtttaccgccgcgccgtccgcggtgtttttatcgccgcgtcctaaccatttgtagccagccagcgccgcagattcggtgacgcgggaaaattcgatggcaagttctcgtctcatagcaaactctaagcagtaaggaatggcgcgaagtgtagcacaggggaagggtgggattattgatgtgtgcggggttgccccgcacggtttcaggactaccggatgcggcataaacgcttcatccggcatttacattactcgtcgtgttcttcccacgccatcgcgcgtttgaccgcttttttccagcctgcgtaacggtaattacgctcagtggtttcgatgcctggacggaactcgcgttcaatcaccgctttctcttgcagctcgtcgaggttctgccagaaaccgaccgccagaccagcaagataggccgcacccaatgcagtcacttcgcgaacttccgggcgctcaacgcgggtgccgagaatatcggactggaactgcatcaggaaattgtttgctactgcgccaccatccacgcgcagggcgtgcagacggataccagagtcggcctgcatcgcttccagcacgtcacgcgtctgataagcaatagactccagcgtcgcgcgtataatgtggttagcgttcaccccacgagtcagaccgaaaatcgccccgcgcgcatacgggtcccagtacggcgcacccagcccggtaaatgccggaaccacatacacaccattggtgttttgcactttggtggcgaaatattcggaatcgtaggcgtcgttaatcaacttcatctcatcgcgcagccactgaatggatgcgcctgccataaacaccgcaccttccaacgcatagttcacttcgccagtcgggccgcaggcgatggtggtcagcaggccgttttctgatttcaccgctttctcgccagtgttcatcagcataaagcagccagtgccataggtgttcttcgccatcccttctttcacgcacaactgaccaaacagcgcggcctgctggtcaccggcgatcccggagattggaatacgcgtgccgcctttgccgccaatgttagtctgaccgtatacttcggaagaacgacgcacttctggcagcatctcgcgcggaatatccagcacttccagcattttgtcgtcccagtccagggtatggatgttgaacaacatggtacgagaggcgttggtgtaatcggtcacatggacacggccctgagtcattttccagataagccacgtatcaaccgtaccaaacagcaattcaccacgacgtgcacgctcgcgagagccttccacatggtcgaggatccacttcactttggtgccagaaaagtacgggtcaatcaccagaccggtattgctgcggatataatcttctaaaccgtcacgttttaaatgctcgcagatttctgcggtacgacggcactgccagacaatggcgttatagataggcttgccggtttctttttcccagacaatagtggtttcacgctggttcgtaataccgatagctgcaatttgatcggaactgatatcggctttcgccagcacttctaccagcgtggagctttgggtggcccagatttccattgggtcgtgttctacccaacctggttttgggtagatttgctcaaattcgcgctgcgacacgctaatgatattggcatcgtgatccattacgaccgcgcgggagctggtggtgccctggtcgagcgcaacgatatattttttttcagtcatgtttaattgtcccgtagtcatattacagcgaagctttttgttctgaaggagttgtggtttccttttcttccacaacacagatatcgcaaggcaaatggcgaccaatcagtttgcggtaggcaaatgcacctacaatcgcgccaacgatagggccgaaaagcggcaccaggaagtaaggaatgtctctgccgccggtaaaggcgacattgccccagcccgccagccaggcaaagactttcggaccgaagtcacgcgctgggttcatggcaaaacctgtcaatgggcccatagatgcgccaatgaccgcaatcagtagaccaatcagcaagggagccaaagggccgcgtggtacaccgttgccatcgtccgttaacgccaggatcagccccatcagaatagcggtaatcaccatctcaactgcgaaagcctgcacaaaattgatatgaggattagggtaagtagagaaagtgccagccagatcaacactttcaacgctgccgcgaacaatgtgatgagtctgctcgaagtcgaaaaataaattgtagtaaagcccgtaaactaaagccgcagcacagaaagcgccggcaacttgtgaaacgataaaaggaataactttgcgcttgtcgaaacaggcaaacagccacaatgcaatggtaacagcgggattaagatgcgcgccggaaacccctgcggtcaggtagatggccattgccacccccagtccccaaatgacactgatttcccactgaccaaaagacgcaccagcgacttttagtgctgcaacgcaacccacaccgaagaaaatcaacaacccggtaccgaggaattcagcaatgcactggcctttcaaggttgatgtttgactcataatcggatcctgaagagttaatgtttgttgtatgcgtgaaagtcacggacctccacgatgcttgtaggcatgctgtaaacttatcgttaacgagcaaaaacgagaaatatcgaacttaaaatgtgtgtgcttcgtcataaaatgagcgttatcgcgccatttattccatctgattgtacatgatgcatgtttgttagatcattcgcgcaacaaatttattaacattttcgattgatgtggattatgtcaccaggagaaggatgaaaagtgtggcaaaccgtaatctgcaaggcgtgccgctggacagcgatggcgcggcttcatacaatcggagctaactaaagtgcgctcgtatttattaaggcgtcaccggtaatcgggacgaggatttttatccatcaacgccttgcaattcaggagaggtatgacaatgtcattagaagtgtttgagaaactggaagcaaaagtacagcaggcgattgataccatcactctgttgcagatggaaatcgaagagctgaaagaaaaaaacaactcactgtcgcaggaagttcaaaatgcccagcatcagcgcgaagagctggagcgtgagaacaaccatctgaaagaacagcagaacggctggcaggaacgtctgcaggccctgctgggtcgcatggaagaggtctgattacgcttcatctttcgcgtaatttctttactgtgtaggccaacaggtaacgcagaaaaaaggcaccttgcggtgccttttctatcattcaatatccagcggatcttctgaaagaataatcccggtattgtcggcataaagatggtcgccggagaagaaggtgacaccgccaaaattgacgcggacatcgctttcgccaatgccttcgccagcggcaccaaccggaattgccgccatcgcctggatgccgatatccaactcttccaggtcatctacctgacgcaccgcgccgtaaatgaccagaccttcccattcattttgtactgccagacgcgccagttcagcatcgaccagtgcgcgacgaacagaaccaccgccatcgacgacaagaacacgaccacggccattctgttcgagcagatcgtacagcaacccgttgtcctcgaaacattttaccgtgattatttgtccgccaaacgacgcccgtccgccaaagttggagaacagcggttccacgacgttaacatcttcttgatagatgtcacaaagctcggaagtatcgtatttcataggcttaacattcagttgctgcgagaattttcagtatatcgcgctatgtgggctgttggcaaaatcatcaattgttaattgatatttgtcagttatgctgcccactggcttaggaatatccctaaaataaacagcaggttagtcagtaacgctcccttgacagtacgttccagcattggtcgcatcgccaccgggtccatttcccgcatcacataacgggcttgcttcaccagtaatggtgccgccagcaggaacagccagccccacaggctatgcagcgaaaagagattaaacagcgccagacacaccagtgagcccatcagcaggcaggcatgataacgacgcgcgttcacttcacctaagcgcaccaccagcgtgtttttgccattttcgcggtcgctattgatatcacgcaggttattaatattcagtactgccgttgccagcaggccgcatgcggtcgccggaaggatcagtgccggaatcaatgtatgagcctgtaaataccagctccccatgacactcaaccagccaaagaaaaccagtacggaaatatcacccagaccgatataaccataaggacgattgcccacggtgtaggtgatagcggcaatgatcgacaacccgccaagaatcaggaaaccgacaaaatcggccagcgtatggcatgccactgcaaccagtgccagcccggagagacagatgagcacgacggtaataatgagcgcccgtttcatctcttgctgggtaatgacccctttttgcatgccgcgtagcggcccaatgcggtcaggtttatcgctgccttttaccgcatcgccgtaatcattggcgaggttagaaaggatctgtaatagcccggcggtaatcagtgccagcagggcgaccagcggatcgaagtgaccttgccaccatgccagcgctgtcccgacgataattgcagcaaaggcgagggggagggttttaggtcgtaaactttccagccacgcctgagttcggctaatttgttgttcagtcataatacgcgccaataaaaatggggcctttcagccccatcaaacaatgatgaaaatgattgaacgcgattataggataaaacggctcagatcttcatctgccaccaacgcatccagatgtttgctcacataatctgcgtcaatgatgatagtttgaccgcttaaatcgctggcgtcgtaggaaatctcttccattaaacgctccagaacagtgtgtaaacgacgagcaccgatgttttcggtagattcgttcacctgccatgccgcttccgcgatgcgcttaataccggagtcggtaaactcgatatttacgccttcagtcgccatcagtgctttgtactgcacggtgatagaggcattcggctcggtcagaatacgctcgaagtcgctggtggtcagcgcctgcagttcaacgcggattggcagacgaccttgcagttccgggatcaggtcagacggtttcgcaatctggaacgcgccagaagcgataaacagaatgtggtcagttttgaccatcccgtgtttggtggaaacggtgcaaccttctaccagcggcagcaggtcacgctgaacgccttcacgagaaacatccggaccggaagactcgccgcgcttacagattttgtcgatttcgtcgataaacacgatcccgtgctgctcaacagcgtcgatagcgtcttgcttcagctcttccgggttcaccagtttcgccgcttcttcttcaatcagcagcttcatggcgtctttgattttcagcttacgcgctttttgcttctggccgcccaggttctggaacatggactgcagctggctggtcatctcttccatgcctggaggagccataatttcaacgcccatcggtgctgcggcaagatcgatctcgatttctttgtcatcaagctggccttcacgcagttttttgcggaatgcctgacgagcagcggacggttcctgctgctgttcggtctgtccccagttgtttttagcaggtgggatcagcacgtcgagaatacgttcttctgccagttcttcagcgcgataacggtttttctcgatagcctggacgcgtaccattttcacggcggcatcggtcagatcgcgaataatagaatccacttccttaccgacgtagcccacttcggtgaatttggtcgcttcaactttgatgaacggcgcattcgccagcttagccagacgacgggcgatttcagttttaccgacaccggtcgggccgatcatcaggatatttttcggggtcacttcatggcgcagctcttcgttgagctgcatgcgacgccagcggttacgcagagcaatcgccacagaacgcttggcgttgtcctggccgatgatgtgcttatccagttcgctgacgatttcgcgtggggtcatttcagacatgggagatccttacgctttgtagcttaattcttcgatggtgtggaaatggttggtatagatgcaaatgtcgcctgcaatatccaacgccttttcagcaatttcacgagcactcagttcagtattttctaacagtgcacgcgccgcagcctgggcgtaagggccgccggagccgatagcaataagatcgttttctggctgcaccacgtcaccgttaccggtgatgataagcgatgcagtttcatccgcgactgccagcagtgcttcaagtttgcgcagcatgcgatcggtacgccagtctttcgccagctcaacggcggctttgaccagatggccctgatgcatttccagtttacgttcaaacagttcgaacagcgtaaaagcatccgcagtaccgcccgcaaagcccgcgatgactttgtcgttgtacagacggcggacctttttcacgttgcctttcattacggtattgcccaacgtggcctgaccatcaccagcgatgaccacatggccgttacggcgtacgcttactatagttgtcacgagctgaccccttggttacgaatacagagtacaaaccccgtacaaaagtacggggcataatgcaattatagatgggggggattttgagggtttcaacccccggcggcgagccgaatgcagtttgtatgacccgccatcttcaaccgattgagggtgctgtctgcgttctctttgcctttcaccgggccaatgaccacacgattccagccattgttggtggtgattttcgagtcaaatccttcgaacgccagctgagcacgtaccgtctctgcctgttccgcgcctctgaacgaaccgcactgcaccatccagcggcgttcgtcttttttctccgccgtcggttttggcgcgtcagcggcacgagcaaccggcgcagcttgctgcggcttcgactgcgcggtcgtgtgcgcaggggtttgcagcagatcctggtacggctgctgagtagaagctggtttagactggcgcggttgcgcctgtaccggcgcggcttgcgacgtacgcgtctgctgctgccagctttgttcagtcgtacgcgactgctgagccaggcgttgctgctccgctaattgctgcgcctgacgctggcgttgtagcgtttgctgacgctgttccggcgtctgttcattccacggaacttcaaccagctgcgttggctgctggcgcatatcagcctgcatttgttcaagaagctgacgttgttctggtgtcagttgctccggcgttttcacttcaccaccggcagaaggttctgtgggcgcacgcacacccggctggcgactttccagctctttaatgtagcgccagcgttcttctggttttggtggtagtccgttaccggtcactttctggctttgcagcgtctcggactcttctttcttgtgatgcgtaatgaagtacagaccaccgataaaggtcacaagaacggcggcagcaatagcgaccatagcgggagaaaccgcaggcagatttcgttgctttttccgtgaggtgctcttttttcgccgcgaaggtgccggttggctgcggcgtacataatctcgttgtgccactatcgtttcgctgtatttattcgttcgtcagcccgccatgttacttaagcggcgggcctttgaccagtcacggcagtcttaaaggtttactttaaggtaacgcgcgtgttgatccccggatgataagttcgcagtccattaaacgagagccactgccaacgtgttgcccctgcatttgatcaagcaataacagcatagcttcccgaccgatttcgtaacgcggctgcgcgatggttgtcagcggcggatcacaaaattgcgtcaggtcgatgttatcaaaaccgattatggaaaggtcttccgggactttcagcccctggcgttttgcctgagaaagtgcgccgagcgccatcacatcgctatggcagaagacagcagtaggcggttgtggaagatcaagcagctgctgcatcgctttgcttccggcttcgaaggtgaagtcgccacgggcgatgtattgcggatcaaccataatgccgcagcgatgcagcgcctgaacatagccttgcaggcggtagtgacacagtggcatctcttcgggaccggctatacagccaatccgtttatgcccttgctcatataaataatttactgcatcaaatgcggcggtcagattgtcgatatgaactgtaggtagctccagttccggtgcgaattcgttcgccatcaccatcggcggcagattacgctgttcctcaatgctggcatcaaacggcagccttgaacccagcagcaacatgccatcaatttgcttggtgatgatcaaatcgataaaggttttttcctgctgattttgatgcgcacagtcgccaatcagcaccagatatccgtgatttgccgccgtaacttcgataccgcgaataatttcgctaaagaagggatcgcagatatccgggacaatcaccagaatggtgcgggattcattacgcttgacgttgcgccccataggctgcggtaaataacccacttcccgggccgctttttcaacccgattacgggtggcctgggagactttatcgggattcattaatgctcgggagacagtcgctgtagagacttttgccttgagggcaacgtctttcatggtcgcggcagtttcctgcttcttcgctttcacactcactcctcgcctggcacgtcaggcgtactacatccatgtttacttcacatcggcaacatttttagcagatagcgcgtgaaaacggttacagaattttcatgaaaagtgtgatgaatattgaatttttcgatccgcctcgcaacgtttgcgcattagccttcgatgggatcgacatccaacacccatttcaccttgcgggaatccggtattgtattaataagcgccagcgtaccactaatgatgtgttgcaagcgcacgcgggaagggtgctgcaacaagatctgccagcgccagcggccaccacgcttaggtgccagagccggaaccggaccgagaacccacagtttgtcgtctgccagcgggctggagaggagcagattacgcagttgttgcaggaacagcggcgcatgctgattgttatgatcttccgcacgcacaatcacatggctggtccacggcggcagttgcatcatccgtcgctcagccagcgcctgttcggcaaaggcgtcgtagcctttatagagcaacgtttgcaacagaggatgttctggatggtgcgtttgcagcaccacttcgccttgtttacccgcacgcccggcacgaccagcgacctgggtgtaaagctgagcgaaacgctctgccgagcgaaaatcggcagaaaacagcgcgccgtccacatccagtaacgccaccagcgtcacatccggaaagtggtgacctttcgccagcatttgtgtgccgatcaaaatcctcgcaccgccgcgatgtacttccgccagttgctgttccagcgcccctttgcggctggtggtatcgcggtcgatacgagaaatgggcacatcagggaacagcggcgcaagcgtctgttcaagctgttcggtgcccagccccacgggtaccaggtgcgtggaaccgcaggaagggcactggcgcggcaccggacgctgactgtcacagtggtgacagcgcaaatgctgttgcgcctgatgcagcgtgtagtagtgatcgcaacgtgggcattcggcaatccagccgcagtcgtggcacagtagcgcaggcgcaaaaccccgacgattaagaaagaggataacctgattgttggcctgtaaatgctggcgcatacgggtgattaacgccggagccagacctgcctgcaccttctgaccttttaaatccagcacgtgttgaattgccggacgcgcattccccgcccggcgcgtcaggcgcagcaggcggtattttttctgctggacgttgcacaacgtttccagcgcgggcgttgcggagccaagaataatcgggatttgctcgctatgcgcacgatacaccgccaggtcgcgggcatgatagcgccagccttcctgctgcttgtaggagctgtcgtgctcttcatcaatgacaatcacgccgagatttttaaacggcgtaaacagcgcggagcgggtgccgatcacaatcgccgcctcgccatttttcgctttcaaccacgccgaaagccgctcgctgtcgttcaggccggaatgcagaacttccacgggggcattaaaacgttcacgaaaacgggcgatagtttgcggtgtcaggccgatttccggcaccatcaccagcgcctgtttgccctgagcgagcacgttttccagtacactgagataaacctccgttttaccggaaccggtaacgcccgccagcagccaggcagaaaaagtatctgccgcgctatgaattgcgccaacggcggtggcctgttcggtattcaatcgcaaccgctcaccagaaacggcatagttcgttcgccagtcgctaaactctggtgtttcacttgctaaatcacacagaccttttttgcgtagcgcctgcaacgcggcatcattaaattcgagcgtggcgacctggtcgcgccagattttgccttgccgtaacgccgccagcgcctgttgttgcttgggggagcgtttcaggctgttcagatccaccgcctggccttgttcagtggcaaaccagtaccacatcggcgcgttcgccgcaggccgcccctggcgcagtaaaatcggcaaggcatgaaacagcacatcgccaatcggatgatgatagtaatctgccgcccagagcagtaaccgccagacggagtgagtaaataccggctcaacgtccagcacttccactaccgctttcagctcgttaagcggcagctcactgacatcgctaactgacaccacaaccccgatgcgctcctgctgtttgccaaacggcacgcgcacgcgacacccggctttaaccgtcatgccttctggcagcagatagtcaaaggtacgaggaagcggaacgggcaaggcaacgtgggcaacgggcatagcatcatcctgacttgaaattcggtgggttagtatacacattgccgtagaagagtgcggatcagtttgcatacgctggttaatttctgtatgatttcgcgccttcgtacgaaatgatcgtattgaagctatacttttaacatcgcgtggtgtctggcgttagggctggaagagcgacgcggccttaaaccgaggttttcccatgaaaaaagatattcacccgaaatacgaagaaattactgctagctgctcttgcggtaacgtaatgaaaatccgctccaccgttggtcatgacctgaacctcgacgtgtgcagcaagtgccacccgttcttcactggcaaacagcgtgatgttgctaccggtggccgtgttgaccgcttcaacaagcgtttcaacatcccgggcagcaaataagaccggatttccgaaaaaagcgccgcacggcgctttttttgtgcctgtaatttgccttttataaattctgaaaaattccggggtgttaactcattatcatttcctgttgttgactggcgctaggcttctggttcttatttatttcaaaaggattttacgatgagcggaaaaccggcggcgcgtcagggcgacatgacgcagtatggcggtagcattgtccagggttcagccggggtgcgcatcggtgcccccaccggcgtggcctgttcggtgtgccccggcggggtgacgtccggccatccggtcaatccgctgctcggtgcaaaggtccttcccggtgaaaccgacatcgccctgcccgccccgctgccgttcatcctctcccgcacctacagcagttaccggacaaaaacgcccgcgccggtggggagcctcggccccggctggaaaatgcctgcggatatccgcttacagctgcgcgataacacactgatactcagtgataacggcggcagaagcctgtattttgagcacctgtttcccggtgaggacggttacagccgcagcgagtcactgtggctggtgcgcggcggcgtggcgaaactggatgaaggtcaccggctggccgcactctggcaggcgctgccggaagaactccgcttaagtccgcatcgttatctggcgacaaacagtccgcaggggccgtggtggctgctcggctggtgtgagcgggtgccggaagcggatgaggtgctgcctgcgccgctgccgccgtaccgggtactgaccgggctggtggaccgcttcgggcgcacacagacgttccaccgcgaagccgccggtgaattcagcggcgaaatcaccggcgtgacggatggtgccgggcgtcacttccggctggtactgaccacgcaggcgcagcgggcagaagaagcccggcagcaggccatttccggcgggacggaaccgtccgcttttcctgataccctgccgggttacaccgaatatggccgggacaacggcatccgtctgtctgccgtgtggctgacgcacgacccggaatacccggagaatttacctgccgcgccgctggtgcgctatggctggacgccacgcggcgaactggcggtggtgtatgaccgtagtggcaaacaggtgcgcagctttacttacgatgataaataccggggccggatggtggcgcaccgtcacacgggccggccggaaatccgttaccgttacgacagcgacgggcgggtgacagaacagcttaacccggcaggcttaagctacacgtatcagtatgagaaagaccacatcaccatcaccgacagcctggaccgccgtgaagtgctgcacacgcagggcgaagccgggctgaagcgggtggtgaaaaaggaacacgcggacggcagcgtcacgcagagtcagtttgatgcggtgggcaggcttaaggcacagacggatgccgcaggccggacaacagagtacagcccggatgtggtgacgggcctcatcacgcgcatcaccacgccggatggcagggcatcggcgttttactataaccaccacagccagttaacgtcagccaccgggcctgacgggctggaaatacgccgggaatatgatgaatccggccgtctgattcaggaaaccgcccctgacggcgatatcacccgctaccgttatgataatccacacagtgacctcccctgcgcaacggacgatgccaccggcagccggaaaaccatgacgtggagccgttacggccagttgctgagcttcaccgactgttccggctaccagacccgttatgaccatgaccgcttcgggcagatgacggcggtgcaccgcgaggaagggctgagccagtaccgtgcatacgacagccgtggacagttaattgccgtgaaagacacgcagggccatgaaacgcggtatgaatataacgccgccggtgacctgaccaccgtcattgccccggacggcagcagaaacgggacacagtacgatgcgtggggaaaggccatctgtaccacgcagggcgggctgacgcgcagtatggaatacgatgctgccggacgggtcatccgcctgaccagtgaaaacggcagccacaccaccttccgttacgatgtactcgaccggctgatacaggaaaccggctttgacggccgcacacagcgttatcaccacgacctgaccggcaaacttatccgcagcgaggatgaggggctggtcacccactggcactatgacgaagcagaccgcctcacgcaccgcaccgtgaatggcgaaaccgcagagcagtggcagtatgacgaacgcggctggctgacagacatcagccatatcagcgaagggcaccgggtgacggtgcattacgggtatgatgagaaaggccggctgaccggtgagcgtcagacggtgcatcacccgcagacggaagcactgctctggcagcatgagaccagacatgcgtacaacgcgcagggactggcgaaccgctgtataccggacagcctgcccgccgtggaatggctggcctacggtagcggttacctggcaggcatgaagctcggcgacacaccgctggtggatttcacccgcgaccgcctgcaccgggaaacgctgcgcagcttcggccgttatgaactcaccaccgcttacacccctgccgggcagttacagagccagcacctgaacagcctgctgtctgaccgcgattacacctggaacgacaacggcgaactcatccgcatcagcagcccgcgccagacccggagttacagctacagcaccaccggcaggctgaccagcgttcacaccaccgcagcgaatctggatatccgcatcccgtatgccacagacccggcaggtaaccgcctgcccgacccggagctgcacccggacagcaccctcagcatgtggccggataaccgtatcgcccgtgacgcgcactatctttaccggtatgaccgttacggcaggctgacggagaaaaccgacctcatcccggaagggggtatccgtacggatgatgagcgcacccaccggtaccattacgacagtcagcaccggctggtgcactacacgcggacacaatatgcagagccgctggtcgaaagtcgctatctttacgacccgctgggccgcagggtggcaaaacgggtgtggcggcgtgaacgggacctgacgggctggatgtcgctgtcacggaaaccgcaagtgacctggtacggctgggacggcgaccggctgaccacgatacagaacgacaggagccgcatccagacgatttatcagccgggagcttcacgccactcatcagggttgaaaccgccaccggtgagcaggcgaaaacgcagcgccgcagcctggcggatacccttcagcagtccggcggcgaagacggtggcagtgtggtgttcccgccggtgctggtgcagatgctcgaccggctggaaagtgaaatcctggctgaccgggtgagtgaggaaagccgccgctggctggcatcgtgcggcctgaccgtggagcagatgcaaaaccagatggacccggtgtacacgccggcgcgaaaaatccacctgtaccactgcgaccatcgcggcctgccgctggcgctcatcagcacggaaggggcaacagcgtggtgcgcagaatatgatgaatggggcaacctgctgaatgaagagaacccgcatcagctgcagcagcttatccggctgccggggcagcagtatgatgaggagtccggcctgtattacaaccgccaccgctattatgacccgctgcaggggcggtatatcactcaggatccgattgggctgaaggggggatggaacctgtatacatatccgctgagcccggtgaatagcatggatccattaggattatatgaatttaaatcaaaaaatatagatgatattggaatatttgcattggcaatgtgtaatggagaatcaattaacgagaataaagaatatggtggactaatatgtaagaagcaaggtgaatatttacccatgaatccgataagttcaaatgataatgatagtgtagacttgcgaaatataaaatgccctgaaggttcagagagagtaggcgattatcacactcacggtttttactctgacgataaaggaaataaagtaacaaaagaaaatgatgtttatgatagtctaaatttttcaagcaaagatttaacgaattcttatatgaatggaatgggaaaaaaagaatacagtagttacttgggaacaccaaataacacctatctaaaatataatcccaaagctaaagggaatggagttacaattatcaggcaagggagtaattaaaatgaaggcaatacaatgttgttatttccttgctttagtctccagtcatttaatggctggagttatgggtgatgataatatattttaagtaattcggattcagctgctttatattgtgtggctaaaatatttccagatggagaaaatattttaatatataaagtaaatataattaatgctagttcaaaaaaagatgtttttttatgaaagcccaacatcaacccacaatgacataatggggggcgggggaatgtcatatgcctatgaatatgatgtaaaatataatatatgtcatttgagaaaaagagcagaatgaggtaaaaatctttggctgtgtattcagtctggtaatcatccaaggaaagcttatcagaagggtgatgactccaattagtagaacatatattttcgataaaagcaccgatgactttttcatgaagttctacagaacgcgagaaacagatggttctgcgggccagacgtttgattcgggttctcagggtcagattgttacgctcaatgtgctgagtaaaaatcttaccagtcagatgcttctccttcggtaactctctagcgtaactaccccattcgtcagtggtcaacatgccgatggtaaaagggtaagcagcgcccgcaattcacgacaggtttcgtcagtccgggggccaaaagtgtaggccagaacaccaccagttttcgtgttgtacacgtaccagagccagtgctgtcgcgctttactgccgacaaagctccattgctgactaagtttgcagatgagtgccacatcagcatgagcgaccggggatgacgttattcttcgtggcgagagttttttaaagttcggatgactgtattaatgccgattttcagcgtacgggcagtatcgcgaaccccggcaccgttgaaagtcatttcagcgatttggtctttaactcccggtttacggggctcgtaacagtaactgagctgaaatacccggtgacagtcacggccgcggaatcgatcatgtctttttgggttctgcccgtgacggtaaacctgaacggactggcaacgggggcaatgaaggttaactgtgaccatgaaacaaccttaaaagcgagtattatatccttaattcaactaattggaggcatcaccgtttaccggagcgacagcttgcggaaaggtcgtgcaactacaaagcaacaaacagactacggcgggaattatttttttcatcatccattaccacgaaaacagcggccactctttggcaaccgtggtgagttgtggcgcgtcgaaaacggcttgtggtgaaactaccgtttcctcaagcggaatatttttaccgtagcgttctttgagcttcgcctggaccagcgggttgctgagatcaaactctttcaacttctgctgttcgcccacgcgcattcccagcgcgttctggtaaaccttccacccacttccgaacagtactggcgatcgtcgctccatgagaagctgaaatcatacggtttaccgagataacgttttgccgtttgcgccagtttttgctgttgttcaacactcagtccgccttcaacgcggcgaacgacgtatttgcccttttcaccatgggcgatccactgcttgagcggggtgtatttcaccgggccgaccgcttcaaaaacgtagggctttttgttgcgtatcaccagcataccggtgtggctgtaatcggaatgggttgccagttggatcgctttactttgcgatgagcgagagatttgaaagatgatgtcgccagtttgcggctgccaggcaaaggcaggtacagaaaccagcaggctgaggatcagtagcctgattttcatcgttaaacgtccttgtatgaaaaaagcggctggttaactccgcgccgctcttttccgctttagtattcccacgtctccgggttaatccccatctcacgcatgatctcttttgccgcttccgggatttcgtcgctgcgctctttacgcagatcggcatcatccggcaaaggttgcccggtaaaggcatgcagaaacgcttcgcacagcagctcgctgttggtagcgtgacgcaggttgttcacctgacgacgcgtgcgttcatcggtgaggatttttaacaccttaagaggaatggaaaccgtaatctttttgacttgttcactcttcttgccgtgctcagcgtatgggctgatatattcgccgctccattcagccatgagatacttaatcctcttcgtcaataaattgagatcagaccacacaatttatgtgggtactgaccgtaaacccgcatagtttaccgtacaggcgttaccgtgacatcgtgtaatgcacctgtcggcgtgataatgcatataattttaacggctatttgggatttgctcaatctatacgcaaagaagtttagatgtccagatgtattgacgtccattaacgcaatgtttactctggtgcctgacatttcaccgacaaagcccagggaacttcatcacatgacgcgtaaacaggccaccatcgcagtgcgtagcgggttaaatgacgacgaacagtatggttgcgttgtcccaccgatccatctttccagcacatataactttaccggatttaatgaaccgcgcgcgcatgattactcgcgtcgcggcaacccaacgcgcgatgtggttcagcgtgcgctggcagaactggaaggcggtgctggtgcagtacttactaataccggcatgtccgcgattcacctggtaacgaccgtctttttgaaacctggcgatctgctggttgcgccgcacgactgctacggcggtagctatcgcctgttcgacagcctggcgaaacgcggttgctatcgcgtgttgtttgttgatcaaggcgatgaacaggcattacgggcagcgctggcagaaaaacccaaactggtactggtagaaagcccaagtaatccattgttacgcgtcgtggatattgcgaaaatctgccatctggcaagggaagtcggggcggtgagcgtggtggataacaccttcttaagcccggcattacaaaatccgctggcattaggtgccgatctggtgttgcattcatgcacgaaatatctgaacggtcactcagacgtggtggctggcgtggtgattgctaaagatccggacgttgtcaccgaactggcctggtgggcaaacaatattggcgtgacgggcggcgcgtttgacagctatctgctgctacgcgggttgcgaactctggtgccgcgtatggagctggcgcagcgcaacgcgcaggcgattgtgaaatatctgcaaacccagccgttggtgaaaaaactgtatcacccgtcgctgccggaaaatcaggggcatgaaattgccgcgcgtcagcaaaaaggctttggcgcaatgttgagttttgaactggatggcgatgagcagacgctgcgtcgtttcctgagcgggctgtcgttgtttacgctggcggaatcattagggggagtggaaagtttaatctctcacgccgcaaccatgacacatgcaggcatggcaccagaagcgcgtgctgccgccgggatctccgagacgctgctgcgtatctccaccggtattgaagatggcgaagatttaattgccgacctggaaaatggcttccgggctgcaaacaaggggtaaaaatgagtgtgattgcgcaggcaggggcgaaaggtcgtcagctgcataaatttggtggcagtagtctggctgatgtgaagtgttatttgcgtgtcgcgggcattatggcggagtactctcagcctgacgatatgatggtggtttccgccgccggtagcaccactaaccagttgattaactggttgaaactaagccagaccgatcgtctctctgcgcatcaggttcaacaaacgctgcgtcgctatcagtgcgatctgattagcggtctgctacccgctgaagaagccgatagcctcattagcgcttttgtcagcgaccttgagcgcctggcggcgctgctcgacagcggtattaacgacgcagtgtatgcggaagtggtggggcacggtgaagtgtggtcggcacgcctgatgtctgcggtacttaatcaacaagggctgccagcggcctggcttgatgcccgcgagtttttacgcgctgaacgcgccgcacaaccgcaggttgatgaagggctttcttacccgttgctgcaacagctgctggtgcaacatccgggcaaacgtctggtggtgaccggatttatcagccgcaacaacgccggtgaaacggtgctgctggggcgtaacggttccgactattccgcgacacaaatcggtgcgctggcgggtgtttctcgcgtaaccatctggagcgacgtcgccggggtatacagtgccgacccgcgtaaagtgaaagatgcctgcctgctgccgttgctgcgtctggatgaggccagcgaactggcgcgcctggcggctcccgttcttcacgcccgtactttacagccggtttctggcagcgaaatcgacctgcaactgcgctgtagctacacgccggatcaaggttccacgcgcattgaacgcgtgctggcctccggtactggtgcgcgtattgtcaccagccacgatgatgtctgtttgattgagtttcaggtgcccgccagtcaggatttcaaactggcgcataaagagatcgaccaaatcctgaaacgcgcgcaggtacgcccgctggcggttggcgtacataacgatcgccagttgctgcaattttgctacacctcagaagtggccgacagtgcgctgaaaatcctcgacgaagcgggattacctggcgaactgcgcctgcgtcaggggctggcgctggtggcgatggtcggtgcaggcgtcacccgtaacccgctgcattgccaccgcttctggcagcaactgaaaggccagccggtcgaatttacctggcagtccgatgacggcatcagcctggtggcagtactgcgcaccggcccgaccgaaagcctgattcaggggctgcatcagtccgtcttccgcgcagaaaaacgcatcggcctggtattgttcggtaagggcaatatcggttcccgttggctggaactgttcgcccgtgagcagagcacgctttcggcacgtaccggctttgagtttgtgctggcaggtgtggtggacagccgccgcagcctgttgagctatgacgggctggacgccagccgcgcgttagccttcttcaacgatgaagcggttgagcaggatgaagagtcgttgttcctgtggatgcgcgcccatccgtatgatgatttagtggtgctggacgttaccgccagccagcagcttgctgatcagtatcttgatttcgccagccacggtttccacgttatcagcgccaacaaactggcgggagccagcgacagcaataaatatcgccagatccacgacgccttcgaaaaaaccgggcgtcactggctgtacaatgccaccgtcggtgcgggcttgccgatcaaccacaccgtgcgcgatctgatcgacagcggcgatactattttgtcgatcagcgggatcttctccggcacgctctcctggctgttcctgcaattcgacggtagcgtgccgtttaccgagctggtggatcaggcgtggcagcagggcttaaccgagcctgatccgcgtgacgacctctccggcaaagacgtaatgcgcaagctggtaattctggcgcgtgaagcgggttacaacattgaaccggaccaggtacgtgtggaatcgctggtgcctgctcattgcgaaggcggcagcatcgaccatttctttgaaaatggcgatgaacttaacgagcagatggtgcaacggctggaagcggcccgcgaaatggggctggtgctgcgctacgtggcgcgtttcgatgccaacggcaaagcgcgtgtgggcgtggaggcggtgcgtgaagaccatccgctggcatcactgctgccgtgcgataacgtctttgccatcgaaagccgctggtatcgcgataacccgctggtgatccgtgggcctggcgcggggcgcgacgtcaccgccggggcgattcagtcggatatcaaccggctggcacagttgttgtaatttcagaaatttaataatgcccggtactcatgttttcgggtttatggtttctaatgaaatatattgaattatcataggattaggccggattaagcgtttacgacgaatccggcaagaagcaataagtacatggttagtttatatttgcagtccggtttgctttgcataccggattttctttttcttaccatcctgaagttttttcatcttccctgatttttcctcaccatcattggtcatttttcggttgacgcccttcggcttttccttcatctttacatctggacgtctaaacggatagatgtgcacaacacaacatataactacaagcgattgatgaggtaaggtatgagcttttttcacgccagccagcgggatgccctgaatcagagcctggcagaagtccaggggcaaattaacgtttcgttcgagtttttcccgccgcgtaccagtgaaatggagcagaccctgtggaactccatcgatcgccttagcagcctgaaaccgaagtttgtatcggtgacctatggcgcgaactccggcgagcgcgaccgtacgcacagcattattaaaggcattaaagatcgcactggtctggaagcggcaccgcatcttacttgcattgatgcgacgcccgacgagctgcgcaccattgcacgcgactactggaataacggtattcgtcatatcgtggcgctgcgtggcgatctgccgccgggaagtggtaagccggaaatatatgcttctgacctggtgacgctgttaaaagaagtggcagatttcgatatctccgtggcggcgtatccggaggttcacccggaagcaaaaagcgctcaggcggatttgctcaacctgaaacgcaaagtcgatgccggagccaaccgcgcgattactcagttcttctttgatgtcgaaagctacctgcgttttcgtgaccgctgcgtatcggcgggtattgatgtggaaattattccgggaattttgccggtctcgaactttaaacaagcgaagaaatttgccgatatgaccaacgtgcgtattccggcgtggatggcacaaatgtttgacgggctggacgacgatgccgaaacccgcaaactggtgggagcgaatattgccatggatatggtgaagattttaagccgtgaaggagtgaaagatttccacttctatacgcttaaccgcgctgaaatgagttacgcgatttgccatacgctgggtgttcgacctggtttataaatagtgtggcttttgtgaaaatcacacagtgatcacaaattttaaacagagcacaaaatgctgcctcgaaatgagggcgggaaaataaggttgtcagccttgttttctccctcattacttgaaggatatgaagctaaaacccttttttataaagcatttgtccgaattcggacataatcaaaaaagcttaattacgatcaatttgacctacatctctttaaccaacaatatgtaagatctcaactatcgcatccgtggattaattcaattataacttctctctaacgctgtgtatcgtaacggtaacactgtagaggggagcacattgatgagcacgtcagacgatatccataacacgacagccactggcaaatgcccgttccatcagggcggtcacgaccagagcgcgggggcgggcacaaccactcgcgactggtggccaaatcaactccgtgttgacctgttaaaccaacattctaatcgttctaacccgctgggtgaggactttgactaccgcaaagaattcagcaaattagattactacggcctgaaaaaagatctgaaagccctgctgacagaatctcagccgtggtggcctgccgactggggcagctacgccggtctgtttattcgtatggcctggcacggcgcggggacttaccgttcaatcgatggacgcggcggcgcgggtcgtggtcagcaacgttttgcaccgctgaactcctggccggataacgtaagcctcgataaagcgcgtcgcctgttgtggccaatcaaacagaaatatggtcagaaaatctcctgggccgacctgtttatcctcgcgggtaacgtggcgctggaaaactccggcttccgtaccttcggttttggtgccggtcgtgaagacgtctgggaaccggatctggatgttaactggggtgatgaaaaagcctggctgacccaccgtcatccggaagcgctggcgaaagcaccgctgggtgcaaccgagatgggcctgatttacgttaacccggaaggcccggatcacagcggcgaaccgctttctgcggcagcagctatccgtgcgaccttcggcaacatgggcatgaacgacgaagaaaccgtggcgcttattgcgggtggtcatacgctgggtaaaacccacggtgccggtccgacatcaaatgtaggtcctgatccagaagctgcaccgattgaagaacaaggtttaggttgggcgagcacttacggcagcggcgttggcgcagatgccattacctctggtctggaagtagtctggacccagacgccgacccagtggagcaactatttcttcgagaacctgttcaagtatgagtgggtacagacccgcagcccggctggcgcaatccagttcgaagcggtagacgcaccggaaattatcccggatccgtttgatccgtcgaagaaacgtaaaccgacgatgctggtgaccgacctgacgctgcgttttgatcctgagttcgagaagatctctcgtcgtttcctcaacgatccgcaggcgttcaacgaagcctttgcccgtgcctggttcaaactgacgcacagggatatggggccgaaatctcgctacatcgggccggaagtgccgaaagaagatctgatctggcaagatccgctgccgcagccgatctacaacccgaccgagcaggacattatcgatctgaaattcgcgattgcggattctggtctgtctgttagtgagctggtatcggtggcctgggcttctgcttctaccttccgtggtggcgacaaacgcggtggtgccaacggtgcgcgtctggcattaatgccgcagcgcgactgggatgtgaacgccgcagccgttcgtgctctgcctgttctggagaaaatccagaaagagtctggtaaagcctcgctggcggatatcatcgtgctggctggtgtggttggtgttgagaaagccgcaagcgccgcaggtttgagcattcatgtaccgtttgcgccgggtcgcgttgatgcgcgtcaggatcagactgacattgagatgtttgagctgctggagccaattgctgacggtttccgtaactatcgcgctcgtctggacgtttccaccaccgagtcactgctgatcgacaaagcacagcaactgacgctgaccgcgccggaaatgactgcgctggtgggcgggatgcgtgtactgggtgccaacttcgatggcagcaaaacggcgtcttcactgaccgcgttggcgtattgagcaatgacttcttcgtgaacttgctggatatgcgttacgagtggaaagcgactgacgaatcgaaagagctgttcgaaggtcgtgaccgtgaaaccggcgaagtgaaatacacagccagccgtgcggatctggtatttggttctaactctgtcctgcgtgcggtagcggaagtttacgccagcagcgatgcccacgagaagtttgttaaagacttcgtggcggcatgggtgaaagtgatgaacctcgaccgtttcgacctgctgtaatctgaccttcttcagcgactgtcttttaggcagtcgctgaagtttctttaccggcgtatagtgtccacaggaaaactacacactggatctctcatgtctgccgcaggaaagagcaacccactggcaatcagtggcctggttgtgctcacacttatctggagttatagctggattttcatgaagcaagtcaccagctacatcggtgccttcgactttaccgccttacgctgcattttcggcgctctcgttttattcatcgtccttttattacgtggtcgcggaatgcgcccgacaccgtttaaatacaccttagccattgccctgttacaaacctgcgggatggttggcctggcgcagtgggcgctggtcagcggcggagcggggaaggtggcgatcctaagctataccatgccgttctgggtggtgattttcgccgcgttgtttctcggtgaacgcctgcgacgtgggcaatatttcgcgatactgattgccgctttcggcttatttttggtgttgcagccgtggcaactcgatttctcttcaatgaaaagtgccatgctggcaatcctctccggcgtcagttggggggcgagcgcgattgttgctaaacgcctatacacccgtcatccgcgcgtggatttattatcgttaacatcctggcagatgctctatgcggcgctggtgatgagtgtggtcgctttactggtgccgcaacgtgaaattgactggcagcccaccgtgttctgggcgctggcctacagtgcgattctggcgacggcgctggcgtggagcttatggttgtttgtattgaaaaacttgcctgccagtattgccagcttaagcacgctggccgttcccgtttgcggcgtactcttttcctggtggctgctcggtgagaatccgggggccgttgaaggtagcggtattgtgctgattgtgctggcactggcgctggtgagccgtaagaaaaaagaagctgtcagtgtaaaaagcatctgaattttttcttcatgtggggcgatcgcttatttaacaaaataacgataatgccccaccatccgccagctaaacagcacatcttcttcctgcgcgcctgcgccaatgttatgtatcaccagcggcgtaccgtcgcgggcgaagccatctgacaccaccccaatatgtgccagtccgttatccagtcgccaggagacaatatcgcccgcttgatagtcactggggttcttgctgatggggcgtgttttatcgtggcgggtaaaccaggtttccagattaggcacccgacggtgatcgatgttgctgtccgggcgctttaactgccatttttgcgggtactcggcaaaattcttcgccatatcttcgtgcaccagtttctgcaaatcgaccttctggctgcgcaatgcacggatcaccacatcggaacataccccgcgttcttgcgggacatcaccgccaggataggtaagctgcatatacgccggatcgtaaaatagcgtgctgccgatttgctgtctggcaccgtctgcgatggcaaggttggtattggcctggatttgtaccacggttggtggaacggcgggagattttaaggagtggctggtaaatgccgttagcaggctgagcagcgccagtgaagctttcatctggttcgtccgtgaaaataagagtcacagattcgaccttccgggctaacgattgttctgtggagaaaatgtccagaagcggataaaaaactcctgaacaacgtgggagtttcagattactggcacagagtgccggatgcggagtgaacgccttatccggcctacaaaagcacgcatattcaatatattgcagagatttcgtaggcttgataaacgtagcgcatcaggcaattttgcgttcaaactcccggacaagccgggagtttggagtaggttattcccactcttgcaggaaacgctgaccgtactggtcggctaccagcagagcggcgtaaacctgatctggcgtcgcgccgccaggcatgttgtgaatggtttcaccttctgcacatgccgcttctgccacaattcgcattttcgccgggacatcttctttaatatccagttgagcgagagttattggcaaacctaccgcatggctaagtgcagctacggtttcgatttcctcaaccggtgcgttttccagaaccagctgcgtcagcgtaccaaatgccactttttcaccgtgataatagtgatgcgcgtccgggatagcggtcaggccgttatgcaccgcgtgagccgccgccagcccgccgctttcaaaaccaacgccgctcaaataggtgttcgcttcaatcacgcgctccagcgccggggttactacatgctgttcggcggcaagcatcgctttttcgccttcttccagcagggtgttgtagcacagttcagccagtgccagcgccgcctgggtgcacttgccgcccgccatggtggtcgcgccgctacgagagcaagcacgcgcttcaaaccaggttgccagcgcatcgccgatacccgctgctaacagacgtgcaggtgcgcccgcgacgattttggtgtcgacaatgaccatattcgggttatttggcaacagcagatagcggtcaaactcaccctcatcggtgtagataacagacaatgcgctgcacggtgcatcggtagaggcgatagtcggtgcgatcgctaccggaacacccatgaaatgtgccagtgctttggcagtatcgagggtttttccgccaccgataccgagaattgcgccacactgcgcagtctccgcgatgccacgcagacggtcgatctcattttgcgaacattcaccgccaaacggcgcaatttctactaccagtccagcatctttaaagcttttctcgacagtggattgagcaaaacctaaaacaaatttgtcacccaccactaaccagcgttctgccagcggcttcaggtattcgcccagacgattaatcacatcagcgccctggatgtatttacccggtgattgaataatgtggtccataattgctcctttagagatgagtagtgccaaatgcggcattccagtcgtgttcgaacttctctatagctgactctaccgcaggggtgttgagcatttgttgcgctacatctaagggcagggtgatggattcacatcctgccagtaaacagtccagcgcctgacgcggcgttttaaagctggccgccagcaccatgctttctggtgcgtgcatttctaacagcgcttgcagctcctgaaccgtacgaatgccgtccccgccctgggcatctacgcggttaacatacggagcaacgtattttgcccctgccagcgcggccagtaacccttgtgcagcactgtacactgcggtgccaagcgtagtaataccctcttttttcagcatcttaatggcggccagaccttcggaagtcaccgggattttcaccacaatgcccggaatggcgtcgcgcaggcgcttcgcttcttccaccataccctgcgcgtcacgactcatagtctgagcaaacagaatgccctcatcaccaatcgctttttgcagacgcggcagaacttcccatatggactccttgctggcagcgataatgctcgggttagttgtcaccccggcaatggggaatatgcgtgccagacgttcgacttctgcgacgttagcggtgtccagatacagttccatgatgtttccttttacagttccagttcatgttgcagcaggctggcgatagcgtcggcagaggcggcgttaaccagcgcgttacggaattcttcgtgcatgatgcggcgagcgaggcgcgagaaaatgcgcatgtgctgatcgcccgcagcgtgtttgttcagggttaacataatgatgaattgcgcttcatcatcgccccagcgcaccggcgcttgcagacgcgccacgctgatggtggattgctcaatgtgttctgatttgctgtgtggaatggcaaaactaaagcccagaccggtagagaaaacggcctcgcgcgcccataagtcggcttccagtttacgcggatagcggcagcggcccgccagcagcaggttatcggtcatgcctttgagcacttcttctttgctgcgccagtcactttccagcgtgatgcactcggcggtgaccagcggtgcgtcctgttgggtcatgcggaattgcgccagcaggtgttccacttccagcgaagtacggcaggccattgcttggttgagcaacttgcggcactcacgctatcaagttgcgccatccgcgctttcgccgccggaattgatggtgcgctcatgctgagttcatccagccctaagccgaccagcaacggcagcacggaacctttcgctcccagctcaccgcacagaccaatccatttgccctggcgatgcaccgcctgcacggcgtaatcgagcgcccgcaagaatgccggattcaggctgttgtagtgacgagtaaccttagcgttatcgcgatccactgccagcagatattgcgtcaggtcattactaccaatactaaagaaatcagtctcttcgcagcattgatcgatgatgaacatcaccgacggtacttccagcataatgccaagctggatcttctcatcaaacggaatgtgttcgttacgcagttgctgtttggcttccgccagtttttctttcacccataagatctcttccattgaggagatcatcgggatcatgattttcaggctgccgtgagcggaggcgcgcaggatcgaccgtagttgtgtggtgaacagcgaggcgtattcttcataaatacgcacagcgcgataaccgaggaacgggttagcttctgccggaatgttcagataatcaacgggtttgtcgccgccaatgtccatagtgcgcacaataatgctgcgtccgttggcagactccagcgcctgacaaaaaatgttgtacagctcgctttcgcccggtgcactggtgcgatccatatagagcatttcagtgcggaacaaaccaacgccttccgcaccattgccgaatgcggcctgcgcttccacggagtgagcgatgttagcggcaatttcaatgcggataccgtcagcggtacgggcttgttgggtcagccagacacgctgttgctcacgcagggcgtcctgtacgcgggcttcttgctgataataacgagctacggcttctcctggctcaaccacaatcgccccagcgttgccgtcgatataaatcgtttgatgctgccacggagtaagggcatcaatatctacaccaaccagtgtcggaatgttgaacgaacgggcaagaattacggtatgtgaggtggtgccgccacttttcagtaacagacctttgaggtgatttttatccagttcgaggaactggctgggagtcagttcatcagccatacaaatggcgggctgcgtcagtttgcccggtgccgggaagcgttgctcaccgtagatttgctggagtaactggaagcagacgtcgcgtacgtccagggcacgttcttgcaggtagctgctgctggaacgggcgaactcttcgcaaaagtgattcgcactggtgacaatcgcttcggcgcagcttaatccggcgctgacgcctgccagtaaatgttcgcgcagggaagtatcgccagccagggatcggtgcgcttccagaatcgcgctggtggcaccgtcgctatccagcagacgaaactcaatgtttttcagtaccagcgtcaggccgttttccagtgcggattgctcggcgtcaacgcttttggctgcgggaagattacccagcgcattgagatctaaagaagagatcggcgtcagaatgccgcctgcactaccgctgcacacggtgcgggcgcggataatttgcggattcagattggtcagtgaaaccggcagtggttccagttcgtcagatttaacttccgccagcggcgcatcgcagtgggggaattcatcgcgcagccattggcttaaacgctggtgcgcttcctgttcgtcggccccggaaatcagtaactggcagttatcgcccgccagcgtatcggtgccaatcagcgcaagggcgcttttggcgttgcccttgcggtcagtgcgcaggttatgccactcaatttgtgatgaaaaagtattacacagcgtttcaacgtggcttgccggacgtgcatgtacgccgttaggtagctcacaaataaattccacaatcagggccattgcctctctcccggtacggttttctgtttacaggataagagcgcacggcaacggcctgccatgtgacaaatctgccaaaagctggacaaatgtaatgtaaccgtcaatttgcgacgcgtctcacaagacgctgttttgcggcatgcttccggtttatcgcaagttatgaggcggatcgcatttttgtactgatattacaaaagtccagtaaatggcctttttatccactgtttgctccgcctgcgattgcctattgtttcctccatcaaaaatatggacatgggctttcgcaagcccgggagcagcttatgaatgagttggtgcagatcctgaaaaatacccgtcagcatttaatgacgggcgtttcacacatgattcccttcgtgatatcgggcggtattttgctggcggtttccgtcatgttgtatggcaaaggcgcagtgccggatgccgtagccgatccaaatctgaaaaaactgtttgatatcggcgttgcgggcttgacgctgatggtgcctttcctcgcagcgtacatcggttattccattgcagagcgttctgcgctggctccgtgcgctatcggtgcctgggttggtaacagctttggtgcgggcttctttggtgcactgatcgccgggattatcggcggcatcgtggtgcattacctgaagaaaattccggtgcataaagttctgcgctcggtgatgcctatcttcattattcctatcgtcggcacactgattaccgcaggcatcatgatgtggggcttgggcgagcctgtaggggcgttgaccaacagcctgactcagtggcttcaggggatgcagcagggcagcattgttatgctggcggtgatcatggggctgatgctggcgttcgatatgggcggtccggttaacaaagtggcctatgccttcatgctgatttgcgttgctcagggtgtttataccgtggtggccattgctgccgtgggtatttgtatcccgccgctggggatggggctggcgacgctgattggtcgtaaaaatttctccgcagaagagcgcgaaaccggcaaagcggcgctggtgatggggtgcgttggggttactgaaggggcgattcctttcgccgctgccgatccgctgcgtgtcattccttccatcatggtcggttctgtttgtggtgcggtaactgcggcgctggtcggtgcgcagtgctatgcaggctggggtggtctgattgtgctgccggtggttgaaggcaagctgggttatatcgcagcagtggctgtcggagcagtggtgacggctgtttgtgtgaacgtgctgaaaagtctggcgcgtaaaaatgggtcttcgactgatgaaaaagaagacgacctggatttggatttgaaattaattaattgaggaacgagccatgacgaaaattattgcagtaaccgcatgtccttcaggtgttgcccatacctatatggcagcagaggcgctggaaagtgccgcgaaagcgaaaggctgggaagtgaaagtagaaacccaggggtcaattggtctggaaaatgaactgactgcggaagatgtggcgagcgctgatatggtgattctgaccaaagatatcggcatcaagtttgaagagcgttttgctggcaagaccatcgtgcgcgtcaacatcagcgatgcagtaaaacgtgctgacgccattatgagcaaaattgaagctcacctggcgcaaaccgcttaagttcttctcccgctcgcaagggcgggttcgctttcccacaggagttcctcatgacgaatcgtatctctcgcctcaaaactgcactgtttgccaatacccgtgaaatctcgctggagcgggcgctgctttataccgccagccatcggcaaaccgaaggcgaaccggtgatattgcgccgggcgaaagcaacagcgtatatccttgaacatgttgaaatttcgattcgtgatgaagaactgattgccggtaaccgcaccgtaaaaccgcgcgctgggattatgtcgccggaaatggacccttactggctgctgaaagagctggatcaattcccgacgcgtccgcaggaccgctttgctatcagtgaagaagataaacgtatctaccgtgaagagttgttcccgtactgggaaaaacgttcgatgaaagatttcatcaacgggcagatgacagatgaagtaaaagccgcgaccagcacgcagattttcagcatcaaccagacagataaaggccaggggcacattattattgattacccacgcctgttgaatcacgggctgggggagctggtggcacagatgcagcaacattgtcagcaacagccggagaatcacttttatcaggcagcgctgttactgctggaagcctcgcagaaacacattttgcgttacgccgaactggcggaaacgatggcggcaaactgcacagatgcccagcgtcgcgaagagctgctgactattgcggagatctcccgccataacgcgcaacataagccgcagacgttctggcaggcgtgccagttattctggtacatgaacatcattctgcaatacgaatccaacgccagttcgctatcgttggggcgcttcgaccagtatatgttgccgttctatcagacatcattaacccagggcgaagatgcggcgttcctgaaagaactgctcgaatctttatgggtgaaatgcaacgacatcgtgctgttgcgctccaccagtagcgcgcgttatttcgccggtttcccgaccggctataccgcactgctcggcgggttaaccgagaacggacgtagcgcggtgaacgtgctttcgttcctttgccttgacgcctatcaaagcgtgcaattaccgcaaccgaacctcggcgtgcgcactaacgccttgatcgacacgccgttcctgatgaaaaccgccgaaaccattcgcctcggcaccggtattccgcaaatctttaacgatgaagtggtggtgccagcgttcctcaaccgtggcgtttcgctggaagatgcgcgcgactattccgtagtgggctgtgtggaattatctattcccggcagaacctacggcttgcatgacatcgcgatgtttaatctgctgaaagtgatggaaatctgcctgtatgaaaatgaaggcaatgctgcgctgacttatgaaggtttactggagcagatccgcgccaagatcagccactacatcaccctgatggttgagggcagcaatatttgtgatatcggccatcgcgactgggcacctgtaccgctgctctcgtcttttatcagcgattgtctggaaaaaggccgcgatattaccgatggcggcgcgcgttataacttctccggcgtacaggggatcggtatcgccaacctgagcgattctctccatgcgttgaaagggatggtttttgagcaacagcgtttaagttttgacgaattgctgtcggtattaaaagccaactttgcaacgccagaaggcgaaaaagtccgtgctcgcttaattaaccgcttcgagaaatacggtaacgatatcgacgaggtggataacatcagcgccgaactgttacgccactactgcaaagaagtggaaaaataccagaacccgcgcggcggttacttcacgccgggatcgtataccgtttctgctcacgtcccgttgggatcggtggttggcgcgacgccagacggtcgttttgccggggaacaactggcagacggcggcttgtcacctatgctgggccaggacgcacaagggccaacagcggtactgaagtcagtcagtaagctcgataacacgctgctgtctaacggtacgttgctgaacgtgaaattcactccggcgaccctggaaggtgaagcgggattacgcaaactggccgacttcttacgggcgtttacccagcttaagttgcagcatattcagtttaacgtggtgaacgccgacacgttgcgggaagcgcaacagcgcccacaagattatgccgggctggtggtgcgcgttgccggatacagcgccttctttgtcgaactgtcgaaggagatccaggatgacatcatccgccggacagcgcatcagctgtaacgttgtggaaacgcgccgcgatgatgtggcgcgcattttcaacattcagcgttattcactgaatgacggcgagggcattcgtacggtggtcttttttaaaggctgtccgcatctttgcccgtggtgtgctaatccggagtcgatctccggcaaaatccagacggtacgcagagaggcgaaatgtctgcactgtgcgaaatgtttgcgtgatgcggatgaatgcccctccggggcgtttgaacggattggccgcgatatcagccttgacgcgctggaacgggaagtgatgaaagatgacattttctttcgcacgtccggcggcggcgtcacgctttctggcggcgaagtgttaatgcaggcggagtttgctacccgttttttacagcggctgcggttgtggggcgtgtcatgcgccattgaaactgccggagacgcgccagccagcaagctattaccactggcgaaattgtgcgatgaagtgctgttcgatttaaaaattatggacgcgactcaggcgcgggatgtggtgaagatgaacctgccacgcgtgctggagaatctgcgtttgctggtgagtgagggtgtcaacgtgatcccgcgtttaccgctgatccctggtttcacgctcagccgggagaatatgcagcaggcgctggatgtactgatcccgctgaaaatcaggcagatccatctgttaccgtttcatcagtacggcgaaccgaaataccgcctgctggggaaaacatggtcgatgaaagaggtgcctgcgccgtcgtcagccgatgtgacaacgatgcgcgaaatggcagaacgggccggatttcaggttaccgtgggaggttaaaatggcatacctggtggcagtaaccgcctgcgtaagcggcgtggcgcatacttatatggcggcggaacggctggaaaagttgtgccagttagagaagtggggcgtcagcattgaaactcagggcgcgctgggaacggagaatcgtttagcggacgaggatatccgtcgggcggatgttgctctgttgattacggatatcgagcttgccggtgccgagcgatttgaacattgccgctatgtgcaatgcagcatctacgcattcctgcgtgagccgcagcgggtaatgagcgcggtgcgcaaagtgctttctgcgccgcagcaaacccatcttattctggagtagtcggtttttctgtcagttggctgtggtactgccggcgatattccgacggcgagcgttcggtgtttttacgaaacagacggcagaagtagttgctgtcgacaaagccgcaggcgtgcgccacttcttttaccttcaggtcatagcctttcaataacgtcttagcgtgctccagtcgcgtgtgattcaggtattcgttaaaaccaatggcccccgttttttgaaacaggtgcgagagatagtttggtgaaatatagaatgcctgtgcgacagattcgcgggtaagcgcggaggcatagcgttcgtcgatataatcgcgaatagcttcaaatagtgcctggctgcgtgaggcggtctggatttggctgccgagcaaatcgcggcagtggctaagcaggctggcgacgataagccttgccgtttgctgctcctgcggctgcatttgcatttcattgagcgtttgtagcagaaaagaacctatgcgtgggccgcgccgggcgacgtgttgcttcgccagattttgatattgtttgccatcccattgcacgacgctgaagccgagttgctgtttgccaaacagcacgctaaaggtagtagcgggggcttgccattgtggaaaattccagccaccagcgggaacgtacagcacatcgccgggaactaacgttgctccagcgccggtatcaacaaactcaccttccagcactatttccagccgtggaaaatcgacctgatacgcaagatcgggcgccggaccgttactgctggcaaagtaaatctggcgcagggacagcgggccgttgatcaggcgggagagcagatagctgacgtcgtgatacatgttattcccttaggtatgtagacgggaaaacagtaactggcattattaaaaaaggccacctgaaaagtgtggcctgaggggagttcgatgtaaacattgcggcagttgtattgccggatgtggcgtaaacgccttatccagcctaccgccgcgatctgtaggccggataagacgcgtcaagcgtcgcatccggcaaatagcgcctggctgataattactgattacccacctgatcgccatacggcagtgtgtcgtaatcgatcagcgcgtttttcttgtacgggttaccaatccagcgggtagtttctttgaactgcggattcaccactgaacgggttggatcgtaaccgtcgtaagataagcccgccaaatctgaccaggtgtggatcagttccgccaggctgtatttacgatcgacatcctgtgagaaatcacggggatgagtcgcttgccatttttccgacgtccacagcaggaacggaatggtgtacatatgacgcgtcgggttgtcctcattacgcccctgggttttatgaggcggcgtgtcgtaaacctcttcaccgtggtcagagaagtaaaccaggaatccgttcgggtctgccgctttaaagtctttaatcaggctggcaaccacatgatcgttatacaggttagcgttgtcataatcgttatatgattccagctcttccgcgtttaatcccggcggaacatgatcggtattgccatcaaacttgccctgattttccgggtagcggtatttgtatttgatatgcgtacccagcagatgaacaatgatcagtttcttcggcgcagggtccttcagcacttcctggaacggcttcagcacgttagtgtcgtattcacgcgcactctgcgtacgttgctggttcatgtagtactgcttgtcggtctggcgcgaaaataccgtcagcatggtattgcgggcggtcatcgtctgctggttggtgatccagaaggttttataacccgcctgtttcatcatgttcatcagcgacggctgcgtcagatacagatccgggttcttttcattggcaaaggtcagcgcctgttgcagtatttcaatggtgtaaggacgagacgtcaccacgttattaaacacggtcagattcggatcggttttatgcagcgcatccagctccggcgtggtttcacgcggataaccgtacagactcatgcgtccacgctgggtcgattcgccaatcaccagcactaaggtgcgcggttcgttacctgattcatctttgaaattagccagcggcggcaatgcattattttcattcagtagctttgttagcgagtttagttgctgacgatactgataatagccggtcaggaattgccacggtgcggcaggctccatacgcgaggccaggttatccaatgttttctcaaacggcttgtttttgataaacgtattcatggcgatcggatgcagaatcaagccataaagcagggcaaaagagacaacataacgccacggctttggaatatagaccgggcgcaggcgtgtccacagcagaactgccaccgccgtataggccagcgcgataagcacaattttcaggctgaaatactggcttaaatactcgctggcttcgttggtgttggtttcgaacatcacaaacaggacgctctgcgagaactcctgaccgtagatgacgtagtagcacagcgccgccagagaggccgcccatagcaccacgccgatcactgcggcaataattttgatccgcttcgggaagaggaataccgggattaaccacagcgagctgaataacagcgagtcgcgaatgccgttggtgccactataaccactgatgtaaataatggcctgtagcagagtagagaaaaaccaaaagtagagcagtgcccaacccagggctttccagctaaaaagaggtttagcctggacttctgtggaatgcatagtaagaacctgtcttgaaaaaaatatcgccgaatgtaccgacaattccttaaggatatctgaagggatatccagaatttgaataaaatgcagacagaaatatattgaaaacgagggtgttagaacagaagtatttcagaaaaccctcgcgcaaaagcacgagggtttgcaggaggggaagattagccggtattacgcatacctgccgcaatcccggcaatagtgaccattaacgcttgctcgacgcgaggatccggttcctggccctctttttctgcctggcgggagcggtgcagcaactcggcttgcaatacgttcagcgggtcggtgtaaatattccgtagctgaatagactctgcaatccacggcagatcggccatcagatgggaatcgttggcaatcgccagcaccactttgatgtcttcttcttgcaggttgcgtaactctttacctaacggccacagtgctttgtctaccagacgttgatcatagtattccgccagccacaggtctgctttggcgaagaccatctccagcatgccgagacgcgtcgagaagaatggccaatcgcggcacatggcttccagctcgctctgtttgccatcttcgaccactttttgcagcgccgtacctgcacccagccaggcggggagcatcaggcggttttgcgtccaggcaaaaatccacggtatggcgcgcagcgactcgacgccgccggttgggcgacgtttcgccggacgtgaacccaacggcagtttgcccaattcttgttccggcgtagcggagcggaagtaaggcacaaaatctttgttttcacgtacgtagccacggtagagatcgcaggagatgactgacagttcatccataatgcgacgccagctctctttcggctcaggtggtggcagcaggttggcttccagaatcgccccggtgtatagcgacaggctgctgacggtgatttctggcagaccatatttaaagcggatcatctcgccctgttcagtcacgcgcaggccacctttcaggcttcctggcggttgtgacagcagcgccgcatgagcaggtgcgccgccgcgaccaatggaaccgccgcgaccgtggaacaacgtcagctcaatacccgctttttcgcaggttttgattaatgcatcctgtgcctgatattgcgcccaggaagctgccatcactcccgcatcttttgctgagtcggaatagccaatcatcaccatctgtttgccctgaatcaggccacgataccagtcaatattgagcagctgggtcatgacatcgttggcgttgttcagatcatcgagggtttcaaacagcggagcaaccggcatcgcaaacccgatacccgcttctttcagcagcaggtggacagccagtacgtcggacggcgttttcgccatcgagatcacgtaggcggcaatggagccttgcggcgcttcggcaatcacctggcaggtatcgagcacttcgcgcgtttcggcgcttggttgccagttgcgcggcagaagcggacgtttggagttcagttcgcggatcaggaacgcctgtttgtcggcctctgaccagctttcgtagtcgccgataccgaggtagcgggtcagctcgcccagcgcttcggtatggcgggtgctctcctgacggatatcaatacggaccagcggtacgccgaaacatttcacgcggcgcagggtgtcgagcagatcgccgttggcgataatacccatgccacacgcctgaagtgactggtagcaagcgtagagcggttcccacagttcttcgttttgtgtcagcagcccttctggttttggcagttcttcgcctttcaggcgcgcttccagccatgcctgtgtcgccatcaggcgagaacgcaggtttttcatcagatagcgatacggttctgcggcaccttcttcgccaaccagcgccagcagttcaggggtcgcttcaaccatcgacagttcagaaaccagcacctgaatatctttcaggaacaaatcggtggctttccagcggctgagtagcaggacgtggcgggtgatatcggcagtgacgttcgggttgccgtcgcggtcgccgcccatccacgaagtaaaacggaccggaacaaattcgacgggcagtttgtagccgaggttctcttccagttgttcgttcagttcgcgcaggtaatttggtacgccttgccacaggctgttttccactacggcaaagccccatttggcttcatctaccgggcttggacgcagcttacggatttcatcggtatgccatgactgggcgattaactggcgcaggcgacgcatcagctggttgtgttcgtagtcagcgatatctttgttatcgagctgttttaagcaggcgttcacttccaccattttgtggatcagtgtacgacgggtaatttcggtagggtgagccgtgaggaccagttccagcgacagcgattccactgcttttttgatggtgtcttcgctcagttccggctggtttttcagtttacgcagggtgcgggcgatcacttccgggttgctggcagcttcgcctttcggcgaaatgctgtggtattgctcggcggtgttggccaggttcaggaactgactaaacgcacgcgcaacgggcagcagctcgtcgttcgacaaattttgtaaggtggtgagtaactcctggcggttagcatcattgccagcgcgtgaagatttggacaacttacggatagtttctacgcgttcaagaatgtgttctcccaacgcatccttgatggtttctcccagcactttgccgagcatactgacattactacgcaatgcggaatattgttcgttcatattaccccagacaccccatcttatcgtttgatagccctgtatccttcacgtcgcattggcgcgaatatgctcgggctttgcttttcgtcgtcttttataaagccacgtaaaagcggtgacgtcaaatgctgcgaaatcgcttcagcaaacgaataaatagcaggaatttacgtcattaaattcacgacgctttaaataagcgtaacttatggaaatgttaaaaaatcgccccaagtaacaccaaaggtgtaggtcggataagatgcgcaagtatcgcatccgacattattgcggcactggagtttgacaacagtgccggatgcggcgcgagcgccttatccggcctacgttttaatgccagcaaaaatggtgaattacctgggttatcagttcgcgggtgggcttgataaaccgtgtttccagatattcatcaggttgatgagcctgattaattgagccaggccccaacaccagcgtcgggcataacgtttgaataaacggcgcttcggtacagtagttcaccacttcggtctttgctccgagcaatttctcaactacttcaaccagttgatgattcggtgggcattcatagccagggatcggcggatgcagctcgtcgaccgtcagacgacccggccagcgttcgctcaccggagccaatgcatcgttgagcaaaccattaagttcattgagtgtcatgccaggcagcggacgaatatccatatgcaactcacagcaagcgcaaatacggttagaagcgtcgccaccgtgaatatgcccgaggttgagcgtagggtatggcacggtaaacgcttcgtagtgataacgttctttcaggttatcgcgcaattgcaaaatatgcccgatggcgtcgtgcattagttcgatagcgttaactccgcgtgctggatcgctggagtgccccgactggccctgaatacggatggcgttagagatatgacctttatgtgcgcgtaccggttgtagtgacgtcggttcgccaatgatggcgcaatccgggcgcagggcggtagtttcggcaaaataacgcgctccggccatactggtttcttcatcagcagtcgccagaatgtagagcggttttttcagtttcgtgacgtcgacatcgcgtagcgcatcaaggataaacgcaaaaaagcctttcatgtcggcggtgcctaagccgtaaagcttgccgtcatgctccgtcagtgtaaacggatcacgcgtccagcgaccgtcatcaaatggtaccgtatcggtatgccccgccagcaacaagccgccagccccctgtccgatacttgccagcatattaaatttgttgcgagttcctggcacaggctgcacttccacattgaagcctaaatctttaaaccagtccgccagcagagtgattaaatctgcattgctttgatcgagtgcctcttccgtggcgcttattgaaggtgtggcaatcagagcacggtaaatctcgataaatggcggtaatttgtttttcattgttgacacacctctggtcatgatagtatcaatattcatgcagtatttatgaataaaaatacactaacgttgagcgtaataaaacccaccagccgtaaggtgaatgttttacgtttaacctggcaaccagacataagaaggtgaatagccccgatgttgaatacgctgattgtgggtgccagcggctacgctggcgcagagctagtgacctatgtaaatcgccatccgcatatgaacataaccgctttgactgtttcagcgcaaagcaatgatgcgggaaagttaatctccgatttgcatccgcagctaaaaggcatcgttgatctgccgttgcagccgatgtcggatatcagcgagtttagcccaggggtggacgtagtgtttctcgccaccgcccatgaagttagccacgatttagcgccgcagtttcttgaagcgggctgcgtggtgttcgacctttccggcgcgtttcgtgttaacgacgccaccttctatgaaaaatattacggctttacccatcaatacccggaactgttggaacaggcagcctacggtctggcggagtggtgcggtaataaattaaaagaagcgaatttgattgcggtgccgggctgttatccgacggcggcacagctggcgctgaaaccgttgattgatgccgatcttcttgacctcaatcagtggccggtgatcaacgccaccagcggcgtgagcggtgcagggcgtaaagcggccatttcaaacagcttttgtgaagttagcctgcaaccgtatggcgtctttactcatcgccatcaaccagagatcgccacacacctcggtgctgacgttatcttcaccccacatctgggcaatttcccgcgcggcattctcgaaaccattacctgccgcctgaaatcgggtgtgacccaggcgcaagtcgcgcaagtgttacagcaggcgtatgcccataaaccgctggtgcggctgtatgacaaaggcgttccggcgctgaaaaatgtcgttgggctgccattttgcgatatcgggtttgccgttcagggcgagcatctgattattgtggcgaccgaagacaacttactgaaaggcgcggcggcacaagcggtacagtgcgccaatattcgtttcggctatgcggaaacgcagtctcttatttaagggtgcaatgatgaatccattaattatcaaactgggcggcgtactgctggatagtgaagaggcgctggaacgtctgtttagcgcactggtgaattatcgtgagtcacatcagcgtccgctggtgattgtgcacggcggcggttgcgtggtggatgagctgatgaaagggctgaatctgccggtgaaaaagaaaaacggcctgcgggtgacgcctgctgatcagatagacattatcaccggagcactggcgggaacggcaaataaaaccctgttggcatgggcgaagaaacatcagattgcggccgtaggtttgtttctcggtgacggcgacagcgtcaaagtgacccagcttgatgaagagttaggtcatgttggactggcgcagccaggttcgcctaagcttatcaactccttgctggagaacggttatctgccggtggtcagctccattggcgtaacagacgaagggcaactgatgaacgtcaatgccgaccaggcggcaacggcgctggcggcaacgctgggcgcggatctgattttgctctccgacgtcagcggcattctcgacggcaaagggcaacgcattgccgaaatgaccgccgcgaaagcagaacaactgattgagcagggcattattactgacggcatgatagtgaaagtgaacgcggcgctggatgcggcccgcacgctgggccgtccggtagatatcgcctcctggcgtcatgcggagcagcttccggcactgtttaacggtatgccgatgggtacgcggattttagcttaagttttgttggccggaggcgcagctttccggcattgaatttcaaaataaggaaacagagttatggcactttggggcgggcgttttacccaggcagcagatcaacggttcaaacaattcaacgactcactgcgctttgattaccgtctggcggagcaggatattgttggctctgtggcctggtccaaagccctggtcacggtaggcgtgttaaccgcagaagagcaggcgcaactggaagaggcgctgaacgtgttgctggaagatgttcgcgccaggccacaacaaatccttgaaagcgacgccgaagatatccatagctgggtggaaggcaaactgatcgacaaagtgggccagttaggcaaaaagctgcataccgggcgtagccgtaatgatcaggtagcgactgacctgaaactgtggtgcaaagataccgttagcgagttactgacggctaaccggcagctgcaatcggcgctggtggaaaccgcacaaaacaatcaggacgcggtaatgccaggttacactcacctgcaacgcgcccagccggtgacgttcgcgcactggtgcctggcctatgttgagatgctggcgcgtgatgaaagccgtttgcaggatgcgcttaagcgtctggatgtcagcccgctaggctgtggcgcgctggcgggaacggcctatgaaatcgaccgtgaacagttagcaggctggctgggctttgcttcggcgacccgtaacagtctcgacagcgtttctgaccgtgaccatgtgttggaactgctttctgctgccgctatcggcatggtgcatctgtcgcgttttgctgaagatctgattttctttaacaccggcgaagcggggtttgtggagctttctgaccgcgtgacttccggttcatcattaatgccgcagaagaaaaacccggatgcgctggagctgattcgcggtaaatgcggtcgggtgcagggggcgttaaccggcatgatgatgacgctgaaaggtttgccgctggcttacaacaaagatatgcaggaagacaaagaaggtctgttcgacgcgctcgatacctggctggactgcctgcatatggcggcgctggtgctggacggcattcaggtgaaacgtccacgttgccaggaagcggctcagcagggttacgccaacgccaccgaactggcggattatctggtggcgaaaggcgtaccgttccgcgaggcgcaccatattgttggtgaagcggtggtggaagccattcgtcagggcaaaccgctggaagatctgccgctcgacgagttgcagaaattcagcccggtgattgacgaagatgtctatccgattctgtcgctgcaatcgtgcctcgacaagcgtgcggcaaaaggcggcgtctcaccgcagcaggtggcgcaggcaattgcttttgcgcaggcgcggttagagtaatttgtttatattgctcccctgaaaatggggagcttaccacgcctacaaagtgcgacacttcgtaggcggataaggcgtttacgccacatcaggcagaaatttgtcagcattctggtgagcttaaatttaacgcccaaccagaaccattatttgtcacattcctttttatcattgtgtcttctttaccttcacactccccataaaaatcatattttcaatacatcaatcaatacatattttaattaattgaata

SEQ ID NO: 207 - DNA, 235996 bp, Escherichia coli
  modified_base (2)..(2): a, c, t, g, unknown or other
  modified_base (54714)..(54714): a, c, t, g, unknown or other
  modified_base (54722)..(54722): a, c, t, g, unknown or other
  modified_base (157338)..(157338): a, c, t, g, unknown or other
  modified_base (230361)..(230361): a, c, t, g, unknown or other
anttcatttctattgttgtgcttatttttaatgattaatggagtttgttatgtgattatttaacgtgttgttttaacgatggtggttaattattcaggtggtttttgagggtattttttctcctcggcggaaatttttatttttaatgtgatcacggttgaataatcgctctttctctattgtatggtagtaggcgtaaaattaagtttgaagcgtctatttacaacacaggagattgcaataatgaaaattattgctgcagatgtttttgttacttgcccagggcgtaatttcgttacgcttaaaataaccactgaaagcggactttgtggattaggagatgccacgttaaatggtcgcgaattgtcggtcgcttcttatctgaaagatcatctttgtccacaactaattggccgcgatgccagccgtatcgaagatatctggcaattcttttataaaggtgcttactggcgacgtggccccgtcacgatgtcagccatttctgccattgatatggcgttgtgggatatcaaagctaaagcggcaaatatgccattgtatcaactgcttggtggtgcttctcgtgaaggcgtgatggtttattgccacaccaccgggcggacgattgatgaagtccttgaagactatgcaaagcaccagcagatgggctttaaggcgattcgtgtgcagtgcggtgtaccgggtatgcaaactacttatggcctggcgaagggcaaaggcctggcgtatgaaccggcaaccaaaggcctgtggccagaagagcagttgtggtcttcagaaaagtatctcgattttacgccgaagttatttgaagcggtgcgtaataagttcggttttaacgaacatctgttgcatgacatgcaccatcgcctgacccccatcgaagcggcgcgctttgggaagagcattgaggattaccgcctgttctggatggaagatccgacgcctgcagagaaccaggaatgttttcgtctgattcgccagcataccgtgacgccgattgcggtcggtgaagtgtttaacagtatctgggactgcaagcagttaatcgaagagcagctgattgactatattcgcacgacgatcacccatgcaggcggcattaccgggatgcggcggattgccgattttgcatcgctttatcaggtacgtaccggttcgcatggcccttcagatttatcgcctgtttgtcatgcggcggcgctgcattttgacctatgggtaccaaattttggcgttcaggagtacatgggctattccgaacaaatgcttgaagttttcccgcacagctggcgcttcgaggaaggttatatgcacccaggcgatgaaccggggctgggtatttctttcgatgagaaactggcggcgaaatatccgtatgacccggcgtatctccccgtcgcacgactggaagatggcacattgtggaactggtaataacggttcgcttaattattttctgaatagtcatcaaatcgattaattccgctcaaggagctaaaaatggacgttgatgtgtcaaccagtgttgcgggtaataaaccgcaacggattcgtcgtattcagacagtgaccctggttttattatttatggcggggatcgttaattttctcgaccgttcgtcattgagcgtggcaggtgaagcgattcgtggcgagttaggattatcggcgacagagtttggtgttttgctttctgcattttctctgtcttatggtttttcacaactaccttccggtattttgctagaccgctttggcccacgaattgttttaggcgcaggcttaatattctggtcattaatgcaggcattaacaggaatggttaattcttttagccactttattttaatgcgtatcggtctgggtattggcgaagcgccatttatgcctgcgggagtaaagtcgatcaccgactggtatgcacaaaaagaacgcggcacggcgctggggatttttaactcatctaccgttatcggtcaggctatcgcgcctcctgctcttgtattgatgcagctggcatggggctggcggacgatgttcgttatcatcggcgtggcagggattctggttgggatctgttggtacgcgtggtatcgcaaccgggcgcagtttgtcctgactgacgaagaacggacgtatctctccgcgccggttaaaccgcgtccacagctgcaatttagcgagtggctggcgctgtttaagcatcggacaacctgggggatgattttaggtttctctggcgtcaattataccggttggctctacatcgcgtggttacccggttatttgcaagccgagcaaggtttcagtctggcgaaaaccggttgggtggcggcgattcctttcctcgcggcggcagtcgggatgtgggttaacggtattgttgtcgatcgactggcgaaaaaaggctacgacctggcgaagacgcgtaaaacggctattgtctgcggtttgatgatgtcggcattaggcacgttgctggtcgtgcaatcttcctcgccagcccaggcggtagcgtttatctcaatggcgctattctgcgtgcatttcgctggaacgtctgcatgggggctggtgcaggtgatggtgtcagaaacaaaagtggcttccatcgccgggattcaaaactttggcagttttgtttttgcttcctttgctccgatcgtaaccggttgggtagtggataccacacactcgtttaatctggcgttggttatcgcggcctgtgtgacgttcaccggggcgctgtgttacttctttattgtcaaagatcgcattgagtaatcgttactatcaggctctcttgctgtgggcctgtagaataaaaaaagcggatcctggagatccgcaaaagttcacgttggctttagttattcgagttgagaaactctcgaaacgggcagtgacttcaagggttaaaagaggtgccgctccgtttctgtgagcaattatcagtcagaatgcttgatagggataatcgttcattgctattctacctatcgccatgaactatcgtggcgatggaggatggataatgaatattcgtgatcttgagtacctggtggcattggccgagcaccgccattttcggcgtgcggcagattcctgccacgttagccagccgacgcttagcgggcaaattcgtaagctggaagatgagttgggcgtgatgttgctggagcggaccagccgtaaagtgttgttcacccaggcgggaatgctgctggtagatcaggcgcgtaccgtactgcgtgaggtgaaagtccttaaagagatggcaagccagcagggcgagacgatgtccgggccgctgcacattggtttgattcccacagttggaccgtacctgctaccgcatattatccctatgctgcaccagacctttccaaagctggaaatgtatctgcatgaagcacagacccaccagttactggcgcaactggacagcggcaaactcgattgcgtgatcctcgcgctggtgaaagagagcgaagcattcattgaagtgccgttgtttgatgagccaatgttgctggctatctatgaagatcacccgtgggcgaaccgcgaatgcgtaccgatggccgatctggcaggggaaaaactgctgatgctggaagatggtcactgtttgcgcgatcaggcaatgggtttctgttttgaagccggggcggatgaagatacacacttccgcgcgaccagcctggagacgctgcgcaacatggtggcggcaggtagcgggatcactttactgccagcgctggctgtgccgccggagcgcaaacgcgatggggttgtttatctgccgtgcattaagccggaaccacgccgcactattggcctggtttatcgtcctggctcaccgctgcgcagccgctatgagcagctggcagaggccatccgagcaagaatggatggccatttcgataaagtgttaaaacaggcggtttaaaccgtttaacgcagctacccgataggcttccgccatggtcgggtagttaaaggtggtgttgacgaagtactcaatagtgttgccgccacctttctgttccataatcgcctgaccgatatgaataatttcggcagcgcgctcgccaaagcagtgaatacccagaatctcttttgtttcccgatggaacaaaattttcagcgtgcccacgttcatgccgacgatttgtgcgcgtgccagatgtttaaactgggcgcggcccacttcatatggcactttcatcgcggtcagctgctgttcggttttgcccacagagctgatttccgggatggtgtaaatgccggtagggatatcttcaatcagatgcgcggtggcttcgccttttaccagcgcctgcgcggcaatgcgcccctggtcataggccgctgatgccaggctcggataaccaatcacgtcgcccaccgcgtaaacgtgcggctgtgcggtctgatacatgctgttgaccttcagctgtccgcgactgtcagtttccagcccaatgttctgtaacgccagcgaatcggtattaccggtacgaccgttggcatagagcaggcagtcagctttcagttttttacccgacttcagatgcatgatcacaccgtcgtcacagccttcgatcttctcgtactcttcgttgtgacgaatcactacgccactgttccagaagtgataggagagagaatctgacatctcttgatcgagaaatgccagcaggcgatcgcgggtgttgatcagatccacttttacatccataccgcggaagatcgacgcatattcacagccgatcactccagcaccatagataagtacatggcgcggttcgtggtgcatgctaagaattgagtcgctgtcgtaaatgcgtggatgggtgaaatcaacatctgttggatgatatggacgagagccgcaggcaataacaaatttttcagcggttagtgtttcaacgctgccgtccgggcaatccagcgccaacgtatgctcgtcaacaaagcgagcgtttccctgcaatatttcacagtgattacgttcgtaaaatccctgacgcatgcgcgtttgttgattaatcacgttatcggcatggttaaggatatcggcaaaagaagagcggagcagtcgggagtggtcgctgtaaagtgggttttgattgaattctataatgcggctgacggcgtgacggagagctttcgacgggatggtgccccagtgggtgcaaccgccgccaacattttgataacgctcgataactgcgacgcgcgcaccttgcttaaccaggcccattgcagcgccttcgccgccggggccggaacctattactatggcatcgtaatcgtaggaatgtggcatggtagggcttacctgttcttatacataaaagcaacagaatggtaacattttatcgcgggtaagccaattgatccccgtcatttatctggctatatcctgagcggcctttgctttgtctgtttcttacttttgccctgacgttttatgggatttttatcgacgatactctccgtttaagcggcaggtttccgctgtacgtaaaagaaccggccaaagaattgcagtaaatatgttttattgcgttaccgttcattcacaatactggagcaatccagtatgttcattctctggtatagtgccagcagtacttttggcaaggattcagacatcgtgatgggcgtaagagcgcaacaaaaaagaaaaaacccgccgttcgctggtggaagccgcatttagccaattaagtgctgaacgcagcttcgccagcctgagtttgcgtgaagtggcgcgtgaagcgggcattgctcccacctctttttatcggcatttccgcgacgtagacgaactgggtctgaccatggttgatgagagcggtttaatgctacgccaactcatgcgccaggcgcgtcagcgtatcgccaaaggcgggagtgtgatccgcacctctgtctccacatttatggagttcatcggtaataatcctaacgccttccggttattattgcgggaacgctccggcacctccgctgcgtttcgtgccgccgttgcgcgtgaaattcagcacttcattgcggaacttgcggactatctggaactcgaaaaccatatgccgcgtgcgtttactgaagcgcaagccgaagcaatggtgacaattgtcttcagtgcgggtgccgaggcgttggacgtcggcgtcgaacaacgtcggcaattagaagagcggctggtactgcaactgcgaatgatttcgaaaggggcttattactggtatcgccgtgaacaagagaaaaccgcaattattccgggaaatgtgaaggacgagtaatgaaacaagcaaatcaagatagaggtacgctgctgctggcgttggttgctggcttatcgattaatggtactttcgcagcgctgtttagctccattgtgccattttctgtattcccgattatttccctggtgctgacggtttactgcctgcatcaacgttatcttaatcgcaccatgccggtaggcttgccgggtctggcagctgcctgttttattctcggcgtactgctgtacagcacggtagttcgtgcggaatatccggatatcggctctaacttcttcccggcagtactctccgtcattatggtgttctggattggcgcgaagatgcgtaaccgtaagcaggaagttgctgagtaatcggtattatgccggatgctggcgcatccggcatgggttttacttcgcggtcagtaatacgccgcactccatatggtgcgtgtaggggaactgatcaaacagagccagacgttcgaccttgtgcgtctggcttaatgtttccagattcttgcataacgtttccggattgcaggagatatacagaatacgtggatacgcctgcaccattttctcggtttcactgtccagaccgctgcgcggtgggtcgacaaaaatggtttcgcactgataactcttcaagtctatcccttgcaggcgattaaactcgcgtacaccattcatcgcctgagtaaattcttctgccgccatacgaataatttgtacgttatcaatatggttagctgcgatgttgtattgcgcagcagcaaccgacggcttagcgatttcggtggctaatacccgatcaaaattgcgcgccagtgctaatgaaaagttaccgttgccgcagtacagctccagtaaatcgccttttgagcctttggttacgtccagcgcccattccagcatctgaatattcatcgccgcgttcggctgggtaaaactgttttctacctgacggtagatcatctctttccctgcgaccggcagacgttcatcgatgtaatcttgatccagctcgattttggttttcgttgcccgaccaatcagatgcacattcagattctgcgcgcgcagtgcatcgcgcagggcttccgcttcctgacgccactcatcatccagctttttatggtacaacagggaaaccaccgcctgattactcagcgtggtgaggtaatcaatctggaacaacttgtggcgcagaacgggattattacgcacacccgcaatcatcgccgtcatcaactggttgatgagttcactggcagcggggaagctatccacgcggatgcggcttttggtttgttgatcgaaaatgatgtgatacaggtcatcgccatcgtgccagatgcggaactccgcacgcatccggtaatgactgaccggcgagcgaaacacttccggaaccaggtcagaaaacggtgccatcatactttgcaaacgtaccactttttcggctaactgcgcttcatactgttctgttggaaggtgttcgggggtcatgatgtatcctgaaaaattaaagtacgcggcgattgtagggattgctcatcagatgtccagatcttgatgaattcctatttgtgagctacgtctggacagtaacttgttacaacctgtagcatccacttgccggtcctgtgagttaatagggaatccagtgcgaatctggagctgacgcgcagcggtaaggaaaggtgcgatgattgcgttatgcggacactgccatccggtgggaagtcatcatctcttagtatcttagatacccctccaagcccgaagacctgccggccaacgtcgcatctggttctcatcatcgcgtaatattgatgaaacctgcggcatccttcttctattgtggatgctttacaatgattaaaaaagcttcgctgctgacggcgtgttctgtcacagccttttccgcttgggcacaggataccagcccggatactctcgtcgttactgctaaccgttttgaacagccgcgcagcactgtgcttgcaccaaccaccgttgtgacccgtcaggatatcgaccgctggcagtcgacctcggtcaatgatgtgctgcgccgtcttccgggcgtcgatatcacccaaaacggcggttcaggtcagctctcatctatttttattcgcggtacaaatgccagtcatgtgttggtgttaattgatggcgtacgcctgaatctggcgggggtgagtggttctgccgaccttagccagttccctattgcgcttgtccagcgtgttgaatatatccgtgggccacgctccgccgtttatggttccgatgcaataggcggggtggtgaatatcatcacgacgcgcgatgaacccggaacggaaatttcagcagggtggggaagcaatagttatcagaactatgatgtctctacgcagcaacaactgggggataagacacgggtaacgctgttgggcgattatgcccatactcatggttatgatgttgttgcctatggtaataccggaacgcaagcgcagacagataacgatggttttttaagtaaaacgctttatggcgcgctggagcataactttactgatgcctggagcggctttgtgcgcggctatggctatgataaccgtaccaattatgacgcgtattattctcccggttcaccgttgctcgatacccgtaaactctatagccaaagttgggacgccgggctgcgctataacggcgaactgattaaatcacaactcattaccagctatagccatagcaaagattacaactacgatccccattatggtcgttatgattcgtcggcgacgctcgatgagatgaagcaatacaccgtccagtgggcaaacaatgtcatcgttggtcacggtagtattggtgcgggtgtcgactggcagaaacagactacgacgccgggtacaggttatgttgagaatggatatgatcaacgtaataccggcatctatctgaccgggctgcaacaagtcggcgattttacctttgaaggcgcagcacgcagtgacgataactcacagtttggtcgtcatggaacctggcaaaccagcgccggttgggaattcatcgaaggttatcgcttcattgcttcctacgggacatcttataaggcaccaaatctggggcaactgtatggcttctacggaaatccgaatctggacccggagaaaagcaaacagtgggaaggcgcgtttgaaggcttaaccgctggggtgaactggcgtatttccggatatcgtaacgatgtcagtgacttgatcgattatgatgatcacaccctgaaatattacaacgaagggaaagcgcggattaagggcgtcgaggcgaccgccaattttgataccggaccactgacgcatactgtgagttatgattatgtcgatgcgcgcaatgcgattaccgacacgccgttgttacgccgtgctaaacagcaggtgaaataccagctcgactggcagttgtatgacttcgactggggtattacttatcagtatttaggcactcgctatgataaggattactcatcttatccttatcaaaccgttaaaatgggcggtgtgagcttgtgggatcttgcggttgcgtatccggtcacctctcacctgacagttcgtggtaaaatagccaacctgttcgacaaagattatgagacagtctatggctaccaaactgcaggacgggaatacaccttgtctggcagctacaccttctgaaccacgtcccaccgtgctggtgtttgactccggcgtcggtgggttgtcggtctatgacgagatccggcatctcttaccggatctccattacatttatgctttcgataacgtcgcttttccgtatggcgaaaaaagcgaagagtttattgttgagcgagtggtggcaattgtcaccgcagtgcaagaacgttatccccttgcgctggctgtggtcgcttgcaacaccgccagtaccgtttcacttcctgcattacgcgaaaagttcgacttcccggttgttggtgtcgtgccggcgattaaacctgctgcacgtctgacggcaaatggcattgtcggattactggcaacccgcggaactgttaaacgttcttatactcatgagctgatcgcgcgtttcgctaatgaatgccagatagaaatgctgggctcggcagagatggttgagttggctgaagcgaagctgcatggcgaagatgtttctctggatgcactaaaacgtatcctacgcccgtggttaagaatgaaagagccgccagataccgttgtattgggttgcacccatttccctctactacaagaagaactcttacaggtgctgccagagggaacccggctggtggattctggcgcagcgattgctcgcagaacggcctggctgttagaacatgaagctccggatgcaaaatctgccgatgcgaatattgccttttgtatggcaatgacgccagaagctgaacaattattgcccgttttacagcgttacggcttcgaaacgctcgaaaaactggcagttttaggctgatttggttgaatgttgcgcggtcagaaaattattttaaatttcctcttgtcaggccggaataactccctataatgcgccaccactgacacggaacaacggcaaacacgccgccgggtcagcggggttctcctgagaactccgacagagaaagcaaaaataaatgcttgactctgtagcgggaaagcgtattatgcacacccctcgccgctgagaaaaagcgaagcggcactgctctttaacaatttatcagacaatctgtgtgggcactcgaagatacggattcttaacgtcgcaagacgaaaaatgaataccaagtctcaagagtgaacacgtaattcattacgaagtttaattctttgagcatcaaacttttaaattgaagagtttgatcatggctcagattgaacgctggcggcaggcctaacacatgcaagtcgaacggtaacaggaaacagcttgctgtttcgctgacgagtggcggacgggtgagtaatgtctgggaaactgcctgatggagggggataactactggaaacggtagctaataccgcataacgtcgcaagaccaaagagggggaccttcgggcctcttgccatcggatgtgcccagatgggattagcttgttggtggggtaacggctcaccaaggcgacgatccctagctggtctgagaggatgaccagccacactggaactgagacacggtccagactcctacgggaggcagcagtggggaatattgcacaatgggcgcaagcctgatgcagccatgccgcgtgtatgaagaaggccttcgggttgtaaagtactttcagcggggaggaagggagtaaagttaatacctttgctcattgacgttacccgcagaagaagcaccggctaactccgtgccagcagccgcggtaatacggagggtgcaagcgttaatcggaattactgggcgtaaagcgcacgcaggcggtttgttaagtcagatgtgaaatccccgggctcaacctgggaactgcatctgatactggcaagcttgagtctcgtagagggggtagaattccaggtgtagcggtgaaatgcgtagagatctggaggaataccggtggcgaaggcggccccctggacgaagactgacgctcaggtgcgaaagcgtggggagcaaacaggattagataccctggtagtccacgccgtaaacgatgtcgacttggaggttgtgcccttgaggcgtggcttccggagctaacgcgttaagtcgaccgcctggggagtacggccgcaaggttaaaactcaaatgaattgacgggggcccgcacaagcggtggagcatgtggtttaattcgatgcaacgcgaagaaccttacctggtcttgacatccacggaagttttcagagatgagaatgtgccttcgggaaccgtgagacaggtgctgcatggctgtcgtcagctcgtgttgtgaaatgttgggttaagtcccgcaacgagcgcaacccttatcctttgttgccagcggtccggccgggaactcaaaggagactgccagtgataaactggaggaaggtggggatgacgtcaagtcatcatggcccttacgaccagggctacacacgtgctacaatggcgcatacaaagagaagcgacctcgcgagagcaagcggacctcataaagtgcgtcgtagtccggattggagtctgcaactcgactccatgaagtcggaatcgctagtaatcgtggatcagaatgccacggtgaatacgttcccgggccttgtacacaccgcccgtcacaccatgggagtgggttgcaaaagaagtaggtagcttaacctcgggagggcgcttaccactttgtgattcatgactggggtgaagtcgtaacaaggtaaccgtaggggaacctgcggttggatcacctccttaccttaaagaagcgttctttgaagtgctcacacagattgtctgatagaaagtgaaaagcaaggcgtcttgcgaagcagactgatacgtccccttcgtctagaggcccaggacaccgccctttcacggcggtaacaggggttcgaatcccctaggggacgccacttgctggtttgtgagtgaaagtcacctgccttaatatctcaaaactcatcttcgggtgatgtttgagatatttgctctttaaaaatctggatcaagctgaaaattgaaacactgaacaacgagagttgttcgtgagtctctcaaattttcgcaacacgatgatgaatcgaaagaaacatcttcgggttgtgaggttaagcgactaagcgtacacggtggatgccctggcagtcagaggcgatgaaggacgtgctaatctgcgataagcgtcggtaaggtgatatgaaccgttataaccggcgatttccgaatggggaaacccagtgtgtttcgacacactatcattaactgaatccataggttaatgaggcgaaccgggggaactgaaacatctaagtaccccgaggaaaagaaatcaaccgagattcccccagtagcggcgagcgaacggggagcagcccagagcctgaatcagtatgtgtgttagtggaagcgtctggaaaggcgcgcgatacagggtgacagccccgtacacaaaaatgcacatgctgtgagctcgatgagtagggcgggacacgtggtatcctgtctgaatatggggggaccatcctccaaggctaaatactcctgactgaccgatagtgaaccagtaccgtgagggaaaggcgaaaagaaccccggcgaggggagtgaaaaagaacctgaaaccgtgtacgtacaagcagtgggagcacgcttaggcgtgtgactgcgtaccttttgtataatgggtcagcgacttatattctgtagcaaggttaaccgaataggggagccgaagggaaaccgagtcttaactgggcgttaagttgcagggtatagacccgaaacccggtgatctagccatgggcaggttgaaggttgggtaacactaactggaggaccgaaccgactaatgttgaaaaattagcggatgacttgtggctgggggtgaaaggccaatcaaaccgggagatagctggttctccccgaaagctatttaggtagcgcctcgtgaattcatctccgggggtagagcactgtttcggcaagggggtcatcccgacttaccaacccgatgcaaactgcgaataccggagaatgttatcacgggagacacacggcgggtgctaacgtccgtcgtgaagagggaaacaacccagaccgccagctaaggtcccaaagtcatggttaagtgggaaacgatgtgggaaggcccagacagccaggatgttggcttagaagcagccatcatttaaagaaagcgtaatagctcactggtcgagtcggcctgcgcggaagatgtaacggggctaaaccatgcaccgaagctgcggcagcgacgcttatgcgttgttgggtaggggagcgttctgtaagcctgtgaaggtgtactgtgaggtatgctggaggtatcagaagtgcgaatgctgacataagtaacgataaagcgggtgaaaagcccgctcgccggaagaccaagggttcctgtccaacgttaatcggggcagggtgagtcgacccctaaggcgaggccgaaaggcgtagtcgatgggaaacaggttaatattcctgtacttggtgttactgcgaaggggggacggagaaggctatgttggccgggcgacggttgtcccggtttaagcgtgtaggctggttttccaggcaaatccggaaaatcaaggctgaggcgtgatgacgaggcactacggtgctgaagcaacaaatgccctgcttccaggaaaagcctctaagcatcaggtaacatcaaatcgtaccccaaaccgacacaggtggtcaggtagagaataccaaggcgcttgagagaactcgggtgaaggaactaggcaaaatggtgccgtaacttcgggagaaggcacgctgatatgtaggtgaagcgacttgctcgtggagctgaaatcagtcgaagataccagctggctgcaactgtttattaaaaacacagcactgtgcaaacacgaaagtggacgtatacggtgtgacgcctgcccggtgccggaaggttaattgatggggtcagcgcaagcgaagctcttgatcgaagccccggtaaacggcggccgtaactataacggtcctaaggtagcgaaattccttgtcgggtaagttccgacctgcacgaatggcgtaatgatggccaggctgtctccacccgagactcagtgaaattgaactcgctgtgaagatgcagtgtacccgcggcaagacggaaagaccccgtgaacctttactatagcttgacactgaacattgagccttgatgtgtaggataggtgggaggctttgaagtgtggacgccagtctgcatggagccgaccttgaaataccaccctttaatgtttgatgttctaacgtggacccgtaatccgggttgcggacagtgtctggtgggtagtttgactggggcggtctcctcctaaagagtaacggaggagcacgaaggttggctaatcctggtcggacatcaggaggttagtgcaatggcataagccagcttgactgcgagcgtgacggcgcgagcaggtgcgaaagcaggtcatagtgatccggtggttctgaatggaagggccatcgctcaacggataaaaggtactccggggataacaggctgataccgcccaagagttcatatcgacggcggtgtttggcacctcgatgtcggctcatcacatcctggggctgaagtaggtcccaagggtatggctgttcgccatttaaagtggtacgcgagctgggtttagaacgtcgtgagacagttcggtccctatctgccgtgggcgctggagaactgaggggggctgctcctagtacgagaggaccggagtggacgcatcactggtgttcgggttgtcatgccaatggcactgcccggtagctaaatgcggaagagataagtgctgaaagcatctaagcacgaaacttgccccgagatgagttctccctgactccttgagagtcctgaaggaacgttgaagacgacgacgttgataggccgggtgtgtaagcgcagcgatgcgttgagctaaccggtactaatgaaccgtgaggcttaaccttacaacgccgaagctgttttggcggatgagagaagattttcagcctgatacagattaaatcagaacgcagaagcggtctgataaaacagaatttgcctggcggccgtagcgcggtggtcccacctgaccccatgccgaactcagaagtgaaacgccgtagcgccgatggtagtgtggggtctccccatgcgagagtagggaactgccaggcatcaaataaaacgaaaggctcagtcgaaagactgggcctttcgttttatctgttgtttgtcggtgaacgctctcctgagtaggacaaatccgccgggagcggatttgaacgttgcgaagcaacggcccggagggtggcgggcaggacgcccgccataaactgccaggcatcaaattaagcagaaggccatcctgacggatggcctttttgcgtttctacaaactcttcctgtcgtcatatctacaagccatccccccacagatacggtaaactagcctcgtttttgcatcaggaaagcagctatgaaccactccttaaaaccctggaacacatttggcattgatcataatgctcagcacattgtatgtgccgaagacgaacaacaattactcaatgcctggcagtatgcaaccgcagaaggacaacccgttcttattctgggtgaaggaagtaatgtactttttctggaagactatcgcggcacggtgatcatcaaccggatcaaaggtatcgaaattcatgatgaacctgatgcgtggtatttacatgtaggagccggagaaaactggcatcgcctggtaaaatacactttgcaggaaggtatgcctggtctggaaaatctggcattaattcctggttgtgtcggctcatcacctatccagaatattggtgcttatggcgtagaattacagcgagtttgcgcttatgttgattgtgttgaactggcgacaggcaagcaagtgcgcttaactgccaaagagtgccgttttggctatcgcgacagtatttttaaacatgaataccaggatcgcttcgccattgtagccgtaggtctgcgtctgccaaaagagtggcaacctgtactaacgtatggtgacttaactcgtctggatcctacaacagtaacgccacagcaagtatttaatgcggtgtgtcatatgcgcaccaccaaactccctgatccaaaagtgaatggcaatgccggtagtttcttcaaaaaccctgttgtatctgccgaaacggctaaagcattactggcgcaatttccaacagcaccaaattacccccaggcgggtggttcagtaaaactggcagcaggttggcttattgatcagtgccagctaaaagggatgcaaatgggtggggctgcggtgcaccgtcaacaggcgttagttctcattaatgaagacaatgcaaaaagcgaagatgtggtgcaactggcacaccatgtaagacaaaaagtgggtgaaaaatttaatgtctggcttgagcctgaagtccgctttattggtgcatcaggtgaagtgagcgcagtggagacaatttcatgaaggataacaccgtgccactgaaattgattgccctgttagcgaacggtgaatttcactctggcgagcagttgggtgaaacgctgggaatgagccgggcggctattaataaacacattcagacactgcgtgactggggcgttgatgtctttaccgttccgggtaaaggatacagcctgcctgagcccatccagttacttaatgctgaacagatattgggtcagctggatggcggtagtgtagccgtgctgccagttattgactccacgaatcagtaccttcttgatcgtatcggagagcttaaatcgggcgatgcctgtgttgcagaataccagcaggctggccgtggtcgccgggggcggaaatggttttcgccttttggcgcaaacttatatttgtcgatgttctggcgtctggaacaaggcccggcggcggcgattggtttaagtctggttatcggtatcgtgatggcggaagtattacgcaagctgggagcagataaagttcgtgtcaaatggcctaatgacctctatctgcaggatcgcaagctggcaggcattcttgtggagctgactggcaaaactggcgatgcggcgcaaatagtcattggagccgggatcaacatggcaatgcgccgtgttgaagagagtgtcgttaatcaggggtggatcacgctgcaggaagcggggatcaatctcgatcgtaatacgttggcggccatgctaatacgtgaattacgtgctgcgttggaactcttcgaacaagaaggattggcaccttatctgtcgcgctgggaaaagctggataattttattaatcgcccagtgaaacttatcattggtgataaagaaatatttggcatttcacgcggaatagacaaacagggggctttattacttgagcaggatggaataataaaaccctggatgggcggtgaaatatccctgcgtagtgcagaaaaataagaaaggggagcattagctcccctgaaaattatttgcgtagtctgacctcttctaccgcatgattagcacttttcgtcaggattaaactggcgcgctcacgagtaggtagaatattttgctttaagttcagccagttgatctctttccacaatgtcatggcagtcttaatcgcttcttctttagttaatttcgcgtagttatgaaaataggaatccgggtcggtaaaagccccttcgcggaatttcagaaaacggttgatataccacgtctgaagtaagtcttccggtgcatcaacatatatcgaaaaatcgacaaaatcagaaacaaatacatgatgtggatcgtgtggataatccatcccgctctgtaagacatttaacccttcaagaattaaaatatcaggctgaacaaccgttttatctccatccgggatcacatcataaataagatgcgagtaaacaggggctgtaacgtttggcacgccggatttgagatcggaaacaaacttcaccaggcgatgcatatcatacgattccgggaagcctttcttcttcatcagaccacgttctttcagaacctgattagggtgaaggaagccatctgtagtgatcagttcaacacgacgatgttccggccaacggcttaatagcgcctgcaatacacgggcggttgtacttttccccaccgcgacactgccagcaatactgataatgtaaggaatgcgttgcccgttagtaccaagaaactgttccagaactgcctgacggcgcagattcgagcttatatagaagttcagcaaacgtgacaaaggtaaatagatctcggcaacttcttctaacgagagatcttcattaatacctttgagacgggcgatctcatcttccgataacgtcataggtacggaatcacgcagagctgcccactggttgcggtcaaactgtaggtaaggcgtcattaacgtttgctcttttatactcataagcatgtttctggcggtcatagctctatcggcaaagcgatatttgccatggcgcgtcacagttctgttgaatgggttaatgggcaggagggtaacaccagatggggaggaataataagaaaaaatctctgccaggaagctatcgttgaaaagcaatgtgacagatattccatctgataaaaagaattatggtttagcaggagcgcattgttgagcacaatgatgttgaaaaagtgtgctaatctgccctccgttcggctgtttcttcatcgtgtcgcataaaatgtgaccaataaaacaaattatgcaattttttagttgcatgaactcgcatgtctccatagaatgcgcgctacttgatgccgacttagctcagtaggtagagcaactgacttgtaatcagtaggtcaccagttcgattccggtagtcggcaccatcaagtccggtggggttcccgagcggccaaagggagcagactgtaaatctgccgtcacagacttcgaaggttcgaatccttcccccaccaccaatttcggccacgcgatggcgtagcccgagacgataagttcgcttaccggctcgaataaagagagcttctctcgatattcagtgcagaatgaaaatcaggtagccgagttccaggatgcgggcatcgtataatggctattacctcagccttccaagctgatgatgcgggttcgattcccgctgcccgctccaagatgtgctgatatagctcagttggtagagcgcacccttggtaagggtgaggtcggcagttcgaatctgcctatcagcaccacttcttttctcctccctgttttttccttctgtttattgcattcaacaagtcgggcatgttgcctggttgatgtggtgatatcaccgatttatccgtgtcttagagggacaatcgatgtctaaagaaaagtttgaacgtacaaaaccgcacgttaacgtcggtactatcggccacgttgaccatggtaaaacaacgctgaccgctgcaatcactaccgtactggctaaaacctacggcggtgctgctcgcgcattcgaccagatcgataacgcgccggaagaaaaagctcgtggtatcaccatcaacacttctcacgttgaatacgacaccccgacccgtcactacgcacacgtagactgcccggggcacgccgactatgttaaaaacatgatcaccggtgctgctcagatggacggcgcgatcctggtagttgctgcgactgacggcccgatgccgcagactcgtgagcacatcctgctgggtcgtcaggtaggcgttccgtacatcatcgtgttcctgaacaaatgcgacatggttgatgacgaagagctgctggaactggttgaaatggaagttcgtgaacttctgtctcagtacgacttcccgggcgacgacactccgatcgttcgtggttctgctctgaaagcgctggaaggcgacgcagagtgggaagcgaaaatcctggaactggctggcttcctggattcttacattccggaaccagagcgtgcgattgacaagccgttcctgctgccgatcgaagacgtattctccatctccggtcgtggtaccgttgttaccggtcgtgtagaacgcggtatcatcaaagttggtgaagaagttgaaatcgttggtatcaaagagactcagaagtctacctgtactggcgttgaaatgttccgcaaactgctggacgaaggccgtgctggtgagaacgtaggtgttctgctgcgtggtatcaaacgtgaagaaatcgaacgtggtcaggtactggctaagccgggcaccatcaagccgcacaccaagttcgaatctgaagtgtacattctgtccaaagatgaaggcggtcgtcatactccgttcttcaaaggctaccgtccgcagttctacttccgtactactgacgtgactggtaccatcgaactgccggaaggcgtagagatggtaatgccgggcgacaacatcaaaatggttgttaccctgatccacccgatcgcgatggacgacggtctgcgtttcgcaatccgtgaaggcggccgtaccgttggcgcgggcgttgtagcaaaagttctgagctaattgccgataacatttgacgcaatgcgcactaaaagggcatcatttgatgccctttttgcacgctttcgtaccagaacctggctcatcagtgattttctttgtcataatcattgctgagacaggctctgttgagggcgtataatccgaaaagctaatacgcgtttcgatttggtttgcctcgcgatcgcggggtgaaaatgtttgtagaaaacttctgacaggttggtttatgagtgcgaataccgaagctcaaggaagcgggcgcggcctggaagcgatgaagtgggtcgttgtggtggcattgctcctggtggcgattgtcggcaactacctttatcgcgacattatgctgccgctgcgtgcgctggccgtagtaattctgattgctgcagcgggtggtgtcgcgctgttaacgacaaaaggtaaagctaccgttgcttttgcccgtgaagcgcgtaccgaagtccgtaaggtcatttggccgactcgccaggaaacattgcacaccacgctgattgtggctgcggttaccgcagtaatgtcactgatcctgtggggactggatggtattctggttcgcctggtatcctttatcactggcctgaggttctgagatgtctgaagctcctaaaaagcgctggtacgtcgttcaggcgttttccggttttgaaggccgcgtagcaacgtcgctgcgtgagcatatcaaattacacaacatggaagatttgtttggtgaagtcatggtaccaaccgaagaagtggttgaaatccgtggcggtcagcgtcgcaaaagcgaacgtaaattcttccctggctacgtcctcgttcagatggtgatgaacgacgcgagctggcacctggtgcgcagcgtaccgcgtgtgatgggcttcatcggcggtacttccgatcgtcctgcgccaatcagcgataaagaagtcgatgcgattatgaaccgcctgcagcaggttggtgataagccgcgtccgaaaacgctgtttgaaccgggtgaaatggtccgtgttaatgatggtccgttcgctgacttcaacggtgttgttgaagaagtggattacgagaaatctcgtctgaaagtgtctgtttctatcttcggtcgtgcgaccccggtagagctggacttcagccaggttgaaaaagcctaacccagcgatcaaaaaagcggcgatttaatcgttgcacaagggcgtgagattggaatacaatttcgcgccttttgtttttatgggccttgcccgtaaaacgattttttatatcacggggagcctctcagaggcgttattacccaacttgaggaatttataatggctaagaaagtacaagcctatgtcaagctgcaggttgcagctggtatggctaacccgagtccgccagtaggtccggctctgggtcagcagggcgtaaacatcatggaattctgcaaagcgttcaacgcaaaaactgattccatcgaaaaaggtctgccgattccggtagtaatcaccgtttacgctgaccgttctttcactttcgttaccaagaccccgccggcagcagttctgctgaaaaaagcggctggtatcaagtctggttccggtaagccgaacaaagacaaagtgggtaaaatttcccgcgctcagctgcaggaaatcgcgcagaccaaagctgccgacatgactggtgccgacattgaagcgatgactcgctccatcgaaggtactgcacgttccatgggcctggtagtggaggactaagaaatggctaaactgaccaagcgcatgcgtgttatccgcgagaaagttgatgcaaccaaacagtacgacatcaacgaagctatcgcactgctgaaagagctggcgactgctaaattcgtagaaagcgtggacgtagctgttaacctcggcatcgacgctcgtaaatctgaccagaacgtacgtggtgcaactgtactgccgcacggtactggccgttccgttcgcgtagccgtatttacccaaggtgcaaacgctgaagctgctaaagctgcaggcgcagaactggtaggtatggaagatctggctgaccagatcaagaaaggcgaaatgaactttgacgttgttattgcttctccggatgcaatgcgcgttgttggccagctgggccaggttctgggtccgcgcggcctgatgccaaacccgaaagtgggtactgtaacaccgaacgttgctgaagcggttaaaaacgctaaagctggccaggttcgttaccgtaacgacaaaaacggcatcatccacaccaccatcggtaaagtggactttgacgctgacaaactgaaagaaaacctggaagctctgctggttgcgctgaaaaaagcaaaaccgactcaggcgaaaggcgtgtacatcaagaaagttagcatctccaccaccatgggtgcaggtgttgcagttgaccaggctggcctgagcgcttctgtaaactaatgcctttacgtgggcggtgattttgtctacaatcttacccccacgtataatgcttaatgcagacgtatatccgagatattcgggttgtggcaaggcggcaactgagtgagtcgccaggagcatagctaactatgtgactggtgcgaatgaaggaagccaacgccgccacaagttgaatagcgacggatagaaaagatttgttcgttggagcctggcctatccaggcctccgtcgaagaccgcaggagtttcgcaagaaacttaatcccctgcgtagacggtgacagaacgctaagattattcttttatattctggcttgtttctgctcaccgtaattaagacgctctctccgtttggaggagtgaagtgagttccagagattttctctggcaaacatccaggagcaaagctaatggctttaaatcttcaagacaaacaagcgattgttgctgaagtcagcgaagtagccaaaggcgcgctgtctgcagtagttgcggattcccgtggcgtaactgtagataaaatgactgaactgcgtaaagcaggtcgcgaagctggcgtatacatgcgtgttgttcgtaacaccctgctgcgccgtgctgttgaaggtactccgttcgagtgcctgaaagacgcgtttgttggtccgaccctgattgcatactctatggaacacccgggtgctgctgctcgtctgttcaaagagttcgcgaaagcgaatgcaaaatttgaggtcaaagccgctgcctttgaaggtgagctgatcccggcgtctcagatcgaccgcctggcaactctgccgacctacgaagaagcaattgcacgcctgatggcaaccatgaaagaagcttcggctggcaaactggttcgtactctggctgctgtacgcgatgcgaaagaagctgcttaatcgcagttatctttttaacgcattcgcttacgtataaacttattctgatattcaggaacaatttaaatgtctatcactaaagatcaaatcattgaagcagttgcagctatgtctgtaatggacgttgtagaactgatctctgcaatggaagaaaaattcggtgtttccgctgccgctgctgtagctgtagctgctggcccggttgaagctgctgaagaaaaaactgaattcgacgtaattctgaaagctgctggcgctaacaaagttgctgttatcaaagcagtacgtggcgcaactggcctgggtctgaaagaagctaaagacctggtagaatctgcaccggctgctctgaaagaaggcgtgagcaaagacgacgcagaagcactgaaaaaagctctggaagaagctggcgctgaagttgaagttaaataagccaacccttccggttgcagcctgagaaatcaggctgatggctggtgactttttagtcaccagcctttttgcgctgtaaggcgccagtagcgtttcacactgtttgactactgctgtgcctttcaatgcttgtttctatcgacgacttaatatactgcgacaggacgtccgttctgtgtaaatcgcaatgaaatggtttaagcgtgatagcaacaggcattgcggaaagtgttccattttccggtcaacaaaatagtgttgcacaaactgtccgctcaatggacagatgggtcgacttgtcagcgagctgaggaaccctatggtttactcctataccgagaaaaaacgtattcgtaaggattttggtaaacgtccacaagttctggatgtaccttatctcctttctatccagcttgactcgtttcagaaatttatcgagcaagatcctgaagggcagtatggtctggaagctgctttccgttccgtattcccgattcagagctacagcggtaattccgagctgcaatacgtcagctaccgccttggcgaaccggtgtttgacgtccaggaatgtcaaatccgtggcgtgacctattccgcaccgctgcgcgttaaactgcgtctggtgatctatgagcgcgaagcgccggaaggcaccgtaaaagacattaaagaacaagaagtctacatgggcgaaattccgctcatgacagacaacggtacctttgttatcaacggtactgagcgtgttatcgtttcccagctgcaccgtagtccgggcgtcttctttgactccgacaaaggtaaaacccactcttcgggtaaagtgctgtataacgcgcgtatcatcccttaccgtggttcctggctggacttcgaattcgatccgaaggacaacctgttcgtacgtatcgaccgtcgccgtaaactgcctgcgaccatcattctgcgcgccctgaactacaccacagagcagatcctcgacctgttctttgaaaaagttatctttgaaatccgtgataacaagctgcagatggaactggtgccggaacgcctgcgtggtgaaaccgcatcttttgacatcgaagctaacggtaaagtgtacgtagaaaaaggccgccgtatcactgcgcgccacattcgccagctggaaaaagacgacgtcaaactgatcgaagtcccggttgagtacatcgcaggtaaagtggttgctaaagactatattgatgagtctaccggcgagctgatctgcgcagcgaacatggagctgagcctggatctgctggctaagctgagccagtctggtcacaagcgtatcgaaacgctgttcaccaacgatctggatcacggcccatatatctctgaaaccttacgtgtcgacccaactaacgaccgtctgagcgcactggtagaaatctaccgcatgatgcgccctggcgagccgccgactcgtgaagcagctgaaagcctgttcgagaacctgttcttctccgaagaccgttatgacttgtctgcggttggtcgtatgaagttcaaccgttctctgctgcgcgaagaaatcgaaggttccggtatcctgagcaaagacgacatcattgatgttatgaaaaagctcatcgatatccgtaacggtaaaggcgaagtcgatgatatcgaccacctcggcaaccgtcgtatccgttccgttggcgaaatggcggaaaaccagttccgcgttggcctggtacgtgtagagcgtgcggtgaaagagcgtctgtctctgggcgatctggatacctgatgcctcaggatatgatcaacgccaagccgatttccgcagcagtgaaagagttcttcggttccagccagctgtctcagtttatggaccagaacaacccgctgtctgagattacgcacaaacgtcgtatctccgcactcggcccaggcggtctgacccgtgaacgtgcaggcttcgaagttcgagacgtacacccgactcactacggtcgcgtatgtccaatcgaaacccctgaaggtccgaacatcggtctgatcaactctctgtccgtgtacgcacagactaacgaatacggcttccttgagactccgtatcgtaaagtgaccgacggtgttgtaactgacgaaattcactacctgtctgctatcgaagaaggcaactacgttatcgcccaggcgaactccaacctggatgaagaaggccacttcgtagaagacctggtaacttgccgtagcaaaggcgaatccagcttgttcagccgcgaccaggttgactacatggacgtatccacccagcaggtggtatccgtcggtgcgtccctgatcccgttcctggaacacgatgacgccaaccgtgcattgatgggtgcgaacatgcaacgtcaggccgttccgactctgcgcgctgataagccgctggttggtactggtatggaacgtgctgttgccgttgactccggtgtaactgcggtagctaaacgtggtggtgtcgttcagtacgtggatgcttcccgtatcgttatcaaagttaacgaagacgagatgtatccgggtgaagcaggtatcgacatctacaacctgaccaaatacacccgttctaaccagaacacctgtatcaaccagatgccgtgtgtgtctctgggtgaaccggttgaacgtggcgacgtgctggcagacggtccgtccaccgacctcggtgaactggcgcttggtcagaacatgcgcgtagcgttcatgccgtggaatggttacaacttcgaagactccatcctcgtatccgagcgtgttgttcaggaagaccgtttcaccaccatccacattcaggaactggcgtgtgtgtcccgtgacaccaagctggggccggaagagatcaccgctgacatcccgaacgtgggtgaagctgcgctctccaaactggatgaatccggtatcgtttacattggtgcggaagtgaccggtggcgacattctggttggtaaggtaacgccgaaaggtgaaactcagctgaccccagaagaaaaactgctgcgtgcgatcttcggtgagaaagcctctgacgttaaagactcttctctgcgcgtaccaaacggtgtatccggtacggttatcgacgttcaggtctttactcgcgatggcgtagaaaaagacaaacgtgcgctggaaatcgaagaaatgcagctcaaacaggcgaagaaagacctgtctgaagaactgcagatcctcgaagctggtctgttcagccgtatccgtgctgtgctggtagccggtggcgttgaagctgagaagctcgacaaactgccgcgcgatcgctggctggagctaggcctgacagacgaagagaaacaaaatcagctggaacagctggctgagcagtatgacgaactgaaacacgagttcgagaagaaactcgaagcgaaacgccgcaaaatcacccagggcgacgatctggcaccgggcgtgctgaagattgttaaggtatatctggcggttaaacgccgtatccagcctggtgacaagatggcaggtcgtcacggtaacaagggtgtaatttctaagatcaacccgatcgaagatatgccttacgatgaaaacggtacgccggtagacatcgtactgaacccgctgggcgtaccgtctcgtatgaacatcggtcagatcctcgaaacccacctgggtatggctgcgaaaggtatcggcgacaagatcaacgccatgctgaaacagcagcaagaagtcgcgaaactgcgcgaattcatccagcgtgcgtacgatctgggcgctgacgttcgtcagaaagttgacctgagtaccttcagcgatgaagaagttatgcgtctggctgaaaacctgcgcaaaggtatgccaatcgcaacgccggtgttcgacggtgcgaaagaagcagaaattaaagagctgctgaaacttggcgacctgccgacttccggtcagatccgcctgtacgatggtcgcactggtgaacagttcgagcgtccggtaaccgttggttacatgtacatgctgaaactgaaccacctggtcgacgacaagatgcacgcgcgttccaccggttcttacagcctggttactcagcagccgctgggtggtaaggcacagttcggtggtcagcgtttcggggagatggaagtgtgggcgctggaagcatacggcgcagcatacaccctgcaggaaatgctcaccgttaagtctgatgacgtgaacggtcgtaccaagatgtataaaaacatcgtggacggcaaccatcagatggagccgggcatgccagaatccttcaacgtattgttgaaagagattcgttcgctgggtatcaacatcgaactggaagacgagtaattctcgctcaaacaggtcactgctgtcggggtaaaacccggcagcggattgtgctaactccgacgggagcaaatccgtgaaagatttattaaagtttctgaaagcgcagactaaaaccgaagagtttgatgcgatcaaaattgctctggcttcgccagacatgatccgttcatggtctttcggtgaagttaaaaagccggaaaccatcaactaccgtacgttcaaaccagaacgtgacggccttttctgcgcccgtatctttgggccggtaaaagattacgagtgcctgtgcggtaagtacaagcgcctgaaacaccgtggcgtcatctgtgagaagtgcggcgttgaagtgacccagactaaagtacgccgtgagcgtatgggccacatcgaactggcttccccgactgcgcacatctggttcctgaaatcgctgccgtcccgtatcggtctgctgctcgatatgccgctgcgcgatatcgaacgcgtactgtactttgaatcctatgtggttatcgaaggcggtatgaccaacctggaacgtcagcagatcctgactgaagagcagtatctggacgcgctggaagagttcggtgacgaattcgacgcgaagatgggtgcggaagcaatccaggctctgctgaagagcatggatctggagcaagagtgcgaacagctgcgtgaagagctgaacgaaaccaactccgaaaccaagcgtaaaaagctgaccaagcgtatcaaactgctggaagcgttcgttcagtctggtaacaaaccagagtggatgatcctgaccgttctgccggtactgccgccagatctgcgtccgctggttccgctggatggtggtcgtttcgcgacttctgacctgaacgatctgtatcgtcgcgtcattaaccgtaacaaccgtctgaaacgtctgctggatctggctgcgccggacatcatcgtacgtaacgaaaaacgtatgctgcaggaagcggtagacgccctgctggataacggtcgtcgcggtcgtgcgatcaccggttctaacaagcgtcctctgaaatctttggccgacatgatcaaaggtaaacagggtcgtttccgtcagaacctgctcggtaagcgtgttgactactccggtcgttctgtaatcaccgtaggtccatacctgcgtctgcatcagtgcggtctgccgaagaaaatggcgctggagctgttcaaaccgttcatctacggcaagctggaactgcgtggtcttgctaccaccattaaagctgcgaagaaaatggttgagcgcgaagaagctgtcgtttgggatatcctggacgaagttatccgcgaacacccggtactgctgaaccgtgcaccgactctgcaccgtctgggtatccaggcatttgaaccggtactgatcgaaggtaaagctatccagctgcacccgctggtttgtgcggcatataacgccgacttcgatggtgaccagatggctgttcacgtaccgctgacgctggaagcccagctggaagcgcgtgcgctgatgatgtctaccaacaacatcctgtccccggcgaacggcgaaccaatcatcgttccgtctcaggacgttgttctgggtctgtactatatgacccgtgactgtgttaacgccaaaggcgaaggcatggtgctgactggcccgaaagaagcagaacgtctgtatcgctctggtctggcttctctgcatgcgcgcgttaaagtgcgtatcaccgagtatgaaaaagatgcaaacggtgaattagtagcgaaaaccagcctgaaagacacgactgttggccgtgccattctgtggatgattgtaccgaaaggtctgccttactccatcgtcaaccaggcgctgggtaaaaaagcaatctccaaaatgctgaacacctgctaccgcattctcggtctgaaaccgaccgttatttttgcggaccagatcatgtacaccggcttcgcctatgcagcgcgttctggtgcatctgttggtatcgatgacatggtcatcccggagaagaaacacgaaatcatctccgaggcagaagcagaagttgctgaaattcaggagcagttccagtctggtctggtaactgcgggcgaacgctacaacaaagttatcgatatctgggctgcggcgaacgatcgtgtatccaaagcgatgatggataacctgcaaactgaaaccgtgattaaccgtgacggtcaggaagagaagcaggtttccttcaacagcatctacatgatggccgactccggtgcgcgtggttctgcggcacagattcgtcagcttgctggtatgcgtggtctgatggcgaagccggatggctccatcatcgaaacgccaatcaccgcgaacttccgtgaaggtctgaacgtactccagtacttcatctccacccacggtgctcgtaaaggtctggcggataccgcactgaaaactgcgaactccggttacctgactcgtcgtctggttgacgtggcgcaggacctggtggttaccgaagacgattgtggtacccatgaaggtatcatgatgactccggttatcgagggtggtgacgttaaagagccgctgcgcgatcgcgtactgggtcgtgtaactgctgaagacgttctgaagccgggtactgctgatatcctcgttccgcgcaacacgctgctgcacgaacagtggtgtgacctgctggaagagaactctgtcgacgcggtaaaagtacgttctgttgtatcttgtgacaccgactttggtgtatgtgcgcactgctacggtcgtgacctggcgcgtggtcacatcatcaacaaaggtgaagcaatcggtgttatcgcggcacagtccatcggtgaaccgggtacacagctgaccatgcgtacgttccacatcggtggtgcggcatctcgtgcggctgctgaatccagcatccaggtgaaaaacaaaggtagcatcaagctcagcaacgtgaagtcggttgtgaactccagcggtaaactggttatcacttcccgtaatactgaactgaaactgatcgacgaattcggtcgtaccaaagaaagctacaaagtaccttacggtgcggtactggcgaaaggcgatggcgaacaggttgctggcggcgaaaccgttgcaaactgggacccgcacaccatgccggttatcaccgaagtaagcggttttgtacgctttactgacatgatcgacggtcagaccattactcgtcagacagacgaattgaccggtctgtcttcgctggtggttctggattccgcagaacgtacagcaggtggtaaagatctgcgtccggcactgaaaatcgttgatgctcagggtaacgacgttctgatcccaggtaccgatatgcctgcgcagtacttcctgccgggtaaagcgattgttcagctggaagatggcgtacagatcagctctggtgacaccctggcgcgtattccgcaggaatccggcggtaccaaggacatcaccggtggtctgccgcgcgttgcggacctgttcgaagcacgtcgtccgaaagagccggcaatcctggctgaaatcagcggtatcgtttccttcggtaaagaaaccaaaggtaaacgtcgtctggttatcaccccggtagacggtagcgatccgtacgaagagatgattccgaaatggcgtcagctcaacgtgttcgaaggtgaacgtgtagaacgtggtgacgtaatttccgacggtccggaagcgccgcacgacattctgcgtctgcgtggtgttcatgctgtgactcgttacatcgttaacgaagtacaggacgtataccgtctgcagggcgttaagattaacgataaacacatcgaagttatcgttcgtcagatgctgcgtaaagctaccatcgttaacgcgggcagctccgacttcctggaaggcgaacaggttgaatactctcgcgtcaagatcgcaaaccgcgaactggaagcgaacggcaaagtgggtgcaacttactcccgcgatctgctgggtatcaccaaagcgtctctggcaaccgagtccttcatctccgcggcatcgttccaggagaccactcgcgtgctgaccgaagcagccgttgcgggcaaacgcgacgaactgcgcggcctgaaagagaacgttatcgtgggtcgtctgatcccggcaggtaccggttacgcgtaccaccaggatcgtatgcgtcgccgtgctgcgggtgaagctccggctgcaccgcaggtgactgcagaagacgcatctgccagcctggcagaactgctgaacgcaggtctgggcggttctgataacgagtaatcgttaatccgcaaataacgtaaaaacccgcttcggcgggtttttttatggggggagtttagggaaagagcatttgtcagaatatttaaggaatttctgaatactcataatcaatgtagagatgactaatatcctgaaactgactgaactaattgagtcaaactcggcaaggattcgatactattcctgtgtaactttcttaaggaacgagaatgaaacaggaagtggaaaagtggcgaccttttggacatccggatggtgatattcgtgatttatcatttcttgatgctcatcaggctgtctacgttcagcatcatgagggcaaagagcctttagagtatcgcttttgggttacctactctcttcactgcttcacaaaagattatgaacatcagacgaacgaagaaaaacaatcgttaatgtaccacgcgcctaaagaatctcgtcccttctgccagcaccgttataacttagcgcgcacacacttaaaaagaactattttggcgctgccagaaagcaacgttattcatgccgggtatggtagctatgccgtgattgaggtggacttagacggaggagataaggcattttactttgttgcgttcagggctttcagggaaaagaaaaaactccgtttgcatgtaactagcgcttatcccatttctgaaaaacagaaaggtaaatcagtgaaatttttcaccattgcctacaacttattgagaaataagcagcttcctcagccctcaaaataacaaaacccaccttaaggtgggtttcgccagagaattatctctggtattcagaacgccattaccggactttgccttgaccttgcgataatcgcaggttgcgggatgtctgaatttcttcagtctgctgcatcctggaagatgagaacatgtgttcttattttcgtctctatcatagttgagtatttactctcttacaatcagatctctttcattgctcaacaggcgatggcttcagactttgcattacggaatttttaagaaaggcagggcgaaacgaggaagaagcttttcgccctggacaacattcctgctgacggcactaccataaaaaaacacaacgctttcaacaaccttgcgtttttcatcttccgtagcggctcggaataaatttacgttcttacattccgtctcatagtctttgcgaggcccgtcccagatagctgtcccagtctttccataccggctgcaaaccctgagcggttaacgcggcagcaaccgcttccggtctgcgatcgtcgtgcggtgagaactgttccaactcggggtgattatcggcatagccacctggctgcgttttcgagaaggcgctgacgttattgatcgccagcggaataacgcgatcgcgaaaccacggtgattcccgcgtggagagtgacagttcaatctccggtgcaagcagtcggaaggcgcagatggtttgcactaactggcgttcatccataatcgacgcaggctcaatgccgccagtacacgggcgcaggcgcggaaaggagacagagtaacggctttgccagtaatgctgttgcagccatagcaaatgttcggcaaccatatagcagtcaacgcgccagttgtcggaaaggccaattagcgcgccgaggcctatcttatcaatccccgcacgccccagccgatccggcgtttccagccgccagaagaagtcctgtttttttcctttcagatgatggcgggcataagtcgcctcgtgatatgtctcctgataaaccatcacgccatccagaccaagctgttttaactcggcgtattccgtctccgccagcggttgcacttccatttgtagtgaagagaactgttcacgcagggcggggagatgacgacgaaagtaatccatccccactttcgcctgatgttcaccagtgactaatagcagatgttcaaagcccatctcccgtatagcggcgctttccctggcaatatccgcttcatccagcgttttgcgcttgatgcgattactcatggaaaatccgcagtacgtgcagtcgttagcgcaaagattggaaagataaagcgggacgtagaaactaactgtgttgccaaatcgctgacgggtcagacgctgcgcccgttgggccagttgttccagatagccactggcggctggcgataacagcgccatcatatcgtcgcgggtgagttgcgaggcatttagcgcccgttctacgtcagcagccgttttgccgttgatacgcaggcggatgtcgtcccagtccagttgtcgccagcgatcgctgaaggttttcatgccgatgcctccagaaatccagtcagcgggctggtggcatgagcaaaatgactgcggctgcccggtccggactgacgtgccagcaggcctgcttctaccgccagacgaaatgccttcgccatgttgacgggatcgtccgcgacggcaattgccgtattcactaacaccgcgtcggcccccatttccagcgcctgcgcggcatggctgggaacgccgatgccagcatcgacaaccaccggcactgtggcctgctggataataatctccagcatggcgcgggtttccagtccctgattcgagccaatcggcgcgccgagcggcatcaccgctgcacagccgacttcttccagacgtttacacaataccggatcggccccgcagtaaggcagcacgacaaatccctgttgtaccagcgtttcggcggctttcagggtttcgatgggatcgggcaacagccagcgggcgtcagggtgaatctctaattttaaccagtttgtgcctaacgcttcacgagccagatgggcggcgaaaatggcttcttccgctgttttcgccccggatgtatttggcagcagggtcacacccgccgcgataagcggttcgaggatagcgtcgttgtgctggcgcaagtcgacacgtttcatcgccagtgtcaccagctggctgccggaagcgcggatcgcctccaccatcagttgtgaagaagcgaatttccctgtgccggtaaacagatgtgaatcaaacgttttgtccgcaatacgtaacatttcaaccccctgcaataacctgaaaaagcaggatctggtcgccatcctgcacgatatgttgcgcccactgctcacgcgggacgatttgctgattaatcgccagagccgcgcccgcttgtcgttggtcgagttgctccagtagttcgtgaacagtttgcccggcggcgcactgcatcggttgatcgttaaacaggatctgcattgcttcctccgcataccgggcaaccactggcgcggcgcaacgccaggctgcgccactggctcgatttaccgtcgaacagtcggagttctcccgcaggtgtctctataccgcttaataacttaatggcttccagtgcctgcaaagtgcccataaccccgaccaccgggccaaccacgcccgccgtgcggcagttgcgttctggctcctggttatctggccacaggcagcggtaacacccctgctcccagggcggcgtcagtaccatcaactgaccgccaaatccgaccgcgctggcggtgataagcggcgtgttgagtgccacgcaggcggcattaatctcctggcgagtcgccatattgtcggtacagtcgagcaccacatcggcccgtgcaaccgcatcttttaacgcctcacccgttaaccgttgttgtaatgctgtcagttgaatgtcgggattcaactgtgtcagtcgctgttggctgacctgcgatttcgggcgatcgatatcttcagtggtaaagaggatttgtcgttgcagattgcttaaatgcacatcgtcgtcatctgccagtaccagcgtcccgacgccagcgcccgccaggtacagcgcagcaggtgtacccagcccgcccagaccgataatcagcacctggctgtcgagcagtttttgctgcccgtccagagcgatatcgtcgagcaggatttggcggctataacgcataaagtcacggtcattcatcgccaactcctgcaatttccagcaactgtgccgttgccaaacgccagtctgcagcttgagtaatggcgctgacgacggcgatactgccgacacccgttgctatcaccgcaggcgcgcgtgccagactgataccgccaatcgccacggtgggataatccgccagtcgctcaacatgccgtgccagctgttccagcccctgcggtgcagaaggcatctgtttggtttgcgtcgggaacacatgtcccagcgcgatataagaggggcgtgctgccagcgcgacgtcgatttccatatcgtcatgtgtcgaaacgcccagccgcaggcctgccgcgcggatggcattgagatcggtggcttgcaaatcttcctgccccaaatggacgccatacgcctgatgcttgatcgccagccgccagtaatcgttgataaacaatcgcgcgttatagcggcggcccagcgcaattgccgccacgacatcggcttccacctcttcatcgcgccgatctttgatgcgtagctggagagtacgtacgcctgcatccaacagacgttcgatccactgtacgctgtccaccaccgggtacagtcctgaacgaaaaggtacaggaggaaaatcaggctgatacatcacgcttcctccttacgcaggtagatttctccgcctctggcacggaagttctccgacatatccgccattcccatttcaatagtttgcgtggcggcgtaatcacgcacttcctggctgattttcatcgagcagaatttcggcccacacatggagcaaaaatgggcgactttacctgactcttgcggcagggtttcatcgtgataagcgcgggcggtaaacgggtcgagggccagattaaactggtcttcccagcgaaattcgaagcgggctttcgacatggcgttatcgcgaatttgcgcgcccggatgccctttcgccaggtcagcggcgtgggcggcaatcttataggtgataagcccctgcttaacatcttctttattgggcagacccagatgctcttttggcgttacgtaacagagcatcgcgcagccaaaccagccaatcatcgccgcaccaatccccgacgtgaagtggtcatagcccggcgcaatatcggtagttagcggccccagagtgtaaaacggcgcttcgtggcagtgctctaactcctcggtcatattgcggcggatcatctgcatcggcacgtggcctgggccttcaatcatcacctgcacgtcatattcccaggcaattttggtcagttcgcccagcgtatgcagctcggcaaactgcgcttcatcgttggcgtcctgaatagaaccggggcgcagaccgtcgcccagcgacagcgaaacgtcataagcggcacagatttcacaaatttcgcggaagtgttgatagaggaaattttcctgatgatgggagaggcaccatttcgccataatcgaaccgccgcgagagacgataccggtcaggcgtttcgcggtcatcggcacatagcgcagcagtacgcccgcatggatagtgaagtaatccacaccttgctcggcctgttccagcagcgtgtcgcggaacgcttcccaggtaagatcttcggcgatcccgttaaccttctccagcgcctggtagatcggcactgtaccgatcggcaccgggctgttacgcaaaatccactcgcgggtttcgtgaatatagcgaccggtggagagatccatcaccgtatccgctccccagcgcgtggaccataccagcttttccacttcttcttcgatggaagaggtgaccgccgagttgccgatattggcgttaacttttaccaggaaattgcgaccaataatcatcggctccgattccggatgattaatgttggccgggataatcgcacgtccggcagcaacttcatcacggacaaattccgcagtgatattttccggcagacgtgcgccaaagctcattcccggatgctggtggcgtaaaacttcgctacggatgcgctcgcggcccatattctcgcggatggcgatgaattccatttccggcgtgatgatgccctggcgggcgtagtgcagttgggtgacacggcgtcctgctttggcgcgttttggtgttagtacgccgctaaaacgcagttcgtcgaggccatcatctgccagccgcgctttagtgtaatcggaactgcgcacggtaagttcttcggtatcgccgcgcgcatcgatccacggctggcgtagttttgccagcccttgctgcacgttaatggcaatctgcggatcaccatacgggccggaggtgtcgtagaccggaatcgcttcgttttcttcgtactgcggctgttctttgctaccgccaattagcgtcgggctaagctggatctcacgcatcggcacgcgcacgccggggtgtgtgccagtgatataaatgcgttttgagttgggaaaggcggtgccttccagggtgtcgataaaatgttgggcccgggcgcgttgttcgcggcgggtcagttttgttgcagacatagctcattccaaaaagttaaggacgtggcttgtcagacgacggatgaagcaagagacgatcgccgcaggggcgatgcgatagcagattaactcttgttcccttcgcaggtattagcctgatcaggttccgcggatcccgaataaacggtctcagccagttaaggcactccgacaagaaattagccccgcaaatggggcattgaatgtaaattacgcgttaacagcgcagaactcaagcaggatgtttgacgcgggcggcgtcaagcaccagcagaatcagcttatcttccagcacaaagcgcgcttccagcgcctcgccgatgtcagataaaacctgttgaaactcaaggtaattatcatgatcgatggcggtttccagactggaatcgtagtaatccataatctgttgagtattggcttcgagttgcggccaaatcttcgcggcgcgcgcgagttgcccgttgccttccagcttatgaagaatgcgctcataaatactgaaatgtccggcagacaagtaatcgaccaggctctgacaaaaatcatcaagggctttttcgtttagcctcatgtacgattctttgccaggcttaatgccaaccagattgtagtaagccacgagcagatgcttacgtacatgtagccagcgatcaaccagtttgttacttcctctgacgcgctccgtcaggttatcgagctggttaagcatgattgactccgcaagtttgtattcaaaaactgctcagtgagaaatgtaaaaaccatgttaaacatgccagtgatgcaaaggtagtgcaagagctatggatcgtataattgaaaaattagatcacggctggtgggtcgtcagccatgaacaaaaattatggttgccgaagggagaattgccatatggcgaagcggcaaatttcgatcttgtgggtcagcgcgcactacaaatcggcgaatggcagggggaacctgtttggttagtacaacagcagcggcgtcacgatatggggtcggtacgtcaggtcattgatctcgatgttgggctgtttcaactggccggacgaggcgtacaactggcggagttttaccgatcgcataaatactgtggttactgcgggcatgaaatgtatccgagcaaaaccgaatgggcgatgctgtgcagccattgccgtgagcgttactacccgcaaatcgccccctgcattattgttgccatccgtcgcgatgattcgatcctcctcgcccagcatacccgccatcgtaacggtgtccatacagtacttgccggattcgtcgaagtgggcgaaaccctcgagcaggcagtcgcgcgggaagtgatggaagagagcggaattaaagttaaaaacttgcgttacgtgacttctcagccgtggccgtttcctcagtctttaatgaccgcgtttatggcggaatatgacagcggcgacatcgtgatcgacccgaaagaattgctcgaggcgaactggtatcgctatgacgatttgccgttactcccgccgcccggcaccgtagcgcgccgtctgatagaagatacggtggcgatgtgtcgggcagagtatgagtgatgatacactgaccgcctgacgcactaaggaacagccaaaatgaccgaacttaaaaacgatcgttatctgcgggcgctgctgcgccagcccgttgatgtcactccagtatggatgatgcgccaggcgggtcgctatctaccggaatataaagccacgcgcgcccaggcgggcgattttatgtcgctgtgcaaaaacgccgagctggcgtgcgaagtgactttgcaaccgctgcgtcgctacccgctggatgcggcgatcctcttttccgatatcctcaccgtgccggacgcgatggggttagggctctattttgaagccggagaaggtccgcgttttacctcgccagtcacctgcaaagccgacgtcgataaactgccaattccggacccggaagatgagctgggttacgtgatgaacgcggtgcgtaccattcgtcgcgaactgaaaggcgaagtgccgctgattggtttttccggcagcccgtggacgctggcgacctacatggtggaaggcggcagcagcaaagccttcaccgtgatcaaaaaaatgatgtatgccgatccgcaggcgctgcacgctctgctcgataaactggcgaaaagcgtcactttgtatctgaatgcgcagattaaagccggtgctcaggcagtgatgattttcgacacctggggcggcgtgcttaccgggcgcgattatcaacagttctcgctctattacatgcataaaattgttgatggtttagtgcgtgaaaacgacggtcgccgcgtaccggtcacgctgtttaccaaaggcggcggacagtggctggaagccatggcagaaaccggttgcgatgcgctgggcctcgactggacaacggacatcgccgatgcgcgccgccgtgtgggcaataaagtcgcgttgcagggtaatatggatccgtcgatgctgtacgcgccgcctgcccgcattgaagaagaagtagcgactatacttgcaggtttcggtcacggcgaaggtcatgtctttaaccttggtcacggcattcatcaggatgtgccgccagaacatgctggcgtgttcgtggaggcagtgcatcgactgtctgaacagtatcaccgctaaggagtgattatggatctcgcgtcattacgcgctcaacaaatcgaactggcttcttctgtgatccgcgaggatcgactcgataaagatccaccggatctgatcgccggagccgatgtcgggtttgagcagggcggagaagtgacgcgagcggcgatggtgctgctgaaatatccctcgcttgagctggtggagtataaagttgcccgcatcgccaccaccatgccttacattccaggttttctttccttccgcgaatatcctgcgctgctggcagcgtgggagatgctgtcgcaaaagccggatttagtgtttgtcgatggtcatgggatctcgcatcctcgccgtcttggcgtcgccagccattttggcttattggtggatgtgccgaccattggcgtggcgaaaaaacgtctctgcggtaaattcgaaccgctctccagcgaaccgggcgcgctggccccgctgatggataaaggcgagcagctggcctgggtctggcgcagcaaagcgcgctgtaacccgttgtttatcgctaccggccatcgggtcagcgtggacagcgcgctggcgtgggtacaacgctgcatgaaaggctatcgtctgccggagccaacgcgctgggcggacgcggtggcctcggaacgtccggcgttcgtgcgctatacagcaaatcagccctaattcaggtaaactgcggataatttccgtatttgagaactcaacatgttacaaaacccaattcatctgcgtctggagcgcctggaaagctggcagcatgtcactttcatggcttgcttatgcgaacgcatgtaccccaattacgccatgttctgccagcaaaccggttttggtgatgggcaaatttaccgtcgtattctcgatctcatctgggaaacgctgaccgttaaagacgcaaaagtaaatttcgacagccaactggagaaatttgaagaagcgattccttcagccgacgatttcgatctgtacggcgtttatccggcaatcgatgcctgcgtggcgttaagtgaactggtccattcgcgtttgagtggtgaaacgctcgaacacgcggtggaagtgagtaagacctccatcacgaccgttgcgatgctggaaatgactcaggctggtcgcgaaatgagcgatgaagagcttaaagaaaacccagctgtagagcaagaatgggacattcagtgggaaatattccgacttttagctgagtgcgaagaacgcgatatcgagctgataaaaggccttagggcagacctgcgtgaggcgggtgagagcaatattggtataatttttcagcaataagaccagaaaacgtgatttaacgcctgatttgtcgtacctggagtcttccctttcgccccccgtctggtctacatttggggggcgaaaaaaagtggctatcggtgcgtgtatgcaggagagtgctattctggcatttccgtcgcactcgatgcttagcaagcgataaacacattgtaaggataacttatgaacaagactcaactgattgatgtaattgcagagaaagcagaactgtccaaaacccaggctaaagctgctctggagtccactctggctgcaattactgagtctctgaaagaaggcgatgctgtacaactggttggtttcggtaccttcaaagtgaaccaccgcgctgagcgtactggccgcaacccgcagaccggtaaagaaatcaaaattgccgcagctaacgtaccggcatttgtttctggcaaggcactgaaagacgcagttaagtaagattgcgtggcagtgaacagttttaacgaaggggtggtttcaccccttttgtctttctggcgtcgatcattgatgctggcaggcgctctgtttctcactgcctgtagtcacaactcttcacttcctccctttaccgccagtggatttgctgaagaccagggcgcggtacgcatctggcgaaaagacagcggcgataatgtgcatctgcttgccgtgtttagcccgtggcgcagtggcgataccacgacgcgagagtatcgctggcagggcgataacctcacgctcatcaatatcaatgtttacagcaaaccgccggtgaacattcgcgcgcgttttgacgatcgcggtgatctgagctttatgcaacgtgaatccgatggggaaaagcagcagctttctaacgaccaaatcgatttataccgttatcgtgctgatcagatccgccagattagcgatgccttacgtcaggggagagtcgtgctgcgccaggggcgctggcatgcgatggaacagaccgtgaccacctgcgaagggcaaaccattaaacctgatttagattcgcaggcgatagcgcatatcgagcgccgccagagccgctcttctgttgatgtcagcgtggcatggctggaagcgcccgaaggttcgcaattactgttagtggcaaactctgatttctgtcgctggcaacccaacgagaaaacgttctgatttaccagtggcccatacccatatgaccgccaccaccgcagccgccgtagcccatgcccattccggctccgcgcggaatacccgcttcagccatcgcgatatcccgtttcacccgtaactcatctaacgactgacgcaaattctccatctctttggcgaccgcgttaattttgctgctatccggtgggttcgcggctaacagggcattgtattcataacgcttcgtcaccagttgctgttgcagtgcgctgctttgagcgtaaaagtcattatggattttctgccacgctgtctgttgttcgctggtcaaaggcgcggcattttgctgccacataccgtgtccgccgtgagcaaatgcagatgtcgatcccatcgccattgctgaaagcgccatcattaccagggcaattttcgtgttccgtttcatggttaatcctccagtggttgtcttacttcgggtattgcatcttccgtgccaacgatgaaacgctgatatgacgggtaatctggcatgataaacgagtaaaatgactcgcctgctgcgggtagcgagtcatttttactcattgaaacttaagcctttgtgttacagcgcagggtaagcgctgataaaagatggcatgatttctgctgtcagaaagggatgagcaggcaaagaagaagatgcgttttatgcaacgttctaaagactccttagctaaatggttaagcgcgatcctccccgtggtcattgttgggctggtagggttgtttgcggtgacggtgattcgcgattatgggcgcgagactgccgccgccagacaaacgctgctggaaaaaggcagtgtacttattcgcgctcttgaatccggctcgcgcgtcggcatggggatgcgcatgcatcatgcgcagcagcaggccttactggaagaaatggccgggcagcctggagtacgttggtttgcggtcacggatgaacaaggaacaatcgtgatgcatagcaactccggcatggtgggaaaacagctttattccccgcaggaaatgcagcagttacatccgggagatgaagaagcgtggcggcggatcgatagcgcagacggcgagcctgttctggaaatttatcgccagtttcaaccgatgtttgctgctggaatgcaccggatgcgccatatgcagcagtatgccgcgacaccacaaacaattttcatcgctttcgacgccagtaatattgtgagtgccgaagatcgtgagcagagaaacaccctgattatcctcttcgccctggcgacggtcttgctggcaagcgtattgtcattcttctggtatcgccgctatctgcgctcgcgccagcttctacaagatgaaatgaagcgcaaagagaagctagtggcgctggggcatcttgcggcaggcgttgcccacgaaatccgtaacccactttcctcgattaaaggactggcgaaatactttgccgagcgcgcgcctgcagggggagaagcgcatcaactggcgcaggtgatggcgaaagaggccgaccgtttaaaccgcgtggtaagcgagctgctggaactggttaagccaacgcatctggctttgcaggcggtggatctcaacacgctgattaaccactcattacagctggtaggccaggatgcaaacagccgggagatccagttacgctttaccgccaacgacacattaccggaaattcaggccgatccggacaggctgactcaggtcctgttgaatctctatctcaatgctattcaggcgattggtcagcatggcgtgattagcgtgacggtcagcgaaagcggcgcgggcgtgaaaatcagcgttaccgacagcggtaagggaattgcggcagatcagcttgaagccatcttcactccgtacttcaccaccaaagccgaaggcaccggattggggctggcggtcgtgcataatattgttgaacaacacggtggtacaattcaggtcgcaagccaggagggaaaaggctcaacgttcaccctctggcttccggtcaatattacgcgtaaggacccacaaggatgacgcacgataatatcgatattctggtggtggatgatgacattagccactgcactattttgcaggctttactgcgcggctggggctataacgtcgcgctggcgaacagcgggcgacaggcgctggagcaggtgcgggagcgggtttttgatcttgtgctttgcgatgtgcgaatggcagagatggacggcattgccacgctaaaagagatcaaagcgttaaatccggcgattccggtactgattatgaccgcatactccagcgtcgagacggcggtagaggcactgaaaaccggggcgctggattatctcatcaagccgctggatttcgacaccctgcaggcgacgctggaaaaggcgctcgcgcatacgcacagtattgatgctgaaacgcctgcggtgactgccagccagttcggtatggtcggtaaaagcccggcgatgcaacacctgctcagtgaaatcgccctcgtcgcgccatcggaagccacggtgctgatccacggcgattccggcaccggtaaagagctggtcgccagggcgattcacgccagtagcgcacgtagcgaaaaaccgctggtaacgctcaactgtgcggcactcaacgaatccttgctggaatctgaattgttcggtcacgaaaaaggggcgtttactggagccgataaacgccgggaagggcgctttgttgaggcggacggcggcacgctgtttctcgatgaaattggcgatatctcgccgatgatgcaggtgcgtctgctgcgtgcgattcaggagcgcgaagttcagcgtgtcggtagcaaccagactatctcggttgatgtccggctgattgcggcgacccatcgcgatcttgccgcagaggtgaatgccgggcgttttcgccaggatctctactatcgcctgaatgtggtggcgattgaagtaccatcgctgcggcaacggcgggaggatatccctctgctggctagccattttcttcagcgttttgccgagcgtaatcgcaaggcggtaaaaggctttacgccacaggcgatggatttgctgatccactacgactggccgggaaacattcgtgaactggaaaacgcggtggaaaggtcggtggtgctgctgaccggggaatatatttccgaacgcgagctgccgctggcgattgccagtacgccgatcccgctggggcaaagtcaggatattcagccgctggtggaagtcgaaaaagaagtgattctggcggcactggagaaaacgggcggcaacaaaaccgaagccgcccgtcagttagggatcacgcgcaaaacgctattggcaaaactgtcgcgttagttctgctcgcgttcgatagcgcgccagccgatatctttccggcagaagcagtcgtcccagtgaatatcggtcattaaggcataagcgcgtttctgcgcttctgccacggtatgacccagcgcggtgacgcacagtacgcgcccgccgctggtcactacctgctcgttatccgccagtttcgtgcccgcgtggaacactttgccgcctgccacttcttccagcggcaggccgtggatcacgtcaccggtgcggtaatcacccggatatccacccgcagccatcaccacgccgagagaagcgcgttcatcccactctgacgttttctcgtccagtttgccttcacaggccgccaggcagagctcaaccagatcggacttcatgcgcagcataatcggctgggtttctggatcgccaaagcggcagttaaattcgataaccttcggattgccctgtttgtcgatcatcaggcccgcgtagagaaaaccggtgtaggtgttgccttccgccgccatgcctttcacggttggccagatgatacgttccatggtgcgctgatgaacttcatcggttactaccggcgcgggggagtaagcgcccatcccgcccgtgtttggtccggtatctttatcgcctacgcgtttgtgatcctggctggtggccatcggcagcacatgctcgccgtctaccatcacgataaagctcgcttcttcgccatcgaggaactcttcgataacgatgcgatgacccgcgtcgccaaaagcgttgcccgccagcatatcgtgaacagccgcttccgcttcttccagcgtcatcgccacgataacgcctttcccggcagccagaccgtccgctttaatgacgattggcgcgcctttctcacgcagatacgccagcgcaggttctacctcggtgaagttctggtattccgccgtagggatcttatggcgggccaggaaatctttggtaaacgcttttgagccttccagttgggccgcacctgcggttgggccgaagattttcagcccggcggcgcggaaggtatcgaccacgcctttcaccagcggcgcttccgggccgacgatggtcagatcaatcttttcgttttgtgcgaaatccaacagcgccgggatatcggttacgccgatagcgacgttctgtagcgcgggttccagcgcagtgcctgcattacccggagcaacaaaaacagtttcaaccagcggcgactgcgccgctttccaggccagcgcgtgctcgcgcccgccgttaccaatcactaatactttcatctattgctccattaatggcggaagtggcgcatgtcggtgaagagcatcgcaataccgtgctcgtcggcggcggcaatcacttcgtcatcacggatagaaccgccaggctggattacgcaggtcacgcccgcagcggcggcggcatcaataccgtcgcggaacgggaagaacgcgtcagaagccatcgaggaacctttcacttccaggccttcatcggccgctttaataccggcgatttttgcggagtacacgcggctcatctggcccgcgccaatgccgatagtcatattgtttttggcatagacgatagcgttggatttcacgaacttcgccaccttccagcagaacagcgcatcacgcagttcctgttcgctcggctgacgtttggtcaccacgcgcagttcttccgcaccgaccatccccaggtcacgatcctgaaccagcagaccgccgttcacgcgtttgaaatcgaggcccggaacacgctcgccccactgaccgcaggtcagaacgcgtacgttctgtttggcggcggtgattttcagggcttcttcgctggcggacggcgcaataatcacttcgacaaactgacgagaaatgatggcctgtgcggtttccgcatccagctcgcggttaaaggcaatgatgccgccgaatgcggaggttgggtcggttttgtacgcgcgatcgtaagcatcaagaatggaattgccgatagccacgccgcaagggttggcgtgcttcacaatcacacatgccggctcggcgaactctttcacgcactccagcgccgcatcggtatcggcgatgttgttataagagagggctttaccctgaacctgggttgcggtagcaacggaggcttctttcacattctcttctatatagaaggcagcctgctggtggctgttctcgccgtaacgcatatccagcttcttaatgaagttcaggttcagcgtgcgtgggaagcgaccggcggcttctttgctttcaccgtggtaagccggaaccatgctgccgaagtagttggcaatcatgctgtcgtaggcggcagtgtgttcgaaggctttgatggcgaggtcgaaacgggttgcaagcgtcagcgatccttcgttgtcatccatctctttaataatggcgtcgtagtcgctgctcttcaccacgattgcgacatctttatggttcttggcggcggagcgcaccatcgttgggccgccgatatcgatgttctcaaccgcatcttccagcgagcaaccttcacgggccacggtctgggcgaacggatacaggttaacaaccaccatatcgataggctggatctgatgttcttccataatggcatcgtcctggccgcgacggcccagaatgccaccatgtactttcggatgcagggtcttcacgcgtccatccatcatctccgggaaaccggtgtaatcggaaacttcggttaccggcagacctttttctgctaacagacgggcagtgccccctgtagacagcagctccacaccgcgtgcggaaagtgcctgggcgaattcgacgataccggctttgtcagaaacactgagcagagcgcggcggactggacgacgttgttgcatggtaaatcccctggatttgactattacagagagcgttagctgaatttttcgcgaaaactcagctaacgcccctaacggggcatccttatttttcgcccgcattgtaacgaaaacgtttgcgcaacgctcgcgaatttttctctttcaatggtgatcacaattttgacagtggttaccgtgggaaaaatacagaaattacattgatgattgtggataactctgtgcgtaaaaaggtataaagcggggttttgctggggaatgcagcagtcagtcatttttctgcaatttttctattgcggcctgcggagaactccctataatgcgcctccatcgacacggcggatgtgaatcacttcacacaaacagccggttcggttgaagagaaaaatcttgaaattcagggttgactctgaaagaggaaagcgtaatatacgccacctcgcgacagtgcgctaaagcgcgtcgcaactgctctttaacaatttatcagacaatctgtgtgggcactcgaagatacggattcttaacgtcgcaagacgaaaaatgaataccaagtctcaagagtgaacacgtaattcattacgaagtttaattctttgagcatcaaacttttaaattgaagagtttgatcatggctcagattgaacgctggcggcaggcctaacacatgcaagtcgaacggtaacaggaaacagcttgctgtttcgctgacgagtggcggacgggtgagtaatgtctgggaaactgcctgatggagggggataactactggaaacggtagctaataccgcataacgtcgcaagaccaaagagggggaccttcgggcctcttgccatcggatgtgcccagatgggattagcttgttggtggggtaacggctcaccaaggcgacgatccctagctggtctgagaggatgaccagccacactggaactgagacacggtccagactccctacgggaggcgagcagtggggaatattgcacaatgggcgcaagcctgatgcagccatgccgcgtgtatgaagaaggccttcgggttgtaaagtactttcagcggggaggaagggagtaaagttaatacctttgctcattgacgttacccgcagaagaagcaccggctaactccgtgccagcagccgcggtaatacggagggtgcaagcgttaatcggaattactgggcgtaaagcgcacgcaggcggtttgttaagtcagatgtgaaatccccgggctcaacctgggaactgcatctgatactggcaagcttgagtctcgtagagggggtagaattccaggtgtagcggtgaaatgcgtagagatctggaggaataccggtggcgaaggcggccccctggacgaagactgacgctcaggtgcgaaagcgtggggagcaaacaggattagataccctggtagtccacgccgtaaacgatgtcgacttggaggttgtgcccttgaggcgtggcttccggagctaacgcgttaagtcgaccgcctggggagtacggccgcaaggttaaaaactcaaatgaattgacgggggcccgcacaagcggtggagcatgtggtttaattcgatgcaacgcgaagaaccttacctggtcttgacatccacggaagttttcagagatgagaatgtgccttcgggaaccgtgagacaggtgctgcatggctgtcgtcagctcgtgttgtgaaatgttgggttaagtcccgcaacgagcgcaacccttatcctttgttgccagcggtccggccgggaactcaaaggagactgccagtgataaactggaggaaggtggggatgacgtcaagtcatcatggcccttacgaccagggctacacacgtgctacaatggcgcatacaaagagaagcgacctcgcgagagcaagcggacctcataaagtgcgtcgtagtccggattggagtctgcaactcgactccatgaagtcggaatcgctagtaatcgtggatcagaatgccacggtgaatacgttcccgggccttgtacacaccgcccgtcacaccatgggagtgggttgcaaaagaagtaggtagcttaaccttcgggagggcgcttaccactttgtgattcatgactggggtgaagtcgtaacaaggtaaccgtaggggaacctgcggttggatcacctccttaccttaaagaagcgttctttgaagtgctcacacagattgtctgatagaaagtgaaaagcaaggcgtcttgcgaagcagactgatacgtccccttcgtctagaggcccaggacaccgccctttcacggcggtaacaggggttcgaatcccctaggggacgccacttgctggtttgtgagtgaaagtcacctgccttaatatctcaaaactcatcttcgggtgatgtttgagatatttgctctttaaaaatctggatcaagctgaaaattgaaacactgaacaacgagagttgttcgtgagtctctcaaattttcgcaacacgatgatgaatcgaaagaaacatcttcgggttgtgaggttaagcgactaagcgtacacggtggatgccctggcagtcagaggcgatgaaggacgtgctaatctgcgataagcgtcggtaaggtgatatgaaccgttataaccggcgatttccgaatggggaaacccagtgtgtttcgacacactatcattaactgaatccataggttaatgaggcgaaccgggggaactgaaacatctaagtacccngaggaaangaaatcaaccgagattcccccagtagcggcgagcgaacggggagcagcccagagcctgaatcagtgtgtgtgttagtggaagcgtctggaaaggcgcgcgatacagggtgacagccccgtacacaaaaatgcacatgctgtgagctcgatgagtagggcgggacacgtggtatcctgtctgaatatggggggaccatcctccaaggctaaatactcctgactgaccgatagtgaaccagtaccgtgagggaaaggcgaaaagaaccccggcgaggggagtgaaaaagaacctgaaaccgtgtacgtacaagcagtgggagcacgcttaggcgtgtgactgcgtaccttttgtataatgggtcagcgacttatattctgtagcaaggttaaccgaataggggagccgaagggaaaccgagtcttaactgggcgttaagttgcagggtatagacccgaaacccggtgatctagccatgggcaggttgaaggttgggtaacactaactggaggaccgaaccgactaatgttgaaaaattagcggatgacttgtggctgggggtgaaaggccaatcaaaccgggagatagctggttctccccgaaagctatttaggtagcgcctcgtgaattcatctccgggggtagagcactgtttcggcaagggggtcatcccgacttaccaacccgatgcaaactgcgaataccggagaatgttatcacgggagacacacggcgggtgctaacgtccgtcgtgaagagggaaacaacccagaccgccagctaaggtcccaaagtcatggttaagtgggaaacgatgtgggaaggcccagacagccaggatgttggcttagaagcagccatcatttaaagaaagcgtaatagctcactggtcgagtcggcctgcgcggaagatgtaacggggctaaaccatgcaccgaagctgcggcagcgacgcttatgcgttgttgggtaggggagcgttctgtaagcctgtgaaggtgtactgtgaggtatgctggaggtatcagaagtgcgaatgctgacataagtaacgataaagcgggtgaaaagcccgctcgccggaagaccaagggttcctgtccaacgttaatcggggcagggtgagtcgacccctaaggcgaggccgaaaggcgtagtcgatgggaaacaggttaatattcctgtacttggtgttactgcgaaggggggacggagaaggctatgttggccgggcgacggttgtcccggtttaagcgtgtaggctggttttccaggcaaatccggaaaatcaaggctgaggcgtgatcgaygaggcactacggtgctgaagcaacaaatgccctgcttccaggaaaagcctctaagcatcaggtaacatcaaatcgtaccccaaaccgacacaggtggtcaggtagagaataccaaggcgcttgagagaactcgggtgaaggaactaggcaaaatggtgccgtaacttcgggagaaggcacgctgatatgtaggtgaagcgacttgctcgtggagctgaaatcagtcgaagataccagctggctgcaactgtttattaaaaacacagcactgtgcaaacacgaaagtggacgtatacggtgtgacgcctgcccggtgccggaaggttaattgatggggtcagcgcaagcgaagctcttgatcgaagccccggtaaacggcggccgtaactataacggtcctaaggtagcgaaattccttgtcgggtaagttccgacctgcacgaatggcgtaatgatggccaggctgtctccacccgagactcagtgaaattgaactcgctgtgaagatgcagtgtacccgcggcaagacggaaagaccccgtgaacctttactatagcttgacactgaacattgagccttgatgtgtaggataggtgggaggctttgaagtgtggacgccagtctgcatggagccgaccttgaaataccaccctttaatgtttgatgttctaacgtggacccgtaatccgggttgcggacagtgtctggtgggtagtttgactggggcggtctcctcctaaagagtaacggaggagcacgaaggttggctaatcctggtcggacatcaggaggttagtgcaatggcataagccagcttgactgcgagcgtgacggcgcgagcaggtgcgaaagcaggtcatagtgatccggtggttctgaatggaagggccatcgctcaacggataaaaggtactccggggataacaggctgataccgcccaagagttcatatcgacggcggtgtttggcacctcgatgtcggctcatcacatcctggggctgaagtaggtcccaagggtatggctgttcgccatttaaagtggtacgcgagctgggtttagaacgtcgtgagacagttcggtccctatctgccgtgggcgctggagaactgagggggctgctcctagtacgagaggaccggagtggacgcatcactggtgttcgggttgtcatgccaatggcactgcccggtagctaaatgcggaagagataagtgctgaaagcatctaagcacgaaacttgccccgagatgagttctccctgactccttgagagtcctgaaggaacgttgaagacgacgacgttgataggccgggtgtgtaagcgcagcgatgcgttgagctaaccggtactaatgaaccgtgaggcttaaccttacaacgccgaagctgttttggcggatgagagaagattttcagcctgatacagattaaatcagaacgcagaagcggtctgataaaacagaatttgcctggcggccgtagcgcggtggtcccacctgaccccatgccgaactcagaagtgaaacgccgtagcgccgatggtagtgtggggtctccccatgcgagagtagggaactgccaggcatcaaattaagcagaaggcccagtcggaagactgggcctttttgcgctggtgcagaaaaaggtcggatgcgacgctggcgcgtcttctccagcctgggcaggcacggcaggggcggcttattcccccacatacgccagattcagcaacggatacggtttccccaaatcgtccacctcagagcgtcccgtaaccttaaaacccaccttcttatagaacccaaccgcctgctcattttgctcattaacgttggttgtcagttccggtgccatcgagagcgcatgctccaccagcatccgacccacgccgcagccgcgcacatcaggatcgataaacagcgcatccatatgctgcccacttaacaacataaacccaaccggctgatcccgttcattaaccgcgacccacaacggtgcttccggcagaaaggaacgaaccagctcttccagctcggcccgatactctgctgataaaaaatcgtgggtggcatcgacagatcgacaccaaatcgcaacgagttcctccccttcctcatgctgtgagcggcgaatactaataaccattttctctccttttcgtcattcttatattctaacgtagccttttccttgaaactttctcaccttcaacatgcaggctcgacattggcaaattttctggttatcttcagctatctggatgtctaaacgtataagcgtatgtagtgaggtaatcaggttatgcctattcgtgtgccggacgagctacccgccgtcaatttcttgcgtgaagaaaacgtctttgtgatgacaacttctcgtgcgtctggtcaggaaattcgtccacttaaggttctgatccttaacctgatgccgaagaagattgaaactgaaaatcagtttctgcgcctgctttcaaactcacctttgcaggtcgatattcagctgttgcgcatcgattcccgtgaatcgcgcaacacgcccgcagagcatctgaacaacttctactgtaactttgaagatattcaggaacagaactttgacggtctgattgtaaccggtgcgccgctgggcctggtggagtttaatgatgtcgcttactggccgcagatcaaacaggtgctggagtggtcgaaagatcacgtcacctcgacgctgtttgtctgctgggcggtacaggccgcgctcaatatcctctacggcattcctaagcaaactcgcaccgacaaactctctggcgtttacgagcatcatattctccatcctcatgcgcttctgacgcgtggctttgatgattcattcctggcaccacattcgcgctatgctgactttccggcagcgttgattcgtgattacaccgatctggaaattctggcagagacggaagaaggggatgcatatctgtttgccagcaaagataagcgcattgcctttgtgacgggccatcccgaatatgatgcgcaaacgctggcgcaggaatatttccgcgatgtggaagccggactaggcccggaagtaccgtataactatttcccgcacaatgatccgcaaaatacaccgcgagcgagctggcgtagtcacggtaatttgctgtttaccaactggctcaactattacgtctatcagatcacgccatacgatctacggcacatgaatccaacgctggattaatcttctgtgatagtcgatcgttaagcgattcagcaccttacctcaggcaccttcgggtgcctttttatttccgaaacgcacctcaggaggtgaataaattttattcatattgttatcaataagttatcaagtatttttaattaaaatggaaattgtttttgattttgcattttaaatgagtagtcttagttgtgctgaacgaaaagcgcacaacgatccttcgttcacagtggggaagttttcggatccatgacgaggagctgcacgatgactgaacaggcaacaacaaccgatgaactggctttcataaggccgtatggcgagcaggagaagcaaattcttactgccgaagcggtagaatttctgactgagctggtgacgcattttacgccacaacgcaataaacttctggcagcgcgcattcagcagcagcaagatattgataacggaactttgcctgattttatttcggaaacagcttccattcgcgatacggactggaaaattcgtggtattcccgcggacttacaagatcgtcgagtcgagataactggcccggttgagcgcaagatggtgatcaacgcactgaacgccaatgtgaaagtctttatggccgatttcgaagattcactggcaccagactggaacaaagtgatcgacgggcaaattaacctgcgcgatgcggttaacggcaccatcagctataccaatgaagcaggcaaaatttatcagctcaagcccaatccagcggttttgatttgtcgggtacgcggtctgcacttgccggaaaaacatgtcacctggcgtggtgaggcaatccccggtagcctgtttgattttgcgctctatttcttccacaactatcaggcactgttggcaaagggcagcggtccctatttctatctgccgaaaacccagtcctggcaggaagcggcctggtggagcgaagtcttcagctatgcagaagatcgctttaatctgccgcgcggcaccatcaaggcgacgttgctgattgaaacgctgcccgccgtgttccagatggatgaaatccttcacgcgctgcgtgaccatattgttggtctgaactgcggtcgttgggattacatcttcagctatatcaaaacgttgaaaaactatcccgatcgcgtcctgccagacagacaggcagtgacgatggataaaccattcctgaatgcttactcacgcctgttgattaaaacctgccataaacgcggtgcttttgcgatgggcggcatggcagcgtttattccgagcaaagatgaagagcgcaataaccaggtgctcaacaaagtaaaagcggataaagcgctggaagccaataacggtcacgatggcacatggattgctcacccaggccttgcggatacggcaatggcggtattcaacgacattctcggctcccgtaaaaatcagcttgaagtgatgcgcgaacaagacgtgccgattactgccgatcagctgctggcaccttgtgatggtgaatgcaccgaagaaggtatgcgcgccaacattcgcgtggcagtgcagtacatcgaagcatggatctccggcaacggctgcgtgccgatttatggcctgatggaagatgcggcgacggctgaaatttcccgtacctcaatctggcagtggatccatcatcaaaaacgttgagcaatggcaaaccggtgaccaaagccttgttccgccagatgctgggtgaagagatgaaagtcattgccagcgaactgggcgaagaacgtttctcccaggggcgttttgacgatgccgcacgcttgatggaacagatcaccacttccgatgagttaattgatttcctgaccctgccaggctaccgcctgttagcgtaaaccaccacataactatggagcatctgcacatgaaaacccgtacacaacaaattgaagaattacagaaagagtggactcaaccgcgttgggaaggcattactcgcccatacagcgcggaagatgtggtgaaattacgcggttcagtcaatcctgaatgcaccctggcgcaactgggcgcggcgaaaatgtggcgtctgctgcatggcgagtcgaaaaaaggctacatcaacagcctcggtgcactgactggcggtcaggcgctgcaacaggcgaaagcgggtattgaagcagtctatctgtcgggatggcaggtagcggcggacgctaacctggcggccagcatgtatccggatcagtcgctctatccggcaaactcggtgccagctgtggtggagcggatcaacaacaccttccgtcgtgccgatcagatccaatggtccgcaggcattgagccgggcgatccgcgctatgtcgattacttcctgccgatcgttgccgatgcggaagccggttttggcggtgtcctgaatgcctttgaactgatgaaagcgatgattgaagccggtgcagcggcagttcacttcgaagatcagctggcgtcagtgaagaaatgcggtcacatgggcggcaaagttttggtgccaactcaggaagctattcagaaactggtcgcggcgcgtcttgcagctgacgtgacgggcgttccaaccctgctggttgctcgtaccgatgccgatgcggcggatctgattacctccgattgcgacccgtatgacagtgaatttattactggcgagcgtaccagtgaaggcttcttccgtactcatgcgggcattgagcaagcgatcagccgtggcctggcgtatgcgccatatgctgacctggtctggtgtgaaacctccacgccggatctggaactggcgcgtcgctttgcacaagctatccacgcgaaatatccgggcaaactgctggcttataactgctcgccgtcgttcaactggcagaaaaacctcgacgacaaaactattgccagcttccagcagcagctgtcggatatgggctacaagttccagttcatcaccctggcaggtatccacagcatgtggttcaacatgtttgacctggcaaacgcctatgcccagggcgagggtatgaagcactacgttgagaaagtgcagcagccggaatttgccgccgcgaaagatggctataccttcgtatctcaccagcaggaagtgggtacaggttacttcgataaagtgacgactattattcagggcggcacgtcttcagtcaccgcgctgaccggctccactgaagaatcgcagttctaagcaacaacaaccgttgctgactgtaggccggataaggcgttcacgccgcatccggcaatcggtgcacgatgcctgatgcgacgcttgcgcgtcttatcatgcctacagccgttgccgaacgtaggccggataaggcatttacgccgcatccggcaatcggtgcacgatgcctgatgcgacgcttgcgcgtcttatcatgcctacaaccgttgccgaacgtaggctggataaggcgtttacgccgcatccggcaattctctgctcctgatgagggcgctaaatgccgcgtggcctggaattactgattgctcaaaccattttgcaaggcttcgacgctcagtatggtcgattcctcgaagtgacttccggggcgcagcagcgtttcgaacaggccgactggcatgctgtccagcaggcgatgaaaaaccgtatccatctttacgatcatcacgttggtctggtcgtggagcaactgcgctgcattactaacggccaaagtacggacgcggcatttttactgcgcgttaaagagcattacacgcggctgttgccggattacccgcgcttcgagattgcggagagcttttttaactccgtgtactgtcggttatttgaccaccgctcgcttactcccgagcggctttttatctttagctctcagccagagcgccgctttcgtaccattccccgcccgctggcgaaagactttcaccccgatcacggctgggaatctctactgatgcgcgttatcagcgacctgccgctgcgcctgcgctggcagaataaaagccgtgacattcattacatcattcgccatctgacggaaacgctggggacagacaacctcgcggaaagtcatttacaggtggcgaacgaactgttttaccgcaataaagccgcctggctggtgggcaaactgatcacgccttccggcacgttgcccttcttactgccgatccaccagacggacgacggcgagttatttattgatacctgcctgacgacgaccgccgaagcgagcattgtttttggctttgcgcgttcttattttatggtttatgcaccgctgcccgcagcgctggtcgagtggctacgggaaattctgccaggtaaaaccactgctgaattgtatatggctatcggctgccagaagcacgccaaaaccgaaagctaccgcgaatatctcgtttatctacagggctgtaatgagcagttcattgaagcgccgggtattcgtggaatggtgatgttggtatttacgctgccgggctttgatcgggtattcaaagtcatcaaagacaagttcgcgccgcagaaagagatgtctgccgctcacgttcgtgcctgctatcaactggtgaaagagcacgaccgtgtgggccgaatggcggacacccaggagtttgaaaactttgtgctggagaagcggcatatttccccggcattaatggaattactgctccaggaagcagcggaaaaaatcaccgatcttggtgagcagattgtaattcgccatctctatatcgagcggcggatggtgccgctcaatatctggctggaacaagtggaaggtcagcagttgcgcgacgccattgaagaatacggtaacgctattcgccagcttgccgctgctaacatttttcctggcgacatgctgtttaaaaacttcggtgtcacccgtcacgggcgtgtggttttttatgattacgatgaaatttgctacatgacggaagtgaatttccgcgacatcccgccgccgcgctatccggaagacgaacttgccagcgaaccgtggtacagcgtctcgccgggcgatgttttcccggaagagtttcgccactggctatgcgccgacccgcgtattggtccgctgtttgaagagatgcacgccgacctgttccgcgctgattactggcgcgcactacaaaaccgcatacgtgaagggcatgtggaagatgtttatgcgtatcggcgcaggcaaagatttagcgtacggtatggggagatgcttttttgagtaaagcttccatataatttttctccgcaatgtatcgagggttatccgtaaagccaaagctttcagccatcttatttaatgtattaaggattaattcagcaataacccggtgaccaaattcaaaagccaactcaaaggcagagtatttttgtggcgctttgtgttgccaaaaatccataatatcttcagcggtaaatccaaacaggcgtgcatggtcagataaagcaagataaaccgtctctacaacattttgttgtttatgctgtatcgctgaaaacaaaccgggatattcattagaattatttgccaggaggaggggcttcatatttttttatcgaatttaaacgtattaaacagagtgggtaatgcgttaaaaatagtattaataacgttcatatgtccactattataggcagtcaacatttctgttctatgtagttctggcattttctggagctgaatcatcagttgcgtaagttggtgattctgaccaattgccattagcaaattcatcgttgctggtgataatggaggggttatttcatccacagatccttttaacatcaatagctgttctttcggaagtgctggaattattgcaacagattggttaataacatgatcatttgaccatttcaggaggctataatctacattcataaaatccatcagagaatagtgtttaatatcctctttgctttcgctcataattcttattttatcgttagttacattaggatcataaaccgaaaccacgtaatgggtacatccttcagttgtgttctttattcttagccggaccgtcaaagcatggttatccaccagtaatatggctgccataacactgatgccatttgattccatcttgtcaaaatatgctttcataactagcccgaaatcaccgcaggcagcaacgcaacgcccctcaggacggctggaaaccaacgccaaagtctggtttttgcattttttgttgaagtgcgtgagaaatttttcagctgaagagtaatcatcttgatggggtttgtaatcaacattctgataaatatcattaatatattgtgcagcaatgtgtcggcatactatacggttttgggtcgccccggaaaataacattgaccattaagtttaattcttgggaattctttttcttttctatctgattttaggtttaattcttgtttatcaagggtgtctgagcgttgaggtaaaatttccattaggtattcttcaaatattggggcaatggtttgagtaagtgtcgtgttttcgtttttattaattatcgtaatttctttcttatcagcttgtaagacggacgtggaaaatttaatgacaaaatccttgttgctaaagatatgacgaccattttgtctacagttctctgagaagctttttaatagaggcgtcgccagctccttgccagaaaatttatcctcgagttctttataaaacaattcactcagggtttggtgttcatttgtctgggctgtattattaatatttgcagagaaagaactacgagggatacgagtaatcatttaaatatctcattgtttattgatgtcttgaattttaactatcagaacagtgaaaaaatttaatatgattacaagtaaagaaatatcataaatcgctcaatctcataatgcagccgtaaaagtttcggtggaatgagatcttgcgattttgttaatgattaagtggtttgatgtttaaaaataatgctgagttaataaaagtgtgtgaagtgtatgacattaagttattttggcgtcaatgcgattaacagacacccttattctattgccactcaggtatgatgggcagaatattgcctctgcccgccagaaaaagtcagcgcattccaccgtacgccagcgtcacttccttcgccgctttaatcaccatcgcgccaaactcggtcacgcggtcatcggtaatgcgtgaaatcggtccggaaattgaaattgcggcaaacggttcgcggtgctcatcgaaaatacacgctgcaaggcaacgtagccccagtgcatgttcctcatcgtcaaatgaataaccccgtttgcgcgtttgggcgagatcttcttttaaatgcacaggagacaccagcgttgcgtgggtataggcatgtaaccctttgcggtgcagcagcttcgtcacctgttcttcgctcagttgggctaaaaaggctttacccgcaccggaagcgtgcatcggcaatttaccgccgataggcgcggacattcgcatcagatgcgtacactgtacctggtcgataataatcgcttcgtgatcgctttgatcaagcaccgccatattgaccgtttcgccagactcttccattaaattgcgcaggatagggtgaacaatcgctaacaaattacggctctggagaaagctgctgccgaccataaaggcatgtgcgccgattgcccaatgtcccagttcgccgacctgacgcacgaaaccctgctgttgcatcgtggttagcaggcggtgggtcgtggaattgggtaacccggcttgttgcgccagctctgtgagtgccacactgccattggattcggcaatccactccagtaatttcaggccacgcgttaaagactgaacctgtccagtcgctggtgcggtggcaacggcgggttttctgccgcgtttcgcgggaatgggtgcgaccatgacagcctcctttttctgtatcgtggaaatcattttcatttttattgttagctaatgcaatagttgctgaactgatccgatgagttaatgttgaacaaatctcatgttgcgtggtggtcgcttttaccacagatgcgtttatgccagtatggtttgttgaatttttattaaatctgggttgagcgtgtcgggagcaagtgtgagcagcaaagtggaacaactgcgtgcgcagttaaatgaacgtattctggtgctggacggcggtatgggcaccatgatccagagctatcgactgaacgaagccgattttcgtggtgaacgctttgccgactggccatgcgatctcaaaggcaacaacgacctgctggtgctcagcaaaccggaagtgatcgccgctatccacaacgcctactttgaagcgggcgcggatatcatcgaaaccaacacctttaactccacgaccattgcgatggcggattaccagatggaatccctgtcggcggaaatcaactttgcggcggcgaaactggcgcgagcttgtgctgatgagtggaccgcgcgcacgccggagaaaccgcgctacgttgccggtgttctcggcccgaccaaccgcacggcgtctatttctccggacgtaaatgatccggcatttcgtaatatcacttttgacgggctggtggcggcttatcgagagtccaccaaagcgctggtggaaggtggtgcggatctgatcctgattgaaaccgttttcgacacccttaacgccaaagcggcggtttttgcggtgaaaacggagtttgaagcgctgggcgttgagctgccgattatgatctccggcaccatcaccgacgcctccgggcgcacgctctccgggcagaccaccgaagcattttacaactcattgcgccacgccgaagctctgacctttggcctgaactgtgcgctggggcccgatgaactgcgccagtacgtgcaggagctgtcacggattgcggaatgctacgtcaccgcgcacccgaacgccgggctacccaacgcctttggtgagtacgatctcgacgccgacacgatggcaaaacagatacgtgaatgggcgcaagcgggttttctcaatatcgtcggcggctgctgtggcaccacgccacaacatattgcagcgatgagtcgtgcagtagaaggattagcgccgcgcaaactgccggaaatccccgtagcctgccgtttgtccggcctggagccgctgaacattggcgaagatagcctgtttgtgaacgtgggtgaacgcaccaacgtcaccggttccgctaagttcaagcgcctgatcaaagaagagaaatacagcgaggcactggatgtggcccgccagcaggtggaaaacggtgcgcagattatcgatatcaacatggatgaagggatgctcgacgccgaagcggcgatggtgcgttttctcaatctgattgccggtgaaccggatatcgctcgcgtgccgattatgatcgactcctcaaaatgggatgtcattgaaaaaggtctgaagtgtatccagggcaaaggcattgttaactctatctcgatgaaagagggcgtcgacgcctttatccatcacgcgaagctcttgcgtcgttacggtgcggcagtggtggtaatggcctttgacgaacagggacaggccgatacccgcgcacggaaaatcgagatttgccgtcgggcgtacaaaatcctcaccgaagaggttggcttcccgccagaagatatcatcttcgacccgaacatcttcgcggtcgcaaccggcattgaagagcacaacaactacgcgcaggactttatcggcgcgtgtgaagatatcaaacgcgaactgccgcacgcgctgatttccggcggtgtatctaacgtttctttctcattccgtggcaacgatccggtgcgcgaagccattcacgcggtgttcctctactacgctattcgcaatggcatggatatggggatcgtcaacgccgggcaactggcgatttacgacgacctacccgctgaactgcgcgacgcggtggaagatgtgattcttaaccgtcgcgacgatggcactgagcgtttactggagcttgccgagaaatatcgcggcagcaaaaccgacgacaccgctaacgcccagcaggcggagtggcgctcgtgggaagtgaataaacgtctggaatactcgctggttaaaggcattaccgagtttatcgagcaggataccgaagaagcccgccagcaggctacgcgcccgattgaagtgattgaaggcccgctgatggacggtatgaacgtggtcggcgatctgtttggcgaagggaaaatgttcctgccacaggtggtcaaatcggcgcgcgtcatgaaacaggcagtggcgtatctcgaaccgtttattgaagccagcaaagagcagggtaaaaccaacggcaagatggtgatcgccaccgtgaaaggcgatgtccacgacatcggtaaaaatatcgttggcgtggtgctgcaatgtaacaactacgaaattgtcgatctcggcgttatggtgcctgcggaaaaaattctccgtaccgctaaagaagtgaatgctgatctgattggactttcggggcttatcacgccgtcgctggacgagatggttaacgtggcgaaagagatggagcgtcagggcttcaccatcccgctattgattggcggcgcgacgacctcaaaagcgcacacggcggtgaaaattgagcagaactacagcggcccgacggtgtatgtacagaacgcatcgcgcaccgttggtgtggtggcggcgctgctttccgatactcagcgtgatgattttgtcgctcgtacccgcaaggagtacgaaaccgtacgtattcagcacgggcgtaagaaaccgcgcacaccaccggtcacgctggaagcggcgcgcgataacgatttcgcttttgactggcaggcttacacgccgccggtggcgcaccgtctcggcgtgcaggaagttgaagccagcatcgaaactctgcgtaattacatcgactggacaccgttctttatgacctggtcgctggccgggaagtatccgcgcattctggaagatgaagtggtgggcgttgaggcgcagcggctgtttaaagacgccaacgacatgctggataaattaagcgccgagaaaacgctgaatccgcgtggcgtggtgggcctgttcccggcaaaccgtgtgggcgatgacattgaaatctaccgtgacgaaacgcgcacccatgtgatcaacgtcagccaccatctgcgtcaacagaccgaaaaaacgggattcgctaactactgtctcgctgacttcgttgcgccgaagctttctggtaaagcagattacatcggcgcatttgccgtgactggcgggctggaagaggacgcactggctgatgcctttgaagcgcagcacgatgattacaacaaaatcatggtgaaagcgcttgccgaccgtctggcggaagcctttgcggagtatctccatgagcgtgtgcgtaaagtctactggggctatgcgccgaacgagaacctcagcaacgaagaactgatccgcgaaaactaccagggcatccgtccggcaccgggctatccggcctgcccggaacatacggaaaaagccaccatctgggagctgctggaagtggaaaaacacactggcatgaaactcacagaatctttcgccatgtggcccggtgcatcggtttcgggttggtacttcagccacccggacagcaagtactacgctgtagcacaaattcagcgcgatcaggttgaagattatgcccgccgtaaaggtatgagcgttaccgaagttgagcgctggctggcaccgaatctggggtatgacgcggactgattcacaaatctgtcacttttccttacaacaaacagggcgctcaatgagtgccctgtctctttattaatatgaaacacttatactggaaacaggctggaataatcttagccggaaaaacgaatgtcaaaaggcacagtaaagatgccagtcagcgtgtttccggtcctttggtcattcaattgcttcaggcacatataacgataaggagaacctgaactcgtgttaacgctgcttcacctgctttctgccgtcgccctgctggtctgggggactcatattgttcgaaccggcgtaatgcgcgtcttcggcgcgcgtttgcgtactgtccttagccggagcgtcgaaaaaaagccgctcgccttttgcgcggggatcggcgttaccgcactggtgcagagcagtaatgccaccaccatgctggtgacctcgtttgtcgctcaggatctggtagccctcgcaccggctctggtcattgtgctgggtgcagatgtcgggacggcgctaatggcgcgtattctcaccttcgacttatcctggctgtcaccgttacttatttttatcggcgtgatttttttcctcggacgcaaacagtcacgcgccgggcaactgggccgcgtcggtattggtcttgggctgattttgctggcgctggagttgattgtgcaggccgtaacgccgatcacccaggcaaacggcgttcaggtgatctttgcctcgctgaccggcgatattctgctggatgcgctgattggcgcgatgttcgccattatcagctactccagccttgctgctgtactgctgactgcgactctgaccgccgcaggcattatctccttccccgtggcgctctgtctggtgattggtgctaacctcggttccggcctgctggcgatgctcaacaacagtgccgccaatgccgcagcccgccgtgtcgcgctgggtagtttgctgtttaagctggtgggtagcctgattatcctgccgtttgtccatttgctggcagagacaatggggaagttgtcattgccaaaagcggaactggtgatctatttccacgtcttctacaaccttgtacgttgcctggtcatgctgccatttgttgacccgatggcacggttttgcaaaacgattattcgcgatgaaccggaactggatacccagctacggcccaaacatctggatgtcagcgcgctggatacgcccacgcttgctctggcgaacgccgcgcgcgaaaccctgcgcattggcgacgccatggaacagatgatggaagggctaaataaagtgatgcacggcgagccacggcaggagaaagagctgcgtaagctggcagatgatatcaacgttctctacaccgccattaagctgtatctggcgcggatgccaaaagaagagttggcggaggaagagtcgcgccgctgggcggagatcatcgaaatgtcgctcaaccttgaacaggcctccgatatcgtcgagcgcatgggcagcgaaattgccgataaatcgctggcagcacggcgggcattttcgcttgatggcttgaaggaactggatgcgctctatgagcaattgctcagtaatttaaaactggcaatgtcggtgttcttctctggcgatgtcaccagcgctcgtcgtttgcgtcgcagcaaacatcgttttcgcattcttaatcgccgctattcccacgcccacgtcgatcgcctgcatcagcaaaacgtgcagagcattgaaaccagttcgctacatttaggcttactgggagatatgcagcgcctgaactcgctgttttgttcggtggcttacagtgtgctggaacagccggatgaagatgaaggacgggacgagtattaatattgtgaatcctgtaggcctgataagacgcgtcaagcgtcgcatcaggcactatgaacaagatgccggatcatgcatccggcaattcacttaaaaacggtgaccagcttctagcggcaccgcttcttcaccagccttaaacacataagtggtgttcgggccacccagcgtagcgtgacctttactcactgtgatccagttaccttccggtagaccaataatcgtcagttctggcgcgacgaccagcagttcgcgaatacgctgctcacgggtttcacctttatggccttccggcagcgcgttggtgaagtgcgggttgatttgcaacgggaacagatttagcgcatcgaaaccttgcggatcgacaatcggcatatcgttggtggtacgaatggttgggcaagcaaggttagcgcctgcgctccagccaatatacagagcgccacgtttaaccacgtcagtaattggtgccagcagcccgcgctcgcggcactgtttcagcaactggaaagtattcccgccgccgacaatcacgatctcagcattttcaatcgcggcaacgggatcgacaacgctatgaataccggtgacagaaacacccagcggagcgagaaccgcagccgttttcgctgtgtaatcatcccaggtctgcgttacgccagcgaaagggataaacaccgctgagcggcgaccctgcaactgttcagcaattagcggcagtgcatgttccagccaggctttacccggcagcgtcgagttactcaataaaagcagttccattacttctccggttagtaagaaatcacgggaggcatgctaccactgcgaatttaaccacttactgacatggctcacgatgtcgcacattgcttctggaaagtgatttgagcaggtaacgaattcaagccaatggaaataacaaatagttcgctcatgactattttttatcaacccaaaggtacggtatattccgttttttacaggagaatttatgctgcccgactcatcagtccgtttaaataaatacatcagcgaaagcggaatttgctcacgccgcgaagcggatcgctatatcgagcaaggcaatgtgttccttaatggcaagcgagccaccattggcgatcaggtgaaacccggcgacgttgtgaaagtaaacggtcagttgattgagcctcgggaagccgaagatttggtacttatcgccctgaacaagcccgtcggtattgtcagcaccaccgaagatggcgagcgcgataacattgtcgatttcgttaaccacagcaaacgcgtgttcccgattggccgcctggataaagactcccaggggctgattttcctcaccaatcacggcgatctggtgaataagatcctccgtgcgggtaacgatcatgagaaagagtatctggttacggtcgataaaccgattaccgatgaatttattcgtggtatgggggcgggggtgccaatcctcgggacagtgactaaaaagtgtaaagtcaaaaaagaagcgccgtttgtcttccgcattaccctggtgcaggggctgaaccgtcagatccgtcgcatgtgcgagcactttggttacgaagtgaaaaagctggaacgtacgcgcattatgaacgtcagtttaagcggcattccgctgggtgagtggcgcgatttaactgatgatgagttaatcgacctctttaagctcatcgaaaattcctcttccgaggcaaaacctaaagtgaaggccaaaccgaaaacagcgggcatcaaacgtccagtcgttaagatggaaaaaacggcggaaaaaggcggtcgcccggcgtccaacggtaagcgttttacctctccggggcgtaaaaagaaggggcgctaatcagcgcctgccgcgcgtcgacgtatttgctgaccagctaaatgacgcttcaggatccggtttataagcctgctttttcttcaactggcgggcttttttcgcttcagcctcacgctcgaccattaatttatcgatgtactctttcttaatgctgttggtttcggagttggtcagtacgcgaccatgcgcaatccgcgcccgatccagcagtgttttaagttcacgctgctcgcgttcagtcatctctttttgggtaatacgggggagtgccatgatggtgccctcagtgagccagagagttcagtgtacgggaattcgtttgcgagctgaactgataatattcctttgttctcttcttaaatatttatctttcttgataattgacgataaatacagatacaaatttagcgaaaagttttccctctacaaacaaaaataatttattaaatctttatttttcatttggttaataatttttctcaattctggcacgcttctcgcaatatctcgtacgcgttgaaactgaattacaaagggggtcaaaccccgtcggcacaccaggaacggccaggctgttttccgggcgtgttccgtcagcctttgacgccaattatgggttcgattcccacattcattcctgaaatgaatactggttgtaacttattaaataaaaagtgagggattgcgcagtcagcgatccccgataacgtcgccgataaagacgccgggtaacaggcaaaagggaattcccctgtcgcttcgtgtctgcttccgcgacggctgttaagcaaggaatagataatgattaagaaaataagcgtaagaaaagatcagctggcattactctccagaaatggcgattactacaaagtgctgcatgcaggcgagcatcttttaccctggttaaatacgccagaagtcttgctgattacgctcgatggcagcgaagttcccgacgtgctggcggattatttgcgccgctttcagcctgattgggtggagaaatattgcctggtggcagacttgtcggagattgaagccggggcgttgtatatggacggtattttgctggagattctgccgccatcaacgcgccgtttgtactggcgtgtagaagatgatttgacactggtgcggatgaatacgcagcaagtccaggtacaaacggaggtgatgaatgcggtattgcaaccacggcgcaaaggggcagttaaaggccgcgatgcgatactcacggtgcaggttccggcctggcatgtaggcgtgctgaaaatcgatggtgaaacgcaggcgctgttaccgccggggctgacagcatactggaaaataaatcatctggttgaggctgaagttgtcgacacccgcttgcaggtactggaagtcagcgggcaagaaatcttaacgaaagataaggtcaatctgcggattaatctcgccgctaactggcgctacagcgacgtgttgctggcatttagtcagttaacgaagccgattgatcatttgtatcgggaattgcaatttgccctgcgtgaagcggtaggtactcgtacgctggatgaactgctggaagataaacaggtcattgatgacgttgtcagcgaacaggtgaaatcgcgcatgttgccatttggtatggagattgcttcattaggggtgaaagatatcgtcctgcctggcgatatgaaaaatatccttgcgcagctggttgaggcggagaaatctgcgcaggcgaatgtgattcgccgacgtgaagaaacggcagcgacgcgctcgttactgaacaccgccaaagtcatggagaacaatccggtagcgttgcgtttaaaagagctagaaacgctggagagagtggctgagcggatcgataacatctctgtatttggcggtctggatcaggttctgcatgggttggttaatatcaaagggtgagtaacatgccattaaatggagtcagtgctgcgatgcgcgaacgggtatcgcagcagttaaaagaaatagaacggcgctacggcgtgaaagtgctgtatgcctgtgaatccgggagccgcggctgggggtttgcctcgcccgacagcgactacgatgtacggtttttgtatgttcacccgctggaatggtatctgcgggtggagccgccgcgcgatgttatcgagctgcccatcgacgacgagttagatgtttccggttgggagtggcgtaaggcgctgggattattgaaaggcgcgaccccgacgctgatagaatggctggattctccggttgtctatcaacaagatgaagaaacgataacggcgcttaaggcaatggtcccaatgtggttttctccgctgcgtgcgcgctggcattactattcgatggcgcagaaaaacttccgcggatatttgcagggcgatgaagttcgactgaaaaaatacttttacgtgctgcgtccgctgctggccgtgcgctgggtcgaagcgggaaaaggcgtgccgccaatgcgctttgctgagttactggcgggaagcgaacttgatgcgccgttacgtgcagaaatagacgaattactggaacgtaaacagcgcgcaggagaagcggaatatggtccgcgccgtccattgttacatgcgtttatttgtgcggaacaggcgcgtggggaaattccaccgctgttaccggatagcagagaaggggacgttaaggaactggatagcttaatgtaccagacggtaatgcgccgggcataaagcccggcgttatttcacgccatcagctcttattattattgtgtattcccgctgatttcattctgtataagtgttgcaatatcgtcattcgttgccgcttgtgaactaaatatcatcttctcacgcgaatacaccgcaaacttatctgacaggttcgaagcaaacaccttgcgggcattttctgccagcaaaccggtgacgatatcatggtggtttttatccacttttcgggcaatatttcccgcctctttgtccttactataccgttcattggtgctttcccagcttaatgccgctgaggttgtttttatcatgacttctgtttggtagcctgcatctttgagtttttttaatgtttgtaacggcgtcgcggcattacgaaatgttccttcgacaacaatgttgagtttactgactatcgctctctcaattgcacgttcgaccgtttcgccggaaaatttcgctgtatgggtaacaaaatcatccccataattttggtagatataattaaaatcagggtgtagaaatcgaaaatcatcaccgttaataatcattatattatcttttgtctctcttttggctaattcaatcagagatgatttacctgctccgggttgcccacctaaaacaaaaccaatgggatgctgttgcggtgtgacttcatgatttgtcagacgctgccaaatagaatcaaaagatgctttattttctgaatgcgtagtattgttgaattcatgctgatattgagttcttacctgctgaaggagaatcttaccttgtgtaaaatcaacaagttcagcgggggtagaataaagataatcgcgatagctgactaatcgcttgagagcatcgcctgaatcctgatgcgacgaaactgagcaattatcaatgatatttgataaaaacgcgatgcactgactggctccgtttaaaagtgcatctttttccattaaagtagccattaacactcctgttaaatgatatttttcggtgattataatactgttctacaggagtgattttgcttttcagatattatttaatctatgttttcagtgaggatggcgtataacaatcggtgagcgttatacgccagtagggaaatattactcaaacaaattaaaatgcagcttctgcaccacctgctcggcatcttcgccgggcaccaggaagcacaggttatggctggatgcgccgtaacaaatcatgcgaatgttgaacggttccagtacgccgaatacctctttgccaacgccgcaggcttttgacaggtcattgccaatcaacgcgaccagcgccagaccttcttctacttccacccggcacagtgcggaaagctccatcagcagagattgcgtcagcaacgtatcgccagtggaggttgaaccggtggtatcaagggttaatgccacgctcacttctgacgtggtgattaagtctaccgaaatattatgccgcgcgaggatgccgaaaacttccgcgaggaagccgcgagaatgcagcatattcaggctgtgcaaagtgagcagagtctgattgcgacgaagcgccagcgcgcggaacagcggcggattttcagttttattgcacaccagcgtaccacctgcgcgtgggtctttgctggagccgacaaagaccgggatatcgctgcgtactgcgggtagcaacgttgccggatgcagtacttttgcaccaaaagttgccatctctgccgcttcggcaaacgcgatttcatcaatgcgttttgctgcggaaactacgcgtggatcggtggtgtagatgcccgggacgtcggtccagatatcaacacgagatgcgtgtaaagcctccgccagcaaggctgccgtataatcgctgcctccacggccaagcgtcgttgtacgacctttattttcgctaccgataaatccctgggtgatcactaagccgtcattgaggcgtgggagcagctgcagcgcggccagttccgccagcgcggctacatctggctctgcacgaccaaatcggtcgttggtacgcatcactttacgtacatcaaaccactgtgcctgaacatcgcgttcgcgcaggatttcgacaaacagcagggtcgacatcagctcgccgtggctgaccagctcatctgtcagcgccggagacgttgccagcgccgccgcttctgccagaacagtaatgttctccagcagacgttcaatctcttcacggataacgttcgggtaacgcagacgttccagaatggcaaactggatgttgcgaatagcgtcgagtttttcgaatcgctcgccaggttccagcccttccgctaaagcgaccagcagattagtgataccagcagaagccgagaggactactaaacgcacgttggcatcagaaagcacaatatcagcgctgcggttcatggcgtcaaaatcagctacgctggtaccgccaaatttggagacaacaatttcagacataactacctcgtgtcaggggatccattttcagccttggcacaagggaagagcggaagacgggtgggcgcagagcgatacttcgctactattttcacccagaagtgctccaccacttgcgaaacgcccgactgcgaacgcttctggtgacaacccaggggattcagcccctgtagccgatgatgaacgtggccagccgttcaatcacctcggcgatgcaccccctcaggtgttatcacaggactggctcctccaacaccgttacttgggcaacgcgcctcttctggcctgcgctagcgcaggtagtacatttataaataaagggtgagcggggcggttgtcaacgacggggtcatgcggatttttcatccactcctggcggtcagtagttcagctaataaatgcttcactgcgctaagggtttacactcaacattacgctaacggcactaaaaccatcacatttttctgtgactggcgctacaatcttccaaagtcacaattctcaaaatcagaagagtattgctaatgaaaaacatcaatccaacgcagaccgctgcctggcaggcactacagaaacacttcgatgaaatgaaagacgttacgatcgccgatctttttgctaaagacggcgatcgtttttctaagttctccgcaaccttcgacgatcagatgctggtggattactccaaaaaccgcatcactgaagagacgctggcgaaattacaggatctggcgaaagagtgcgatctggcgggcgcgattaagtcgatgttctctggcgagaagatcaaccgcactgaaaaccgcgccgtgctgcacgtagcgctgcgtaaccgtagcaataccccgattctggttgatggcaaagacgtaatgccggaagtcaacgcggtgctggagaagatgaaaaccttctcggaagcgattatctccggtgagtggaagggttataccggcaaagcaatcactgacgtagtgaacatcgggatcggtggttctgacctcggcccgtacatggtgaccgaagcactgcgtccgtacaaaaatcacctgaacatgcactttgtttctaacgtcgatgggactcacatcgctgaagtgctgaaaaaagtaaacccggaaaccacgctgttcctggtagcatctaaaaccttcaccactcaggaaactatgaccaacgcccatagcgcgcgtgactggttcctgaaagcggcaggtgatgaaaaacacgttgcaaaacactttgcggcgctttccaccaatgccaaagccgttggcgagtttggtattgatactgccaacatgttcgagttctgggactgggtcggcggccgttactctttgtggtcagcgattggcctgtcgattgttctctccatcggctttgataacttcgttgaactgctttctggcgcacacgcaatggacaagcatttctccaccacgcctgccgagaaaaacctgcctgtcctgctggcgctgattggcatctggtacaacaatttctttggtgcggaaactgaagcgattctgccgtatgaccagtatatgcaccgtttcgcggcgtacttccagcagggcaatatggagtccaacggtaagtatgttgaccgtaacggtaacgttgtggattaccagactggcccgattatctggggtgaaccaggcactaacggtcagcacgcgttctaccagctgatccaccagggaaccaaaatggtaccgtgcgatttcatcgccccggctatcacccataacccgctctctgatcaccaccagaaactgctgtctaacttcttcgcccagaccgaagcgctggcgtttggtaaatcccgcgaagtggttgagcaggaatatcgcgatcagggtaaagatccggcaacgcttgactacgtggtgccgttcaaagtgttcgaaggtaaccgcccgaccaactccatcctgctgcgcgaaatcactccgttcagcctgggggcgttgattgcgctgtatgagcacaaaatctttactcagggcgtgatcctgaacatcttcaccttcgaccagtggggcgtggagctgggtaaacaactggcaaaccgtattctgccagagctgaaagatgataaagaaatcagcagccacgatagctcgaccaatggtctgattaaccgctataaagcgtggcgcggttaatttaaaaaccttaataacaatgccgacgttatgtcggcattgttttatcagataaatccccttgtctgtgatttaacggaaatcataccgtgaggttaatcctaaaatagatttttaatcgtgattgatttcggaaaatactcagattaattacttttacttttattttaacattatgatttttaatgttatttatatataagttgtagcttatatttgatattcattccaattatcctaaaaccccatctctaattccccgcgccgtaattcgcatgctttagttgtgtatactcgatcccgcccgaaatgtttttgggtaaatctccattcattcaatgaagggaaattgttatgaaaaaagttctgtatggcatttttgccatatctgcgcttgcggcgacttctgcgtgggctgcacctgtacaggtgggcgaagcggcagggtcggcagcaacgtcggtttcggcggggagttcctccgcgaccagcgtcagcaccgtaagctcggcggtgggtgtcgcgctcgcggcaaccggtggcggtgatggttctaataccgggaccaccacaaccacgaccaccagtacccagtaataaagtatgtatccccaaaataatttgagtcattgcatctgtggcttgaagtatgaagggatttaccataaccacactccggtgtggttattctgcccctctggagaagagtcgtgaagcgacctgcactcattcttatctgcctgctattacaggcctgttcagccacgactaaagagctgggcaattcactgtgggacagtctgttcggcacgccaggcgtacagctgacggacgatgatattcaaaatatgccctacgccagccagtacatgcagcttaatggcgggccgcaattgtttgtggtgctggccttcgctgaagacggacaacaaaaatgggtcactcaggatcaagccactcttgtcacacaacatggtcgtctggtgaagactttgcttggcggcgacaacctgattgaagtgaataaccttgccgccgacccgctgattaaacccgcacaaattgttgatggtgcaacatggacgcgcacgatgggctggaccgagtaccagcaggtacgctacgccaccgcacgctcagtcttcaaatgggatggcaccgataccgtcaaggtcggcagcgatgaaaccccggttcgcgtgctggacgaagaagtctccaccgaccaggcgcgctggcataaccgctactggatcgacagcgaagggcaaattcgccagtcggaacagtatctcggcgcggattatttcccggtgaaaaccactctcatcaaggcggcaaaacaatgattaaacaaactattgtcgcattgattttgagtgtgggggcgtcatcggtcttcgcggcgggaaccgtcaaggtattcagcaatggcagcagtgaggccaaaacgctgacgggcgcagagtatttaatcgatctggtaggccagccgcggctggcaaacagttggtggcctggtgcggtgattagcgaagagctggcaacggcggcagcattgcggcagcagcaggcgttgctgacacggctggcagaactggctgcagattccagcgccgacgatgccgccgcgattaacgccttacgccagcaaattcaggcgttgaaagtgacgggcaggcaaaaaatcaatcttgatcctgatatcgtccgcgttgccgaacgcggtaacccaccgttgcagggcaactacacgctgtgggtcgggccaccaccgtccacggtcacgctgttcgggcttatcagccgtcctggcaagcagccattcactccaggtcgcgacgtggcgagctatctctccgggcagaacctgcttagcggtgcggatcgcagctacgcgtgggtggtttacccggacggacgcacgcaaaaagcgccggtggcttactggaacaagcgtcacgtagagccgatgcccggcagcattatttatgttggcctcgcggactccgtctggagtgagacgcctgatgcccttaacgccgacattcttcagactctgacgcagcggataccccaataatgaaaaaaagacatctgcttagcttactggcgctgggcattagcacagcttgctacggcgaaacatatcctgcgcccattggtccgtcgcagtcggatttcggtggcgtaggattattacaaactcccaccgcgcgtatggcacgggaaggggagttgagtctgaactatcgcgataatgatcagtaccgttattactcagcttcagtgcaactcttcccgtggctggaaacaacgctgcgctacaccgacgtgcgcacccggcagtacagcagcgtcgaagcgttctctggcgatcaaacgtataaagataaagccttcgatctcaaactgcgtttgtgggaagagagttactggctgccgcaagtggcggttggtgcgcgggatatcggcggtacggggctgtttgatgcggaatatcttgttgccagcaaagcctgggggccgttcgattttacgctcggcctgggctggggatatctgggcaccagcggtaatgtaaaaaatccgctctgttcagccagtgataaatattgctatcgcgataacagctacaaacaggcgggatctatcgacggtagccagatgttccacggtcctgcctcactgtttggcggcgtggaataccagacgccctggcaaccgctgcgcctgaaactggagtatgaaggcaataattatcagcaggattttgccgggaagctggagcaaaaagtaagtttaacgtcggtgcgatttatcgcgttaccgattgggccgacgttaaccttagctatgaacgtggcaacacctttatgtttggcgtcacgctgcgcaccaactttaacgatctgcgcccgtcttacaacgataacgcccgcccgcaatatcaaccgcagccgcaggatgccattttgcagcattcggtggtggcgaatcagttaacgctgttgaaatacaatgccggacttgccgatccgcagatccaggcgaaaggcgatacgctgtatgtcaccggcgagcaggtgaaatatcgtgattcgcgcgaagggatcatccgtgctaatcggatcgtgatgaacgatctgccggatgggatcaaaacgatccgcattacggaaaatcgtcttaacatgccgcaggtgacgacggaaaccgatgtcgccagcctgaaaaatcatctcgccggagagccgttgggccacgaaacgaagctggcgcaaaaacgcgtcgagccagtggttccgcagtccaccgagcagggctggtatatcgacaaatcacgctttgatttccacatcgatccggtgctgaaccagtcggtcggtggcccggaaaacttttacatgtatcagctgggcgtgatgggaacggcagatttgtggctgacggaccatctgctgaccaccggcagcctgtttgcaaatcttgccaacaactacgacaagtttaactacaccaatccgccgcaggactcgcacttaccgcgcgttcgtacccatgtgcgcgagtatgtgcagaacgatgtctatgtgaataacctgcaagccaactacttccagcatctgggcaacggcttctacggtcaggtctatggaggttatctcgaaaccatgtttggcggtgcgggggccgaagtgttgtatcgtccgctggacagtaactgggcgtttggtctggatgccaactacgttaaacagcgcgactggcgtagtgcaaaagatatgatgaaattcaccgactacagcgtgaaaaccggacatctgaccgcctactggacgccatctttcgcccaggacgtgttggtgaaagccagcgtcgggcagtatctggcaggggataaaggcggcacgctggagatcgccaaacgctttgatagcggcgtggtggttggcggctatgccacgatcactaatgtttcaaaagaagagtacggcgaaggggacttcaccaaaggcgtgtatgtctcggtaccgttggatctcttctcgtctggcccgacacgcagccgtgcggcgattggctggacgccgctgacgcgtgacggtggtcagcaacttgggcgtaagttccagttgtatgacatgaccagcgaccgtagcgtcaatttccgctaagtcatgggaaaggtgccagttttcgcaatcactggcaccctcattcttaatggcctgttgagccatcaggaacgcagttcacccccggtttgcgatctggtgtgtaaaggcgaaaacattctgtcttcctgtccgtcgatatcggttgcagatctggttgcctgagcgactgggccatcattgggctggagacattgctttgcggtaggtcggctttatcagcagtaccgagcggaccagcataagcaggaagaacagagactgataacatcaaagcagcaaaataaggcttcatttttaccacctttatcaggttacgtttcatttgttccagaggaacatggtcgatttttcgcgcattgctggtggctgggaatcacctgaatgggtgatttttgaattaccggctttggtgcggtttgtcttgccggatgcgccgccaggcgcggcttatccggcctacgggtaggtatatccggctttggtggaggcgcgctccaaatccaggttgaacaaaacatacacaaaaaatatagatctccgtcacatttttgcgttatacaggaagctcgccactgtgaaggaggtactgctatgacgtcactctctcgtccgcgcgtggagtttatctccaccattttgcagaccgtactcaatcttggcctgttgtgcctcggcctgattttggttgtcttcctcggcaaagaaacggtgcatctggcagatgtgctgttcgcgccagaacaaaccagcaaatatgagctggtagaaggactggtggtttactttctctatttcgaatttatcgcgctgattgtgaaatactttcagtccggttttcacttcccgctacgttactttgtctatattgggatcaccgccattgtgcgcttgatcatcgtcgatcataaatcgccactggatgtgttgatctactcggctgcgatcctgttactggtgatcactctgtggctgtgtaattcgaaacggctgaagcgggagtaaaaagacagcacgccgaactggcgcggcgtgctggacaggaagattacagcgtagcagtttgttgtgttttcttcgtttccggttcccagagggcttccagctcctcaagggttttacctttggtttccgggacaaatttccacataaatagtgctgccagaacgcccatacacccgtaaatccagtaggagaaaccgttgtggaaatgggccaccagccaggagtttttgtccatcatcgggaaggtccaggagacgaagtagttcgccagccactgggccgccaccgcgattgccagcgctttaccacgaatagcattcgggaagatttccgacagcagtacccagcataccggaccccaggacatggcaaaggcggcaacatagaacagcatcgacagtagcgccacaatacccgatgcctgagtgtaaaacgcggtaccgaggctaaacataccgattgccattccgagtgcgccgataatttgcagtggcttacgaccaaatttatccaccgtcataattgccagtacggtaaaggtgaggttgataactccgacaataatggtctgcaacagcgcgatatccgtgctggcccccagcgttttgaacacttccggcgcgtagtacagcaccacattgatgccgacaaattgctggaagatggagagcataacgccgattacaatcacgcccacgccaaacatcagcagacgaccaccggttttgcggccatgatccagggagtgtttaatttcctgtactgcctgagttgcaagcgtgttgcccataattttgcgcaggatactttccgcctgttcttgcttgccgcgtgacatcagccagcgaggactttctggcacggtatacagcagcattaagaacagcagtgcagggatacattccgaggcaaacatataacgccagccgtcagtattcagccagctggcatcaccggaacgggcaataaaatagtttacgcagtaaactaaaagttgcccgaaaataatcgcaaactggttaaatgaaaccagttttccgcgaatatgagctggagccagttccgcaatatacattggtgaaagcattgaggctaaaccaacgccaataccgccaataatacgataaataacaaattccgggacataacctgccagataaatagggactgtgttgtccgggtttatagaggtgaaaccaagttctggccaggcagaacctacaccagaaataaaaaacaggacagcagcaatcttaagtgaatcacgacggccgaagcggttactgcaataaccaccgagggcaccgccgatgatgcaaccaatcagagcgctggctacgcaaaatcctaacagggagttggcagcggattcacttaagttttgtggagcaacaaagacggtattgagtgactcaacagtaccggaaataacggcggtgtcgtagccaaataataaaccacctaatgtagcgactaaggtaatcgaaaatatataactggaattatactgggtattcattcagacctgccttagaccattctgatcttttatcagtgcattgatgttggaattgtcaggcagttaaggcaattatcattttttacaatgcgtttacgtaatgtcttttctgtgatcttaattgtgataattatcaaaaattgatgaaaacaatactattgccgtgactcagagcacgaaagagaattatcgtaagtgggaaaacaaataacgtaaaaataataagctctatgatgggaatattaaccggcgaacgattcagattgcagacgaaagaaaaaaaggcgctccgtggagcgccgaataacagtcacaagttgggataacgtaagttgagggtgcagcggcataacattggcagaacaacatctttaacctttcacaccacctgccgtcaggccgttgaccagccagcgttgagccagcaagaagacgatggtgatcggtaatgcagacataacggcagcggcggcaaagtcaccccacaggtagttttgcgggttgaggtattgctgcatccccacggccagggtgtagctgtttacgtcacgcagtaacagcgacgcgaccggaacttcagtaatggcagcgataaacgacaggatgaataccaccgccagaatcggtactgacagcggcaacaggacaaggcggaaggcctgccacggtgtcgcaccatccagcgcagccgcttcttccagcgaactgtcgatggtttcgaaatagcctttgatggtccagacatgcagcgcaatcccacccagatacgcgaaaattacgccgccgtgagtattcaggccaatgaatggaatgtactcacccagacgatcaaacaacgcatacaacgcgaccagtgaaagtactgccgggaacatctggaaaatcagcattcctttcagcagcgtcgctttgcctggaaagcgcatacgggcgaaagcgtaggcgcaggtggtggagagcgccacaatgccaatcgcggaaatcccagcgacctttaccgagttccacagccacagcagtaccgggaatggcggtggcgtaatgcgaccatcagcctgttcaacgctaaaacctaacgccagtttccagtgatcccaggagatttgctccgggatcaggctaccggtcgcgaagtttccctgacgcagcgagatagcgacgaccatcagcagcgggaacataatcgccgcgataaaaagtagcagtagcaggtgagtaataaacaaacgtgctttttgcgatttcggttggaccattgccatttttgttatctcccttaatcaaacttcattcgcgtggctttcaggttcactatcgccagcgcacccaccagcaggaagatcagcgtggcaattgctgccgccagaccgaagtcctgacccccgccgccttcaaaagcgatgcggtaagtgtagttaacaagcaggtcggtataaccggctggcgtggtcgtgccaagacgatccgggccgccgttggttaacagctgaatcagcacgaagttgttaaagttaaaggcgaagctggcgatcatcagcggcgtcagcggtttaatcagcagcggcagcgtaatcttaaagaagttctggaacggacctgcgccatccattgctgaggcttcatacaaatcgtccggaatcgctttcagcaagcccatgcagaggatcatcatgtacggataacccagccaggtattgacgataattagcatcgtgcgggcggtggtcggatcgctgaaccaggcgggcttcacgccaaacagcgcgctcaacatcatgttgatttcaccgaagctctggttaaacaaccctttgaaaatcaagattgaaatgaatgatggcaccgcgtagggcagaatcagcagaacgcgatagaccgctttgccgcgcaatgcttcccactgcaccagacatgccagaaccatgccgaccgccaccgttaaaaagacagtgatcagcgagaacaccacggtccagacgaaaatggcgaggaacggtttctgaatgccttcgtcggtgaagacgcgggtaaagtttttccagccagtagtcacggtgtaaccggggcttagcttttcatcaccccagttgccgtcggcggtaatggactggtaaaagccaatttggttattcggacgatatttcacgccgctctgattattcgtcaacgtgccgtcaccgtcgagtgtgtagagcggctgcgtgccagaaaactggcgcagggagctcatcatcactttgttgccatccggcagaatggcggtaatgtcactcagcgcctgacgattctgggtaatcacgcgtagattcgcgcgttcgccttggggctgggcggtcgtttctttcagttgcagtttttgttcgccgccaaatttaaacgcgtcggagaggtaatttttgccggtttcgccgtcactgagcgccagttgccactcatcgcccgccgggtaaagaccaaagttataggttttgcctgcttgccaggagcgatctaacaacacttcctgcgcacgttcaaaagtcagctggttagtgctgctgtagttggtgaaggcaatggcgatggtgcagaccagagggaagaggacgaataatcccattccagccattcccgggtaaacatagcgccaggcgtaggctttacgattggcgaaaatatacagccccgctgaactcaatatcagcgtggtaatggcgaacaggtattccccttgtgcgtacattaaaacaacaaggtaacccaccagcaggccgagcagacctagcactgaccatttcagcgcgtcgctttgccaccaatgtttctttttaatgacatccatggggttcttcctcattccaggacggataaggctttcacgccttatccgacaacaactgcctgatgcgacactgatgcgtcttatcaggcctacatgcgtttcagttttgtaggccggacaaggcgttcacgccgcatccggcatttcacagcattacttggtgatacgagtctgcgcgtctttcagggcttcatcgacagtctgacgaccgctggcggcgttgatcaccgcagtacgcacggcataccagaaagcggacatctgcgggatgttcggcatgatttcacctttctgggcgttttccatggtggcggcaatacgtggatctttcgccaactcttcctcgtaagacttcagcgccactgcacccagcggtttgtctttattgaccgcttccagaccttcgtcagtcagcagatagttttcgaggaactctttcgccagctctttgttcggactggcggcgttaataccggcgctcagcacgccaacgaacggtttagatggttgacccttgaaggtcggcagtaccgttacaccataattcactttgctggtgtcgatgttggaccatgcccacgggccgttgatggtcatcgctgtttcgcctttattaaaggcagcttctgcgatggagtaatcggtgtctgcattcatgtgtttgtttttaataaggtcaaccaggaaggtcagacccgctttcgcgccagcgttatccacgcccacgtctttaatatcgtacttgccgttttcatacttgaacgcataacccccgtcagcagcaatcagcggccaggtgaagtacggttcttgcaggttgaacatcagcgcgctcttacctttcgctttcagttctttatccagcgccgggatctcttcccaggtttttggtgggttcggcagcagatctttgttataaatcagcgataacgcttcaacagcgatcgggtaagcaatcagcttgccgttgtaacgtacggcatcccaggtaaacggatacagcttgtcctggaacgctttgtccggggtgatttcagccaacaggccagattgagcgtagccaccaaaacggtcgtgcgcccagaagataatgtcagggccatcgccagttgccgcaacctgagggaatttctcttccagtttatccggatgctcaacggtgactttaattccggtatctttctcgaatttcttaccgacttcagcgagaccgttatagcctttatcgccgttaatccagattaccagtttaccttcttcgattttggcgagagccgaggcggaaaacatcatcgtcgttaatgcggataatgcgaggatgcgtgcacctgtttttattttcataatctatggtccttgttggtgaagtgctcgtgaaaacacctaaacggactctagtttctttatacggcaacctctttccatcctccttgcccctacgccccaccgttgctttgtgtgatctctgttacagaattggcggtaatgtggagatgcgcacataaaatcgccacgatttttgcaagcaacatcacgaaattccttacatgacctcggtttagttcacagaagccgtgttctcatcctcccgcctcctcccccataaaaagccagggggtggaggatttaagccatctcctgatgacgcatagtcagcccatcatgaatgttgctgtcgatgacaggttgttacaaagggagaagggcatggcgagcgtacagctgcaaaatgtaacgaaagcctggggcgaggtcgtggtatcgaaagatatcaatctcgatatccatgaaggtgaattcgtggtgtttgtcggaccgtctggctgcggtaaatcgactttactgcgcatgattgccgggcttgagacgatcaccagcggcgacctgttcatcggtgagaaacggatgaatgacactccgccagcagaacgcggcgttggtatggtgtttcagtcttacgcgctctatccccacctgtcagtagcagaaaacatgtcatttggcctgaaactggcaggcgcaaaaaagaggtgattaaccaacgcgttaaccaggtggcggaagtgctacaactggcgcatttgctggatcgcaaaccgaaagcgctctctggtggtcagcgtcagcgtgtggcgattggccgtacgctggtggccgagccaagcgtatttttgctcgatgaaccgctctccaacctcgatgctgcactgcgtgtgcaaatgcgtatcgaaatctcccgtctgcataaacgcctgggccgcacaatgatttacgtcacccacgatcaggtcgaagcgatgacgctggccgacaaaatcgtggtgctggacgccggtcgcgtggcgcaggttgggaaaccgctggagctgtaccactatccggcagaccgttttgtcgccggatttatcggttcgccaaagatgaacttcctgccggtaaaagtgaccgccactgcaatcgatcaagtgcaggtggagctgccgatgccaaatcgtcagcaagtctggctgccggttgaaagccgtgatgtccaggttggagccaatatgtcgctgggtattcgcccggaacatctactgccgagtgatatcgctgacgtcatccttgagggtgaagttcaggtcgtcgagcagctcggcaacgaaacccaaatccatatccagatcccttccattcgtcaaaacctggtgtaccgccagaacgacgtggtgttggtagaagaaggtgccacattcgctatcggcctgccgccagagcgttgccatctgttccgtgaggatggcactgcatgtcgtcgactgcataaggagccgggcgtttaagcaccccacaaaacacacaaaacctgtcacaggtgatgtgaaaaaagaaaagcaatgactcaggagatagaatgatgattactctgcgcaaacttcctctggcggttgccgtcgcagcgggcgtaatgtctgctcaggcaatggctgttgatttccacggctatgcacgttccggtattggctggacaggtagcggcggtgaacaacagtgtttccagactaccggtgctcaaagtaaataccgtcttggcaacgaatgtgaaacttatgctgaattaaaattgggtcaggaagtgtggaaagagggcgataagagcttctatttcgacactaacgtggcctattccgtcgcgcaacagaatgactgggaagctaccgatccggccttccgtgaagcaaacgtgcagggtaaaaacctgatcgaatggctgccaggttccaccatctgggcaggtaagcgcttctaccaacgtcatgacgttcatatgatcgacttctactactgggatatttctggtcctggtgccggtctggaaaacatcgatgttggcttcggtaaactctctctggcagcaacccgctcctctgaagctggtggttcttcctcttttgccagcaacaatatttatgactataccaacgaaaccgcgaacgacgttttcgatgtgcgtttagcgcagatggaaatcaacccgggcggcacattagaactgggtgtcgactacggtcgtgccaacctgcgtgataactatcgtctggttgatggcgcatcgaaagacggctggttattcactgctgaacatactcagagtgtcctgaagggctttaacaagtttgttgttcagtacgctactgactcgatgacctcgcagggtaaaggtctgtcgcagggttctggcgtcgcgtttgataacgaaaaatttgcctacaatatcaacaacaacggtcacatgctgcgtatcctcgacacggtgcgatctccatgggcgacaactgggacatgatgtacgtgggtatgtaccaggatatcaactgggataacgacaacggcaccaagtggtggaccgttggtattcgcccgatgtacaagtggacgccaatcatgagcaccgtgatggaaatcggctacgacaacgtcgaatcccagcgcaccggcgacaagaacaatcagtacaaaattaccctcgcacaacaatggcaggctggcgacagcatctggtcacgcccggctattcgtgtcttcgcaacctacgccaagtgggatgagaaatggggttatgactacaacggcgatagcaaggttaacccgaactacggcaaagccgttactgctgatttcaacggcggcagcttcggtcgtggcgacagcgacgagtggaccttcggtgcccagatggaaatctggtggtaatagcaaaacctgggccggataaggcgtttacgccgcatccggcataaaaacaggttgtcattatctgaaaggggcgaaagcccctctgattatcgggtttagcgcgctattgcctggctaccgctgagctccagattttgaggtgaaaacaatgaaaatgaataaaagtctcatcgccctctgtttatcagcagggttactggcaagcgcgcctggaatcagccttgccgatgttaactacgtaccgcaaaacaccagcgacgcgccagccattccatctgccgcgctgcaacaactcacctggacaccggtcgatcaatctaaaacccagaccacccaactggcgaccggcggccaacaactgaacgttcccggcatcagtggtccggttgctgcgtacagcgtcccggcaaacattggcgaactgaccctgacgctgaccagcgaagtgaacaaacaaaccagcgtttttgcgccgaacgtgctgattcttgatcagaacatgaccccatcagccttcttccccagcagttatttcacctaccaggaaccaggcgtgatgagtgcagatcggctggaaggcgttatgcgcctgacaccggcgttggggcagcaaaaactttatgttctggtctttaccacggaaaaagatctccagcagacgacccaactgctcgacccggctaaagcctatgccaagggcgtcggtaactcgatcccggatatccccgatccggttgctcgtcataccaccgatggcttactgaaactgaaagtgaaaacgaactccagctccagcgtgttggtaggacctttatttggttcttccgctccagctccggttacggtaggtaacacggcggcaccagctgtggctgcacccgctccggcaccggtgaagaaaagcgagccgatgctcaacgacacggaaagttattttaataccgcgatcaaaaacgctgtcgcgaaaggtgatgttgataaggcgttaaaactgcttgatgaagctgaacgcctgggatcgacatctgcccgttccacctttatcagcagtgtaaaaggcaaggggtaattacgccccacagtgctgattttgcaacaactggtgcgtctcctggcgcacctttttttatgcttccttcctgggatatgagcgattttttatagtaactcacttcttcttcactaagaatatccattatctcaatgccttatcagagattcttttcctttcgccggtagtgtctggacattcaggctacttttccaggttattttatttctgttatgcagaggttttatgataagtcatatcctaaattctggcggcaataactctttgatgaaacatgatgtggtgcaaggaaataatatagtagatcttgatttactacgtaatttcaatggggtgccaggtttaaacagagataactttatttatatcagcaatattttttcaaatataaaacaacggaacgaaaaaatcatgcaataaatatgtttcgtgaagtctcaatcagtaatgatactataagtgtaaaattctacagaaatgaaaaaaattgaatgcgcttgcaattttctgatggataaagatgcgcaggggtatatcgacctgtctgatttggatttaacaagttgtcattttaaaggtgacgttatatcgaaggtgtcttttttatcatcaaatctacaacatgtaacattcgaatgtaaagaaattggggattgcaattttactactgcaatagttgataatgtcatatttagatgtcgacgtttacacaatgtgatttttatcaaagcgagtggtgaatgtgtcgatttcagcaaaaatattcttgatacagttgacttctcgcagagtcaacttactcagagtaattttcgcgaatatcagattagaaattcaaacttcgataattgttatctttacgcttcgcacttcaccagagcagagtttctgtctgccaaagaaatatcatttattaaatcgaatatgacagctgttatgtttgatcatgtgcgaatatcgacagggaattttaaagattgcattacagaacaattggaattaactattgattattcagatatatttgggaatgaagatctcgatggttatatcaataacattataaaaatgattgatacattgccagataatgcaatgatattgaaatccgttctggcagtaaaactggttatgcaattaaaaattcttaatattgttaataaaaactttattgagaatatgaagaaaacatttagccattgtccttatataaaagatccaattatacgcagttatatccattctggtgaagataacaagttcgatgattttatgcgtcaacatcgattcagcaaggtggatttcgatacccaacagatgatccattttattaacaggtttaatatgaataaagggctgattgataaaaataacaatttttttatccaacttatcgatcaggccttacgatcaacggatgatatgatcaaagcaaatgcctggtatctttataaagagtggattcgtagtgatgatgtttcacctatatttatagaaactgaagaaaagttaagaacctttaacactaataaattaacacgaaacgataatatatttatcctgttctcctctgtcgatgatgggcctgttatggtggtaagctcccagcgcttacatgatatgttgaatcctacaaaagataccaattggaattccacgtatatctacaaatccagacatgagatgttgcctgttaatcttactcaggaaacacttttcagctccaaatctcatggtaaatatgcgcttttccccatttttactgcgagttggcgagctcatcgtataatgaataagggtgtttaagtaaaggaaaacatcaccgttcctggcatcctgggcggtgatgcccctatggttgccctctccagcgcgggcatcggcaaagcgtaaggttcaacagcgttttaccacttcatgcgattgttgcgtttttgttgcgtattagatcacttaatttgctttacatctcccgtaaacacttttctgcgatacaatgcctttacgttatgtaacggagagttcggcatgtcacaccccgcgttaacgcaactgcgtgcgctgcgctattttaaagagatccctgccctggaaccgcaactgctcgactggctgttgctggaggattccatgacaaaacgttttgaacagcagggaaaaacggtaagcgtgacgatgatccgcgaagggtttgtcgagcagaatgaaatccccgaagaactgccgctgctgccgaaagagtctcgttactggttacgtgaaattttgttatgtgccgatggtgaaccgtggcttgccggtcgtaccgtcgttcctgtgtcaacgttaagcgggccggagctggcgttacaaaaattgggtaaaacgccgttaggacgctatctgttcacatcatcgacattaacccgggactttattgagataggccgtgatgccggactgtgggggcgacgttcccgcctgcgattaagcggtaaaccgctgttgctaacagaactgtttttaccggcgtcaccgttgtactaagaggaaaaaaatatggagtggagtctgacgcagaataagctgctggcgtttcatcgcttaatgcgtacggataagccaattggcgcgttactgctgctctggccaacattatgggcgttgtgggtggcgacaccgggcgttcctcagctctggatcctggcggtatttgtcgcgggtgtctggctgatgcgcgctgctggatgtgtggtgaatgattatgctgaccgaaagtttgatggtcatgttaagcgcacggcgaaccgaccacttcccagcggcgcggtaacagagaaagaggcgcgcgcgctgtttgtagtgctggtactgatttcgtttttactggtactgacgctgaatacgatgaccattctgttgtcgattgccgctctggcgttggcgtgggtgtacccgtttatgaagcggtatacccatctcccgcaagtggtgctgggcgcggcgtttggctggtcgattccaatggcttttgccgctgtgagtgagtcggtgccactgagttgctggttaatgttcctcgccaatattctctgggcggtggcttacgacacgcagtatgcgatggttgaccgcgatgatgatgtgaagattggcattaaatccacggcaatcctgttcggccaatacgataaattgattattggtattttgcagattggcgtactggcactgatggcgatcatcggtgagttaaatggcttaggctggggatattactggtcaattgtggtggctggcgcgctgtttgtttatcaacaaaaactgattgccaaccgcgagcgtgaagcctgctttaaagcatttatgaataataactatgttggtctggtactgtttttaggactggcaatgagttactggcatttctgatgatgtaaaaaagccggatgatcatccggctttcttctgggttgccttatgcgcggcgcttctcaggcctacacaacacatcgcaatttattgaatttgcagattatggaaggccggataaggcgttttcgccgcatccggcaattctctctgattacccttcgccctgcgtcgcactctcaatcgtcaaacgcacgtctgatgtaatcaactccgccagcaactgataaaccttcatcgtttctgccggttcggcgtcgccgctatcgctgatatacccttcatcacgcagcgtcagcaccagagaactgaacaccgccttgtcgaagaactccggcgcgttgatgccgtgcagcacggagagacgttgcgcgacggtgcggctctctttctccagcgtaccgcggttgatcgacgggttggcactcaacaaccagaaggtgatggcataacgttgcagcgtttcgcgcgcgcctgcggccagcagctgtagggtgcgagaatgcgccgggttgatatgcaactcatcatcttgcagggtaatcagcccctgacgttgcatctcatttgccagcgcatcaataacgtccggcaactcgtcgcgatcccagcgcaggaacagctccgctttcagcattgggtaaagcacattgacgtgctccatcaatacgtcgcgggagatgtggcgatgctgggtgacaattgccgccatcagcgaaggcagcaccaacatatgcgcaatgttgttgcgatagtaggtcatcagcaccgcttgctcgcgtggcagaatgatgatgtcgccgatagtgtctttctcgacttcaaacttgttcatttgcagcgcgtgatcgataagctcgctggcgctggctgaaggaacggtagagtccgtggagtaaggtacgttgcgcatcagatccaggtagcagttgagttgctcggttaactgctcgcgggtgagtgagcgctgacgtgatgccagtagcgcagtacagcacaggttcatggcgtttgccgcgcctgcgttgttaatgcgtaccatcagatcggcagcaatattattgaccgtcggcgttaaccaggccggacgcaccgcttcgatgggatcgatagattcacgccagtctggtacgtgctggttaaggtaggtcatcaacggcattggttcaccgaagttgacgtaaccctgaccgagattacgcagcttgcttaaaccgcgcagcatctgcggcaggctctctttctctttcgtcgcgccgcgcagttctttggcgtaagtacccacttccatgacgtgctcataaccgatatagatcggaatcagcgtaatcggacgcgtgccgccacgcagcatcgcctgaatggtcatcgacagcgtgccggttttcggatccagcaaacgccccgtgcgggaacgaccgccttccacgaagtactcgacggaataaccacggctgaacagttcgccgagatactcacggaaaacggtggaataaagtttattgcctttaaaagtacggcgaataaagaacgcccccagacggcggaaaatcggcccggccggccagaagttcaggttgatcccggcggcgatatgcggcggcaccagcccctggtggtacagcacgtaagaaagtagcaggtagtccatgtgactgcggtggcaaggcacatacaccagctcatgaccgtcgtgggccagctggcgaacgcgctcggcgttatggacgttgatgccctgataaagtcggttccaggtgaagcccagaatgcggtcagtcaggcggatcatctcgtaagagaaattcgccgcaatctcttccatcagcgcaatcgcgttctgctgcgctttttcatgggagattttttgctgcgcgcttcatcttctaccgctttggcaatggcgcgggaggcgagcagcttattaaacagatcctgacgagcaggcagacgtgggcccacagcagccagacgttgacgggcaaagtgcatacgcgccacgcgcgccagtttctgtgcgatagttttatccgtgccgtgttcatccgccatacggcgcagcgaaactgacggcgagaaacgcacaaaactgtcgcgaccgagccacagtacggcgaaaaatttctgtacgccgttaagcatacgcagcggcgggtttacttcgcctttttcacgccccggcgcgcgaccaaacatcaccgatactggcaccatctgcacatccagatttgggttgctacggtgcaaatcgagatagtcgtggaacagcttaatagactcttctttcggcgtgtaataggtgaatacacgcggcccgccgtgaatgaacacatagcgcggcagtagcgtgccgtcgatttccagcggctctaacgggtcaggcaagtcatgagccagacactgggcgcgtaacgtcagcaaatctgctttcgagttgtacggtaaaacgtacataattggacgagaagtatccagccccagttccggggcaggatctgccggaatagacttgctttttaccaggatgcttaatggtaaattcagtaatttgtagtaaattcgtggccagccggacataaacgatgtaaagcctctggttaataatgcaaatgcgcggcaaggatagcagaaagtcatgggaaattctgtggtatccgctcatgtttcgcgcggcgttacgcaaacccgaatcatcggatttaacggtacactgatattgacgctcataatgtaaaaaggttctttcaatggccaataataccactggattcacccgaattatcaaagctgctggctattcctggaaaggtttacgcgctgcatggatcaacgaagcggcattccgtcaggaaggcgtagcggtattgttggcggtggtcatcgcctgctggctggatgtggacgcaattacccgcgtgctgcttatcagctccgtgatgctggtgatgattgtggaaatcctcaatagcgccatcgaagcagtggttgaccgaattggctctgaataccatgagctttccggacgcgcaaaagatatgggatccgccgcggtgctgattgccattatcgtcgccgtgattacctggtgcattctgttatggtcgcattttggataacccttccagatttcgataaatctctggtttattgtgcagtttatggttccaaaatcgccttttgctgtatatactcacagcataactgtatatacacccagggggcggaatgaaagcgttaacggccaggcaacaagaggtgtttgatctcatccgtgatcacatcagccagacaggtatgccgccgacgcgtgcggaaatcgcgcagcgtttggggttccgttccccaaacgcggctgaagaacatctgaaggcgctggcacgcaaaggcgttattgaaattgtttccggcgcatcacgcgggattcgtctgttgcaggaagaggaagaagggttgccgctggtaggtcgtgtggctgccggtgaaccgcttctggcgcaacagcatattgaaggtcattatcaggtcgatccttccttgttcaagccgaatgctgatttcctgctgcgcgtcagcgggatgtcgatgaaagatatcggcattatggatggcgacttgctggcagtgcataaaactcaggatgtacgtaacggtcaggtcgttgtcgcacgtattgatgacgaagttaccgttaagcgcctgaaaaaacagggcaataaagtcgaactgttgccagaaaatagcgagtttaaaccaattgtcgttgaccttcgtcagcagagcttcaccattgaagggctggcggttggggttattcgcaacggcgactggctgtaacatatctctgagaccgcgatgccgccaggcgtcgcggtttgtttttcatctctcttcatcaggcttgtctgcatggcattcctcacttcatctgataaagcactctggcatctcgccttacccatgattttctccaatatcaccgttccgttgctgggactggtcgatacggcggtaattggtcatcttgatagcccggtttatttgggcggcgtggcggttggtgcaacggcgaccagctttctctttatgctgttgctgtttttacgcatgagcaccaccgggctgactgcgcaggcttatggtgccaaaaatcctcaggcattagcccgtgcgctggtgcaaccgttgctgttggcgttgggggctggggcgttaattgcgctgctgcgtacaccgattatcgatctggcgctgcatattgttggcggtagtgaagcggtcctggaacaggcgcggcgctttcttgaaatccgctggttaagcgctccggcgtcgctggcgaatctggtattactcggttggttactcggcgtgcaatatgcccgtgcgccagtaattttgttagtggtcggcaatatcctcaacattgtgctggatgtctggctggtgatggggctgcatatgaacgtgcagggcgcggcgctggcgacggttattgcggaatatgcaacattgctgattggtctgctaatggtgcgtaaaatcctcaaactacgcggaatttccggcgaaatgctgaaaactgcctggcgaggaaacttccgtcgcttgctggcgcttaaccgcgatatcatgctgcgttcgctgttgttgcaactctgtttcggcgtgatcaccgtacttggtgcgcgactggggagtgacattatcgctgttaacgcggttctgatgacgctactcaccttcaccgcctatgcgctggatggttttgcctacgcggttgaagcacattccggtcaggcatacggtgcgcgcgacggtagccagttgctggatgtctggcgggcagcgtgccgccagtcggggatcgtagcgctactgttttcggtggtttatttgctggcaggggaacacatcattgcgttactgacgtcgttaacccagattcaggagctggccgaccgctatcttatctggcaggtgattttgccgttggttggagtctggtgttatctgctggacggcatgtttataggcgcaacgcgtgccgccgaaatgcgtaacagtatggcggtggccgccgcaggttttgcgctgacgctccttacgctgccgtggctgggtaatcatggtttgtggctggcattaaccgtctttctggcgttgcgcgggctttctctggcggctatctggcgggcgtcactggcgcaacggtacctggtttgccgcaacgtgacggttaaaaattctgaataaataatcctaagccaaattgctgactacacttaatctcacgttcagaagaaaagtgaacgtactctcattcacaacctaacgatgaggtcttgattatgaataaagatgaagccggcggtaactggaaacagtttaaaggtaaagtgaaagagcaatggggcaaactgaccgatgatgatatgacgatcattgaaggtaaacgtgatcaactggtcggtaaaatccaggaacgttatggttatcagaaagatcaggcagaaaaagaggtcgtggattgggaaacccgcaatgaatatcgctggtaattaatccctcctgcccgacgtgtacaaggatgtacgccctcttaacgcggtttctttttcacctgcacagagtgatcatgctggcactgttcaggatgacgacacgcttccacttccacgcatgccgcacagagcccatgtgcttcaatcacattatgccgcagggcaaaccccatttttgccgccagcgtatgcataatgtcttccacgccttctgcacactcttctttcaccgcgccgcagcgatcgcaaataaacatggctgacgtatgggtgggctggtcgaacagatgacagagcacataactgttggtggattccaccttatgcacaaaaccttgctcaagcagaaaatccagcgcgcgataaaccgttggcggcttggcttgcggttcagcttcgcgcagtaaatcaagcagatcataagcgctgatagcgccatcctgcagactcatcaggcgcaacacttccaggcgctgtggggtcaggcgcacattacgctgcgcgcagattttttcagcctgcgctaataactcctgcgttgtggtcttttccatcgggcacctcaaagtgggggttaagaatgtccttactttaccatgttccaggaaaaacaccgagaacccttattgttgccgtaatgttgattttctgttttgtaggtaaggtgttgtgttgccttgtcgtaccattatcaacacgataataattaataattcatttttaaataaattgcttcaagttaactcgctatttatttaactgggtttaaacgcatacctgtagttcagaaattatgagcgatttttgatagtgaccagatggcaaaagaattataaggaggacacggtacgacaaaaaaggtagatgaatcatgttgaagataatacccggtgcaactggatactttaataaaacactcaattcaaatcaattcgataatgaagatgcaatcaaagataaattagataatagaggttcaatcaaaggtaaattaaataatatatatggtaaatctattgattatgcagcgctgcgtcatcgggatataattattgcaaaaatagatttgtttattcaacgaatcacgcataatttatggcatgcacgtaaaaaaatgtgtttttaattgagcaaataaatgatctcaaaatgtgggtcaataagtatattgacgattgcactgatgaggatttaaacgatcgtgactttattgcatcagttgttgaccgggctatttttcatttcgcgattaatagtatatgtaatcctggggctaataaagatgcgactcccattgaacgatgtacttttgatgtagaaactaagaatgaccttccctccacggttcagctattttatgaggaatctaaggataatgaacctttagcgaatatacattttcaagcaataggttctggttttttaacgtttgttaatgcctgccaggaacatgatgacaacagcttaaaattatttgcttcgctgttaatttcactttcatattctagtgcctacacagatttagccggagcagaaaaagtgaatattaatgaatataatgagaactatctgacagctcagtttgaagaattatctcaacgtgatatgaagaagtacctgggagagatgaagcatctggcggaccggggggggatgaaatttgatgactatctggataaatgtcacttctggtgaatgaaggaaagctcgaacctgatattttaagcaaaatgcgagatgctgcaccgaaattaattgactttgctaagtcgtttgacccaaactcaaaggaaaagattaaaatacttacagatacttctaatttaatttatgatttattcggggttaaatcggcgaaataatatgtgaagttcttcgatggtatggaaggcattacataaaagaacctaatacttattgggttcttttttcttctatcagtgccattagcaggaagagatatcaccggagtttaatgtgtgattttttatttatcgtcgaacctggattgtttatcattgtccttaacaaggctaacggctaataagattatttccatcacttcgtgagagcttcatgccttgatttgatctcaattttcttttgcaatgagacaggcgcttcctgttgttatggtatagtaccccgctattgagcctcctgaacagtgatgctgaataacataacccaatgatatatcgataaaataatctctacatttgaaaatgcacggtaattctgaaatgcaaaaaatcaaccaaaccagcgcaatgcctgaaaaaactgacgttcactggagtggtcggtttagcgttgcaccaatgctcgactggacggacagacattgccgctatttcttgcgtctgctttcccgcaatacgttgctgtataccgaaatggtgaccacaggggcgattattcacggtaaaggtgattacctggcgtacagtgaagaagaacatccggtagcgttgcaactcggcggtagcgatccggcggcgctggcacagtgtgcgaagctggcagaagcgcgtggatatgatgagatcaacctgaatgtcggctgcccgtctgaccgggtgcagaacggcatgtttggtgcgtgtctgatgggtaatgcgcagctggttgccgactgcgtgaaagcgatgcgcgatgtggtgtcgattccagtgacggtgaaaacgcgtattggcatcgatgaccaggacagctatgaatttctctgcgatttcatcaacaccgtttccggcaaaggcgagtgtgagatgtttatcatccacgcacgtaaagcctggctttcggggttaagtccgaaagaaaaccgtgaaatcccgccgctcgattatccgcgtgtgtatcaactgaagcgtgactttccgcatctgacaatgtcgattaacggtggtatcaagtcgctggaagaggccaaagcacacctgcaacatatggatggcgtgatggtcgggcgcgaggcgtatcagaatccgggtattctggcggcggtagaccgggagatctttggttcctcggataccgatgccgatccggtggcggtagtgcgcgccatgtatccgtacattgagcgtgaactcagccaggggacgtatctcggccatattacccggcatatgttgggcttgttccagggtattcctggcgcgcggcagtggcggcgttatttaagtgaaaatgcccataaagcgggtgcagacattaatgtgctggaacacgcgctcaaactggtggcggataagcgttaacttttcaccaaaaagtagtcaaattcaccacgccctgcgcaccgtcgcggggcgttttgctgttaaatcaatagattatttttggcatgattcttgtaatgccagcaagagatttcatatttgggagagcatcatgctggaactactttttgtgattggcttttttgtcatgctgatggtcaccggcgtttcgttgctgggcattatcgccgcgctggttgtggcgacggccattatgttcctcggcggtatgctggcattgatgattaagttgctgccgtggttactactggcgattgcggtggtgtgggttattaaggcgattaaagcaccaaaaatgccgaaatatcagcgttatgaccgctggcgttactaagggattgtgcggatgatcacaacctaaggttttatccttagaacaaaataggaattgataatcaaatctgtcactattgcgcctctaacagattcatcgtgctgtaccctacatacagccgaactataaaaagaaagggcttcccaggtggaagccctatttcttttatggaatcagcaggctggaaccttgcgtcgcccggctttccagaatctcatgcgcacgctgcgcatccttcagcggatatttctgctgctcggcgacatcgaccttaatcacaccgctggcaatcaaagagaacagttcattactggcctcggttaattcctcccgcgtggtgatatagccttgcagggaagggcgtgtcacatacaacgagcctttttgattgagaatgcctaagttcacaccggtaaccgcacctgatgagttgccaaaactgaccattaagccgcggcgttgcaggcaatccagcgaccgttcccaggtgtctctgcccacggaatcgtacactacgcgcactttcttaccgccggtgatctctttcaatcgctcgaccagattctcttcacgatagttaataacctgccacgcgccggcttttagcgcgctctgcgctttttgcgcggttcctacggtgccgataagtttcgtgcccagggcttttgcccactggcaggcaattaagccaacgccgccagccgctgcgtggaacaggaactgttcatcgggtttaatttcataggttttgcgcagcagataataaaccgttaagcctttcaggaaagatgctgcagcttgctcaaaagaaattgccgcaggcagaatcgccgctttatccgcattaatgttatgcacagagctgtaagcgcctaacgccgactgcgcatagacaacacgatcgcctgccttaatatgctttacaccactgccgactttactcacgatgcctgccgcttcggtacctaatccgctgggtagtgatggcggcgggtaaaggccgctgcggatatacgtgtcgataaaattgatgccgatggctttattttcgacctggatttcattctctgccggatcggcaggagtgaactctacggcttgaagtacttccgggccaccgtgcttgtgaaattcaattcgtgttgccatgtgtcctccagaacgtatcgtcagggtctgcttcatatggtaaagtttcgacccattctttatctcggtaactccattcactatggcaggaaataaacccttcaacaaacagcaggctgaaccccgcgaacgcgatccacaagttgccgggctgaaagtgcctccgcactcgatcgaagcggagcagtcggtgttgggcggtttaatgctggataacgaacgctgggacgatgtagccgagcgtgtggtggcagacgatttttacacccgcccacaccgccatatctttactgaaatggcgcgtttgcaggaaagcggtagtcctatcgatctgattacccttgcggaatcgctggaacgccaggggcaactcgatagcgtcggtggttttgcttatctggcagagctgtcaaaaaatacgccaagtgcggcgaacatcagtgcttatgctgacatcgtgcgtgaacgtgccgttgtccgtgagatgatctcggttgcgaatgagattgctgaagccggttttgatccgcaggggcgtaccagcgaagatctgctggaccttgctgaatcccgcgtctttaaaattgccgaaagtcgtgcaaacaaagacgaagggccgaagaacatcgccgatgtgctcgacgcaaccgtggcgcgtattgagcagttgtttcagcagccacacgatggcgttaccggagtaaacaccggttatgacgatctcaacaaaaaaaccgctggcttgcagccgtcggatttgatcatcgtcgccgcgcgtccgtcgatgggtaaaacaacatttgcgatgaacctcgtcgaaaacgcggcgatgttgcaggataaaccggtacttatcttctcgctggagatgccttcagaacagattatgatgcgttctctggcgtcgctgtcgcgcgttgaccagactaaaatccgtaccgggcagctcgatgatgaagactgggcgcgcatttccggcaccatgggtattttgctcgaaaaacgcaatatctatatcgatgactcctccggcctgacgccaacggaagtgcgttcccgcgcacgccgtattgcccgtgaacacggcggcatcgggcttatcatgatcgactacctgcaactgatgcgcgtaccggcgctttccgataaccgtacgctggaaattgcagaaatctcccgctcgctgaaagcactggcgaaagaactgaacgtgccggtggtggcgctgtcccagttgaaccgttctctggaacaacgtgccgacaaacgcccggtcaactccgacctgcgtgaatctggctctatcgagcaggatgcggacttgatcatgtttatctatcgtgatgaggtgtatcacgaaaacagtgatttaaaaggcatcgcggaaattattatcggtaaacaacgtaacggcccaatcgggacggtacgcctgacctttaacggtcaatggtcgcgcttcgacaactatgcggggccgcagtacgacgacgaataataattattttatgaattaggtaattaaagcaaacacttatcaaggaacacaaatgcaagcggcaactgttgtgattaaccgccgcgctctgcgacacaacctgcaacgtcttcgtgaactggcccctgccagtaaaatggttgcggtggtgaaagcgaacgcttatggtcacggtcttcttgagaccgcgcgaacgctccccgatgctgacgcctttggcgtagcccgtctcgaagaagctctgcgactgcgtgcggggggaatcaccaaacctgtactgttactcgaaggcttttttgatgccagagatctgccgacgatttctgcgcaacattttcataccgccgtgcataacgaagaacagctggctgcgctggaagaggctagcctggacgagccggttaccgtctggatgaaactcgataccggtatgcaccgtctgggcgtaaggccggaacaggctgaggcgttttatcatcgcctgacccagtgcaaaaacgttcgtcagccggtgaatatcgtcagccattttgcgcgcgcggatgaaccaaaatgtggcgcaaccgagaaacaactcgctatctttaataccttttgcgaaggcaaacctggtcaacgttccattgccgcatcgggtggcattctgctgtggccacagtcgcattttgactgggtgcgcccgggcatcattctttatggcgtctcgccgctggaagatcgctccaccggtgccgattttggctgtcagccagtgatgtcactaacctccagcctgattgccgtgcgtgagcataaagccggagaacctgttggttatggtggaacctgggtaagcgaacgtgatacccgtcttggcgtagtcgcgatgggctatggcgatggttatccgcgcgccgcgccgtccggtacgccagtgctggtgaacggtcgcgaagtaccgattgtcgggcgcgtggcgatggatatgatctgcgtagacttaggtccacaagcgcaggacaaagccggggatccggtcattttatggggcgaaggtttgcccgtagaacgtatcgctgaaatgacgaaagtaagcgcttacgaacttattacgcgcctgacttcaagggtcgcgatgaaatacgtggattaatcgttctgtaatatttgattgtctgtgccggatgcggcgtgaatgccttatccggccaataaaatcctaaaaattcaataagttgatgttctttcatgctcttataaaggtcgtgcctctggcggatgtacgtttgtcatgagtctcactctgttgctaattgccgttcgctcctgaacatccactcgatcttcgccttcttccggtttattgtgttttaaccacctgcccgtaaacctggagaaccatcgcgtgtttcaaaaagttgacgcctacgctggcgacccgattcttacgcttatggagcgttttaaagaagaccctcgcagcgacaaagtgaatttaagtatcggtctgtactacaacgaagacggaattattccacaactgcaagccgtggcggaggcggaagcgcgcctgaatgcgcagcctcatggcgcttcgctttatttaccgatggaagggcttaacagctatcgccatgccattgcgccgctgctgtttggtgcggaccatccagtactgcaacaacagcgcgtagcaaccattcaaacccttggcggctcaggggcattgaaagtgggcgcggatttcctgaaacgctacttcccggaatcaggcgtctgggtcagcgatcctacctgggaaaaccacgtagcaatattcgccggggctggattcgaagtgagtacttacccctggtatgacgaagcgactaacggcgtgcgctttaatgacctgttggtgacgctgaaaacattacctgcccgcagtattgtgttgctgcatccatgttgccacaacccaacgggtgccgatctcactaatgatcagtgggatgcggtgattgaaattctcaaatcccgcgagcttattccattcctcgatattgcctatcaaggatttggtgccggtatggaagaggatgcctacgctattcgcgccattgccagcgctggattacccgctctggtgagcaattcgttctcgaaaattttctccctttacggcgagcgcgtcggcggactttctgttctgtgtgaagatgccgaagccgctggccgcgtactggggcaattgaaagcaacagttcgccgcaactactccagcccgccgaattttggtgcgcaggtggtggctgcagtgctgaatgacgaggcattgaaagccagctggctggcggaagtagaagagatgcgtactcgcattctggcaatgcgtcaggaactggtgaaggtattaagcacagagatgccagaacgcaatttcgattatctgcttaatcagcgcggcatgttcagttataccggtttaagtgccgctcaggttgaccgactacgtgaagaatttggtgtctatctcatcgccagcggtcgcatgtgtgtcgccgggttaaatacggcaaatgtacaacgtgtggcaaaggcgtttgctgcggtgatgtaatgcaggaaagcaggctggagctacccagcctgcagtgaaattaaactgtcgtcgctttcactctttctttatagatgatttttttgatgccatcgttctacgtgagagataataaacgttattagttcttttattgttaagcttatcctaattatctggaattccttatcctgtttttttgggtggagtaataatttctgcacatctaactattattaaatttaataataagtatcgggtttgttacgatagaatttttctatatcctcaagaatatgctttgccttattgcctgtgactttctgagattcaattatagtatcgttaaattctaaagttaaagagagctctttttttccgctttgtgtaagtttaaccttatattgattaccaatatcaaataaaaaggtcctgtaatgagaataatcacctttaacctcctcggcaaaacagcaaagcgtgcaaatatacataaagtctttcttacctctgattttgttaactaaatcaataaatgcgtgaaaaactttacttgcaatagaacttgatacttcttctccaggtctacaaaaatcttttgcaatttttaactgtgtttctatgtataaaaagaaatctttagcataagaaaaatctttggcataagagatatctttattatttagtgcatctagctcaacaggtaaagatgtcgttttgttgctattcacatatgatatattcatatcatcatctccatcgggagtaataaaattagtcaccattgtaggatagggttctggtcaatcaggaatcatctttataaacttcgattgtttttgtaatgctgtatcattaagttcattaaatcgtacagcagataaatgttctatcaaatttcgctcatttgcagaggattcatcataataaacgtaaaattaatgtatccttacatcgagtaataaacattttttatacaaaaaaagacaggaacgtatttactgggttaaacataatcatcctgcttttcatcacaaaaaccgcagataatccttcctttccccggcagctggcgttatggtcagatggtttttgcaacaaatctcacaataaaaagtttcaacatactgactatttagggaaaaatatgcgcaagatcacacaggcaatcagtgccgtttgcttattgttcgctctaaacagttccgctgttgccctggcctcatctccttcaccgcttaaccctgggactaacgttgccaggcttgctgaacaggcaccaattcattgggtttcggtcgcacaaattgaaaatagcctcgcagggcgtccgccaatggcggtggggtttgatatcgatgacacggtacttttttccagcccgggcttctggcgcggcaaaaaaaccttctcaccagaaagcgaagattatctgaaaaatcctgtgttctgggaaaaaatgaacaatggctgggatgaattcagcattccaaaagaggtcgctcgccagctgattgatatgcatgtacgccgcggtgacgcgatcttctttgtgactggtcgtagcccgacgaaaacagaaacggtttcaaaaacgctggcggataattttcatattcctgtcaccaacatgaatccggtgatctttgcgggcgataaaccagggcaaaatacaaaatcgcaatggctgcaggataaaaatatccgaattttttatggcgattccgataacgatattaccgctgcacgcgatgtcggcgctcgtggtatccgcattctgcgcgcctccaactctacctacaaacccttgccacaagcgggtgcgtttggtgaagaggtgatcgtcaattcagaatactgacagagcgggagagcgtgacactctcccgaatgctgtttttttaatcacacctttatcctttcgctgtcttgctgcaaactgattaagagagttttatcaaggagcagcacatgtggtatcaaaagacgctcacgcttagcgccaaatctcgtgggtttcatctggtaacggatgaaattctgaatcagctggctaatatgccgcgcgttaacatcggcttactgcatctgttgctgcaacatacctccgcctctctgacacttaatgagaactgcgatcccaccgtacgccacgacatggagcgttttttcctccgcaccgttcccgacaacggaaattatgagcatgactatgagggagcagacgatatgccttctcatatcaaatcctcaatgctgggaacatcgcttgtattgccgttacataaagggcgtattcagaccggcacctggcaaggcatctggctgggggaacatcgcatccacggcggatcgcgtcgcatcatcgcgacactacaaggggagtaaaaaatgaccatttcggagttgctacaatattgcatggcaaaaccaggcgcagaacagagcgtgcataacgactggaaagcgacgcagatcaaagtggaagatgtactgtttgcgatggtgaaagaagtagaaaatcgcccagctgtttcgctgaaaaccagcccggagctggcggagctgctacgtcagcagcacagcgatgtgcgtcctagccgccatctgaataaagcgcactggagcaccgtgtatctcgacggttcgctgccggattcgcaaatctattatctggtggatgcgtcttatcagcaggcagtgaatttactaccggaagaaaagcgtaaattgctggtacaactctgaaaggaaaaggccgctcagaaagcggccttaacgattacagcatcggcttgaggaagcgtgccgtatgcgaagcttcgcactccgcgacggtttctggcgtaccggagacgaggatttcgccgccgccactgccgccttctggtcccaggtcgacaatccagtcagcggttttgatcacgtcgagattgtgctcaatcaccacaatggtattgccctgatcgcgcagtttatgcagcacgtcgaggagttgctgaatatcggcgaagtgcagaccggtggtcggctcgtcgagaatatacagcgtctgcccggtgccgcgttttgacagctcacgcgccagcttcacgcgctgggcttcaccaccagaaagtgtggttgcggactgccccaggcgaatgtacgtcagaccaacgtccatcaacgtttgcagcttacgcgccagagctggcaccgcatcaaagaactcacgcgcctcttcgatggtcatatccagcacttcgtggatggttttgcctttgtacttaatttccagcgtttcacggttatagcgtttacctttgcactgatcgcacggcacgtagatatccggcaggaagtgcatctccactttgatcacaccgtcgccctgacaggcttcgcagcgcccgccacggacgttaaagctgaaacgtcctggcgtataaccacgcgcacgggattccggtacgcccgcaaacagttcgcgcacaggtgtaaacacgccggtataggtcgccgggttagaacgtggagtacgaccaattgggctttggtcgatatcgatcactttatcgaaatgctccagcccctgaatatcgcgatacggtgccggttcggcgatggtcgcaccattcaactggcgttgggcaatcgagaacagtgtgtcgttaatcagcgtcgatttaccggaacctgaaacccctgtgatgcaggtaaacagaccgactggcagcgtgagcgtcacgtccttcaggttgttgccgcgtgcacctgtcagcttcagcactttttctggattcgccggaacgcgtttcttcggcacttcaatcttgcgtttaccgctcatgtactgcccggtcaacgattcaggcactgccataatcgcttccagcggaccttctgcgaccacttcaccgccgtgaacacccgcaccaggaccgatatcgatcacatggtcagcggcgcgaattgcgtcttcgtcatgctccaccacaatcacggtattaccgagatcgcgcagatggataagcgtacccaacaggcgctcgttatcgcgctggtgcaggccgatagacggctcgtccagtacatacataacgccaaccaggcccgcaccaatctggctcgccagacggatacgctgggcttcaccgccggaaagtgtttctgccgagcgggaaagtgtcaggtaattcaggccgacgttaacgaggaatttcagacgatcgccgatctctttaaggattttttctgcaatcttcgcccgttgaccagcgagtttgagattgttgaagaattccatcgcatgaccgatgctcatgtcggagatagcaggcagcggcgtattctcgacataaacgtggcgcgcttcccgacgcagacgcgtcccttcgcagctggcgcatgggcgattgctgataaacttggctaattcttcacgtaccgcactggattctgtctctttataacggcgctccatattgtgcagcacgccttcgaacggatgacgacggatggaggtatcgccacgatcgttcatgtatttgaattcaatgttttctttgccagaaccgtacaacaccactttatgcacgttcgcgctcaggctgccccacggcgcttcgacgtcgaacttatagtgatctgccagcgatttcagcatctggaaataatagaagttgcggcgatcccagccacggatcgcaccgccagccagtgacagctcggggttttggatcacgcggtcaggatcgaaatattgctgtacgccaaggccgtcacaggtcgggcaggcacctgccgggttgttaaacgaaaacagtcgcggctccagttcacgcatactgtagccgcaaattgggcaggcgaagttggcggagaacagcagctcttccgctttcgggtcgtccatatccgccactaccgctgtaccaccggaaagctccagcgcggtttcaaacgactccgcaagacgttgggtaagatcgtcacgcaccttgaagcgatcaaccaccacttcaatagtgtgtttcttttgcagttccagtttcggcggatcggaaagatcgcagacttcgccatcaatacgagcacggatgtaaccctggcttgccaggttctccagcgttttggtgtgttcgcctttgcgctctttaatgattggcgcgagcagcatcagacgcttgccttccggctgcgacagcacgttatccaccatctggctgacggtttgcgccgccagcgggacgtcgtggtccggacagcgcggttcgccgacgcgggcgaacaacaaacgcaaatagtcgtggatttcggtgattgtccccaccgtagaacgcgggttatgagacgtcgatttctgctcaattgagatggcaggagaaagcccctcaatatgatcgacgtccggcttttccatcagtgacagaaactgccgcgcgtaggcggaaagggattcaacgtaacggcgctgcccttcggcatataaggtgtcgaaagcgagcgaggatttgccagaacccgaaagcccggtcacgacaatgagcttgtcgcgggggataacgaggttgatgtttttgagattatgggtgcgggcgccccgaacttcgatcttatccattcacctttcccggattaaacgcttttttgcccggtggcatggtgctaccggcgatcacaaacggttaattatgacacaaattgacctgaatgaatatacagtattggaatgcattacccggagtgttgtgtaacaatgtctggccaggtttgtttcccggaaccgaggtcacaacatagtaaaagcgctattggtaatggtacaatcgcgcgtttacacttattcagaacgatttttttcaggagacacgaacatggccagcagaggcgtaaacaaggttattctcgttggtaatctgggtcaggacccggaagtacgctacatgccaaatggtggcgcagttgccaacattacgctggctacttccgaatcctggcgtgataaagcgaccggcgagatgaaagaacagactgaatggcaccgcgttgtgctgttcggcaaactggcagaagtggcgagcgaatatctgcgtaaaggttctcaggtttatatcgaaggtcagctgcgtacccgtaaatggaccgatcaatccggtcaggatcgctacaccacagaagtcgtggtgaacgttggcggcaccatgcagatgctgggtggtcgtcagggtggtggcgctccggcaggtggcaatatcggtggtggtcagccgcagggcggttggggtcagccacagcagccgcagggtggcaatcagttcagcggcggcgcgcagtctcgcccgcagcagtccgctccggcagcgccgtctaacgagccgccgatggactttgatgatgacattccgttctgatttgtcattaaaacaataggttatattgttttaaggtggatgattaaagcatctgccagccataaaaaagaagcctccgttatggaggcttctacgtatcaggtcaaaatcattggccattgtggcggtgtctgattcatctcttctatcatcaccgactcgatgttgtgccagatagcggtgatgtccgccattgtgatgccaagcaaccccattgcgaaccaacaggcggaaacaacgcccagaccgctgctgatcaccgcaagcccgacataatcagaccgacgaaaacggatgttgagtgtgctggccagaaacatcattacggcactaagaagttgccagcgaagaagaaccacgccagtggtgagggtagccatcaaacaattcctctgaaaagagccgatgccctggacagcgcggcgttgttcacgggaggcgtggtacactctggctatcgcggggcttgcagaacacaaaaatgaaacactctgtttgtttcattaattttgtgaactatatcacaattgattgtttgttagccatattaggccgtgacttttattgctgtacagattatgtggtttttcagtggcattaagggcatatcttcccgccgcctctgcattcctgtaggaaattaattttgaatatcaatgaattattttcatccaggtgacgattagaaaggtatcaatttcaaatcaggcaaaagtgctatttataccgtaagatttatctaaagacgtcggtacccagggttttcaccttgcaatggccgggtataaacaggcaggaaattgatagcaatgagtcatcgtgcacgacaccaattactggcgttgccgggcattatctttttagttctctttcccatcattctttcgctatggattgccttcctttgggcaaaatcagaagtgaataatcagctccgaacctttgctcaactggcactggataaatccgagctggtcattcgccaggcagatttagtgagcgatgcagctgaacgctatcaggggcaagtttgcactccagcccatcaaaagcgaatgttgaatattattcgtggctatctttatattaatgaattgatctatgcccgtgataaccattttttatgctcatcgctgatagcgcctgtaaacggctatacgattgcaccggccgattataagcgtgaacctaacgtttctatctattattaccgcgatacgccttttttctctggctataaaatgacctatatgcagcggggaaattatgtggcggttatcaaccctctcttctggagtgaagtgatgtctgatgatccgacattgcaatggggtgtgtatgatacggtgacgaaaacctttttctcgttaagcaaagaggcctcggcagcaacgttttctccgctgattcatttgaaggatttaaccgtacaaagaaatggctatttatatgcgacagtttattcgacaaaacgcccaattgcagccattgttgcgacttcatatcaacgtcttataacccatttttataatcatcttatttttgcgttgcccgccggtattttggggagtcttgttctgctattactctggctacgtattcgacaaaactatttatctcccaaacgtaaattgcaacgcgccctcgaaaaacatcaactttgtctttattaccagccaataatcgatatcaaaacagaaaaatgtatcggcgctgaagcgttgttacgttggcttggtgagcaggggcaaataatgaatccggcagagtttattccgctggcagaaaaggaggggatgatagaacagataactgattatgttattgataatgtcttccgcgatctgggcgattacctggcaacacatgcagatcgctatgtttctattaacctgtcggcctccgattttcatacgtcacggttgatagcgcgaatcaatcagaaaacagagcaatacgcggtgcgtccgcagcaaattaaatttgaagtgactgagcatgcatttcttgatgtcgaaaaaatgacgccgattattctggctttccgccaggctggttacgaagtggcaattgatgattttggtattggctactctaacttgcataaccttaaatcattgaatgtcgatattttgaaaatcgacaaatcgtttgttgaaacgctgaccacccacaaaaccagtcatttgattgcggaacacatcatcgagctggcgcacagcctggggttaaaaacgatcgctgaaggcgtcgaaactgaggagcaggttaactggctgcgcaaacgcggcgtgcgctattgccagggatggttctttgcgaaggcgatgccgccgcaggtgtttatgcaatggatggagcaattacccgcgcgggagttaacgcgcgggcaataaaattacaggcggtggcgataatcgctgggagtgcgatcaaactgccgacggaaaacgcgggagaaggtctgctgcgagacataacccaggtccattgcgatatcaaaaatcggacgctcggtggtgcgcaactcaacggcggccagtaacaggcgacgttggcgaatgtaatcgccaagcgtctgatgcgtcaccgtgcggaacattcgttgcaagtaccactttgaatagcctgatttttttgcgactacatcaatgttaagcggctggtcaatatgctcgtcaatccatgcgataagatcctgaataattttctgatgggacataaatctgcctcttttcagtgttcagttcgttaattcatctgttggggagtataattcctcaagttaacttgaggtaaagcgatttatggaaaagaaattaccccgcattaaagcgctgctaacccccggcgaagtggcgaaacgcagcggtgtggcggtatcggcgctgcatttctatgaaagtaaagggttgattaccagtatccgtaacagcggcaatcagcggcgatataaacgtgatgtgttgcgatatgttgcaattatcaaaattgctcagcgtattggcattccgctggcgaccattggtgaagcgtttggcgtgttgcccgaagggcatacgttaagtgcgaaagagtggaaacagctttcgtcccaatggcgagaagagttggatcggcgcattcataccttagtggcgctgcgtgacgaactggacggatgtattggttgtggctgcctttcgcgcagtgattgcccgttgcgtaacccgggcgaccgcttaggagaagaaggtaccggcgcacgcttgctggaagatgaacaaaactaaagcgccacaagggcgctttagtttgttttccggtctttgtctttctctctatcccgctggtacacaggagggtttcccccgacgtcaacacacctcattcgagcacgtggtggaggttccggttggtgttgatgctttaattgtatgtcaccgacgtttcttcgccagtgtaaaagtatactttttaaccgcaatatttttgtcatctcagacgattttttatcgcaatcctgaacggtatacggctcgataacgctgcaatcttgcgcaccgacgataacgtttgcgcatcaattgcctggtttttcatcgtcaagacaataaaagagaaaaaagcagcaaacttcggttgaaaaagccgctatgatcgccggataatcgtttgctttttttaccacccgttttgtatgcgcggagctaaacgtttgctttttgcgacgcagcaaattgtcgcaaacctggagcaggaagataacgtttcgctggcaggggattgtccgccacgcatcttgacgaaaattaaactctcaggggatgttttcttatgtctacgccatcagcgcgtaccggcggttcactcgacgcctggtttaaaatttcacaacgtggaagcactgtccgtcaggaagtggttgccgggttaacaacgtttctggcgatggtctactcggtcatcgtcgttccaggtatgttgggtaaagcaggcttcccgcctgcggcagttttcgttgcaacctgtctggttgccggactcggttctatcgtgatgggtctgtgggctaatctgccgttggcgattggttgcgccatctccctgacggcatttaccgcattcagcctggtgctggggcaacatattagcgtacctgtcgcgctgggtgccgtgttcctgatgggtgtgctgtttacggtaatttctgccacgggtatccgtagctggattttgcgcaacttgccgcacggtgtggcgcacggcacggggattggtatcggtctgttcctgctgctcattgccgctaacggtgtcggtctggtgattaaaaacccgcttgatggtctgcccgttgcgctgggtgatttcgcgaccttcccggtgattatgtcactggtaggtctggcggtgatcatcggcctggaaaagctgaaagtccctggtggcattctgctgaccattatcggtatctcaattgtcggtttgatcttcgatcctaacgtccatttctccggcgttttcgccatgccttcattgagggatgaaaacggcaactcactgattggcagcctggacattatgggcgcgctgaatcctgtagtcctgccaagcgttctggcgctggtaatgacggcagtatttgatgccaccggaactatccgtgccgtcgccggccaggcgaacctgctggataaagatgggcaaattatcgacggtgggaaagcactgaccactgactccatgagcagcgttttctctggcctggtgggtgcagctccggcagcggtatacatcgagtctgcggcgggtacggcggcgggcggtaaaaccggtttgacggctatcaccgttggcgtgctgttcctgctgattctgttcctctctccgctctcttacctcgttccggggtatgcaacggctccggcgctgatgtacgttggcctgctgatgctgagcaacgtggcgaaaatcgactttgctgattttgttgatgcgatggcgggtctggttacggcggtattcatcgtgctgacctgtaacatcgtaacaggcatcatgatcggcttcgcgactctggtgattggtcgtctggtttccggcgaatggcgcaagttgaacatcggtacggtcgttatcgccgtggcgctggtgaccttctatgcgggtggctgggctatctaatctttcatcggattctgaaaacgggtggcaatggctgcccgtttttattttctccgcacattgtgtgagcttttgcgatattctgaaaaaatgagaattcaggcataacgtctttctcagatcataaaaaacatcgcaaacagggaacgcatggaaatcttcttcaccatactgataatgaccctcgtggtctcgctgtccggggtggtcactcgtgtcatgccctttcagatcccgcttccgcttatgcaaatcgccatcggtgcgctactggcgtggccgacgtttggtttgcatgtggagtttgatcctgaactctttttagtcttgtttatcccgccgttgctgttcgctgatggctggaaaacgccgacccgtgaatttctcgaacatggtcgagagattttcggcctcgcgctggcgctggtggtggtcaccgtggtcggcattggcttccttatttactgggtggtgccgggcattccgctgatccccgcctttgcgctggcggcggtactttctccgaccgatgctgtggcgctctccgggattgttggcgaagggcgcatcccgaaaaaaatcatgggcattttgcagggcgaagcgttgatgaatgacgcttccggcctggtgtcgttgaagtttgccgtggcagtggcgatggggacgatgatcttcaccgtcggcggtgcgacggtcgaatttatgaaagtagccattggcggtattcttgccggttttgtggtgagctggctgtatggtcgctcgctgcgattcctcagccgctggggcggtgatgaacccgcgacgcagattgttctgctgttcttgctgccattcgcttcttatctgattgccgaacatattggcgtttccggcatcctcgctgcggttgccgccgggatgaccatcacccgctccggtgtgatgcgccgtgcgccgctggcaatgcgcctgcgtgcaaacagcacctgggcgatgctggaatttgtctttaacggcatggtgttcctgctgttaggtctgcagctgccgggtattctggagacgtcgctgatggcagcagaaatcgaccctaacgtcgaaatctggatgctgtttaccgatattattctgatatatgcggcgctgatgctggtccgtttcggctggctgtggacgatgaaaaagttcagcaaccgcttcctgaagaagaagccgatggagtttggttcgtggaccacacgagaaatcctgatcgcgtctttcgccggggtgcgtggggcgatcactctggccggtgtgctctctatcccgctgctcttgccggatggtaacgtcttcccggcgcgctatgagctggtgttcctggcggctggcgtcattctcttctcgctgtttgtcggcgtggtgatgttgcctattctgctacaacacattgaagtcgcggaccattcgcaacaattgaaagaggaacgtattgcgcgagcggcaacggcagaagtggcgattgtggcgatccagaaaatggaggagcgtctggcggcggataccgaagagaatatcgataaccagctgcttacggaggtcagttctcgcgtcattggtaacctgcgtcgtcgcgccgatggacgtaacgacgttgaaagttccgtgcaggaagagaaccttgagcgtcgcttccgtctggcggcattgcgttctgaacgtgctgaactttaccacctgcgcgccacgcgggagatcagcaacgaaacgctgcaaaaattactgcacgatctcgatttgcttgaagcgttgctaattgaggaaaatcagtaagccgaaagcgacgtaaccaggcccgaggtaatctgaaaaaggtgcaatcttttgcacctttaacaggttagctcgggctaacattcatgattctaaaacaaataagttatctctcttgtaaagtcaattcattggctgttcttcgacttaacctcaatctgcgtgttgcataatatctgcagtaatcttcatagcgactgcattaatattatcctcagtttgtgacatgccagtatgagaggtacaatcttcttcaaagaatttctgtagtgttaccagggtatcactatcaatggggatattttcctccccacggagaatggaaatgcccattccctggacgctagcctcatcaaaattaacccgatagagacgggtattaaacatacaggcttttgttaaaatagaacagttgaaatggcagttgcttaaattggcattattaaaattaacattagccatattagagccggtacatataaccatttcgaggaatgtatttgtcagccacgtacaaaagagtttgctatcaattaagtttatattctggaggattgctttgttcagattgacgcgagacagatcagcatgttcaaagttaattaaatcgagtttagagaaactaaggtcggctttaaataaattaacatatggcgctattactttataaagatttacctcagccatgtacgccatataaaaatttgaatagtcaaggaaggtgtttttaatattggctctattcattgctgcattgtagaattgaacatgcatagcggagcatgcatttagagttccgtcggccatttttatctgagcgaaatttgagtcatcgagaatacaattatcaaaaagtattttttccattatggcgtaataaaaattcgttttatacatattacagtcctggaaaatagcgttttgtagtctgcaacctgcaaaattcgaattggataaatcttcatctttaatcacgatacctttcaggctaaggtgtgaaaaatcgtaaccaccatttactgtctgtggaatttcgatagtattattatgggcggcgacattatttataaaatataccaccttaatggatacttccttttctttactaaggtaaactcttctcgtaattctatcgtcacatttattatttgcatataaagctatatctataaaatgtttatgtattttcctgtccgtttccttcgtgatttttcctgatggtaaactatcataaattcttttcattttctgaatcaaacctatcactttttcatgatcatccattttgaaaagagagagggctttattgtcaattaacgtgtttttatgatgtttgctgtaattatatgattttgttttctttgtatgtgatgaacttgtgagagagtggttatcgttaatctggcaaagagagaaaaacatattatttaaaccattatagcgcataaaatatccttataattaacaagaaagaaaaggcatattctctgcattatcattttctacgactgtcaaaaatcgctcattttttaatgagtttatttgtttaatattttgggaaaaggtgatgcatgctggagaggaagagtattccccggtcaggcgaccggggaaggggagagattaatgtgcgcggccttgctcaacgccaaagccggtctgggagcggataaactgcgcgcggaacagttcacgctcgcgcgccccttccgctgagttatcggttgccgagaagaaccagatgccgaggaatgccacggtgatagagaacagcgccgggtattcatacgggaagatggctttttcgtgaccaaggatctgtacccaaatcgtcgggccgaggatcatcagtactactgcggtaatcagcccagccagccacccatcatcgcgccacgcgtggtcagtttcgaccagtacatagaaagcagaatgatcgggaagttacagctcgccgcgatggcaaacgccagccccaccataaaggcgatgttctgattctcaaacagcacgccgaggataatggcaatcacacccaaaatcagcacggtgattttcgatacccgcagttcttcacgttcggtcgcgcctttttgaagacgttagcgtacaggtcatgcgaaaccgctgatgcgcccgccaacgtcagacccgcaaccaccgcaagaatggtggcaaaagcaactgctgaaataaaaccgaggaacaggttgccgcccactgcattcgccaggtgaacggccgccatgttgttaccaccaatcagatggcccgccgcgtctttatattccggattcgcaccaaccagcatgatcgcgccgaagccgataataaaggtcagaatatagaagtagcccataaatccggtggcgtagaacacgctcttacgtgcttcgcgggcatcgctgactgtaaagaagcgcatcagaatgtgcggcaagcccgccgtaccaaacatcagtcccagacccagagagagcgcggagatcggatctttcaccagcccgcccggcttcatgatgtcgacacctttcgggtgtaccgccatcgcttcactgaacagattgttgaagctaaagccgacgtgtttcatcaccataaaggccataaagctggcaccgaacagcaacagcacggctttgataatctgtacccaagtggtcgccagcatgccgccgaacaggacgtacatcatcatcagcacgccgaccagcaccaccgcaatgtgatagttaaggccaaacagcagctcgatcagtttacctgcgcccaccatctgggcgataaggtaaagcgccaccaccaccagagaaccacaggccgaaagaatacgaatcggcccttgtttcagacggtaagaggccacatcggcaaaggtgtagcgccccaggttacgcagacgttcggcaatcaggaacaaaatgatcggccagcccaccaggaagcccagcgagtaaattaagccgtcatagccggaggtaaacaccagcgcggagatccccaagaatgaggcggcggacatatagtccccggcaatcgccagcccgttctggaagccagtgatattgccgcctgcggtgtagtagtcgctacgagaacgtacgcgttttgatgcccagtaggtaatgccgagcgtaaacacgacgaaaatcaggaacataataatcgcctgccagttcgttggctggcgctctacggccccgctaatagcatccgcggcgttagctgcgaaagggagtgtggcggcaagcgccgtcagaactcttttcatgatgcttgtacctcatgcaggacttcattattaagacggtcgaattcgccgttcgcccgccagatgtagataccggtgagaacaaaggagatcacaatcactccaacaccaattggaataccgcgtgtgacgctggtgttcggattcagcggcgtgcccagccagccgggcgcgaaggcgatcagtaaaataaagccgatataaactgccagcataataatcgacaggatggtggcaaaccgttgccgtttttcgactaactccctgaaatgcgcattgtcttctatccgctgataaatagtgccattcatcacagattctccagaggtaatgtagggattgttttaattcccgctcccttatgggagaaggttaacgctcgggtaacccttgccgaatgtaggccggataaggcgtttacgccgcatccggcaatcaatgcctgatgcgacgctgtcgcgtcttatcaggcctacaaaccgttaccgactcgcatccggcaattgtgggttacgatggcatcgcgatagcctgcttctcttcaagcagcttctcgactacgccaggatcggcaagcgtcgaggtatcgcccaggttgctggtatcgcccgccgcaattttgcgcagaatacggcgcataattttgccggagcgggttttaggcagggagtcggtccagtgcagcacgtctggcgtcgccagcgggccaatctctttacgcacccagttgcggacttctgcgtacagttctggtgacggttcctccccgtgattaagcgtgacgtaggcgtagatcgcctgacctttaatattgtgcggaatacctactacggcggcttcggcaatcttcggatgcgccaccagcgccgactcaatctctgccgtccccagacggtgaccggagacgttcagcacgtcgtccacacgcccggtgatccagtaatagccatcttcatcgcgacgcgcgccgtcgccgctgaaatacatatttttgaaggtggagaagtaggtctgttcaaaacgttcgtgatcgccaaacagcgtacgcgcctgacccggccaggagtcggtgatcaccaggctgccttcggtagcgccttccagcgggttaccttcgttatcgaccagcgccggttgcacgccgaagaacggacgtgttgccgaaccggctttcagctcggtagcgccaggcagcggcgtgatcatgaaaccgccagtttcggtctgccaccaggtatcgaccaccggacatttctcgttgccgatttttttccagtaccactcccacgcttccgggttaattggctcgcccacggaaccgagaatgcgcagcgacgaacggtcggtgccttcgatcgctttatcgccttccgccatcagcgcgcggatcgccgtgggtgcggtatagagaatattgacctgatgcttgtccaccacctgcgccatacgggcaggcgtcggccagttgggtacgccttcaaacatcagcgtggtcgcaccgcaggccagcgggccgtacagcaagtaactgtgtccggtcacccagcccacatcggcggtgcaccagtagatatcacccggatgataatcaaagacatatttaaaggtcagcgccgcgtacaccagataaccgccggtagtatgcagcacaccttttggcttaccggtagaaccggaggtgtagagaataaacagcggatcttcggcgttcatctcttccgcctggtgctgatcgctcgcttgctcaaccaggtcgtgccaccacaggtcgcgcccttcctgccagtcaattttcccgccagtacgcttcagtaccaccacatgctctacgctggtgacgttcgggtttttcagcgcgtcatcaacgtttttcttcagcggaatactgcgcccggcacgcacaccttcgtcggaagtgatcaccagtcgtgagttggaatcaataatgcgcccggcaacggcttccggcgagaagccgccgaaaatcaccgaatgcaccgcgccaatgcgggcgcaggccagcatcgcaaccgcggcttccggcaccatcggcatataaatcgccaccacatcaccttttttaatgcccagctcgagcagggtattggcgaagcggcagacgtcgcggtgcagctctttatagctgatatgtttgctctggctggcgtcgtcgccttcccagatgatggcggtgcgatcgccgttttcttgcagatggcggtcaaggcagtttgccgccagattcagcgtgccgtcctcgtaccatttaatggacacattaccgggggcaaaggaggtgtttttcaccttctggtaaggtttgatccagtcgagaatttttccctgttcgccccagaaggtatcaggtacgttaatagattgttgatacatcgcctcgtactgctgagggtttatcaggcaacggtctgcgatgttggcaggaatggtgtgtttgtgaatttggctcatgcttttgttctccttgtaggatgttaataatatgtggcataagcgttaaatgtaggggtattggcagttttgtttagtatttgggcgacagatcacgcaaaagtagaattgtgcaaataaacggcagggtaatttttgaaggtcagcaacaaaagttgattaattctttgaggaacatgcagttatgcatgctgttgaaaaagaggaagatactgactaactctaaagtggtattttacatgcacttacaattgattaaagacaacattcacagtgtggttatttgttacacataggggcgagcaatgtcatgacagtgtaggtgcggttactgtcgtgaaaacaataaaaaccgccattgcaacaatggcgcaattcggatgaagcccctatgacaaggataaaaataaacgcacgccgtatcttcagcttattgattccttttttctttttcacttctgttcacgctgaacaaacggcagctcccgcaaaacctgtaactgtggaagcgaagaatgaaacctttgccccgcagcatcccgatcaatatctctcctggaaagccacctcggaacagtcagagcgtgttgacgccctggcggaagatccacggctggtgatcctgtgggcggggtatcccttctcgcgcgattacaacaagccgcgtggacatgcctttgctgtgaccgatgtgcgtgaaaccctgcgtaccggtgcgccgaaaaacgctgaagatggtccgctaccgatggcgtgctggagttgtaaaagcccggatgtggcgcgtctgatccagaaagacggcgaagatggctacttccacggtaagtgggcgcgcggcggcccggaaatcgtcaacaacttaggttgtgccgactgccataacaccgcctcaccagagttcgccaaaggcaaaccggagttaaccctttcccgtccgtatgcggctcgcgcgatggaagccattggtaaaccttttgagaaagccggacgtttcgaccagcaatcgatggtttgcggtcagtgccatgtggagtattacttcgacggcaaaaacaaagcggttaaattcccgtgggatgacggcatgaaagtcgaaaatatggagcagtattacgacaaaatagccttctctgactggactaactccctgtcgaaaacgccaatgctgaaagcgcagcacccggaatatgaaacctggacagcgggcattcacggtaaaaacaacgtgacctgtatcgactgccatatgccaaaagtgcagaacgccgaaggcaaactctacaccgaccataaaattggtaatccgtttgataacttcgcccagacttgtgcgaactgccatacccaggacaaagctgccttgcaaaaagtggtcgcggaacgtaagcagtcgattaacgacctgaaaatcaaggttgaagatcaactggttcacgctcacttcgaagcgaaagcagcgctggatgcaggcgcgacggaagccgaaatgaagccaattcaggacgatatccgtcatgcccagtggcgctgggatctggcgatcgcttcccacggcattcatatgcacgcaccggaagaaggtttacggatgctcggtacggcgatggataaagcggcggatgcacgcaccaaactggcgcgcctgctggcgaccaaaggcatcacccatgaaatccagatcccggatatctcaaccaaagagaaagcccagcaggccattggcctgaacatggaacaaatcaaggccgagaagcaggacttcatcaaaacggtgatcccgcagtgggaagaacaggcacgtaaaaacggtctgttaagccaataaccccgttccgcctcgcaaggggcggaaaacacaatggagtgaatatgagcgtattacgttcgttattaactgccggggtgctggcgtcgggcctgttgtggagcctgaacggaattaccgctacccctgcggcgcaggcatctgatgatcgctacgaagttacccagcagcgtaacccggatgccgcctgtctggactgtcataagccagataccgaaggtatgcatggaaaacatgcttccgttatcaacccgaataacaaactgccggtcacctgcaccaactgtcacggccagccatcaccgcaacaccgcgaaggggtgaaagatgtgatgcgctttaacgagccgatgtacaaggttggagagcagaacagcgtctgtatgtcctgtcatctgccggaacagttgcaaaaagcgttctggccgcacgatgtccacgtaaccaaagtggcgtgcgccagctgccattccctgcatccacagcaagatacgatgcagacgttaagtgacaaaggacggattaagatttgcgtcgattgccacagcgatcagcgcaccaatccgaactttaacccggcgtctgttccgttgcttaaggagcagccatgacctggtctcgtcgccagtttctcaccggcgtcggcgtgctggcagccgtcagcggcaccgcagggcgcgtggtggcgaaaacgttgaatatcaatggggtgcgttacggcatggtgcatgacgagtcgttatgcatcggctgtaccgcctgtatggatgcttgtcgggaagtgaacaaggtgccggaaggcgtctcgcgcctgacgattattcgtagcgagccgcagggcgaatttcctgatgtgaaatatcgcttcttccgtaagtcttgccagcactgcgatcatgcgccgtgcgttgacgtctgcccgaccggtgcgtcttttcgtgatgccgctagcgggattgtcgatgttaatcctgatctctgcgtcggttgtcagtactgcatcgccgcctgtccgtaccgcgtgcgctttatccatccggtcacgaagacggcggacaaatgcgatttctgccgtaaaaccaatttgcaggccggtaagctgcccgcgtgcgttgaggcttgcccgacgaaggcgctgacgtttggcaatctggacgatcctaacagtgagatttcgcaactgctgcgccagaagcctacttaccgctacaagctggcgctgggaaccaaaccgaagctgtaccgcgtaccgtttaaatacggggaggtgagccaatgacgcagacttccgcatttcattttgaatcgctggtgtgggactggccgattgccatctacctgtttttgattggtatttctgccggtctggtgacgctggccgtgctgttacgtcgcttctacccgcaggcgggcggtgcagacagtacgttgctgcgcaccacgctgattgtcgggccgggcgcggtgatcctcggtctgttgatcctcgtcttccacctgacaagaccgtggaccttctggaagctgatgttccactacagttttacctcggtgatgtcgatgggggtgatgctgtttcagctctacatggtggtgctggtgctgtggctggcgaaaatctttgaacatgatttgcttgccctgcaacaacgctggttgccgaagctggggatcgtgcaaaaggttctgagcctgctgacgcccgttcatcgcggactggaaacattgatgctggtgttggcggtgttgttgggggcttataccggctttctgctgtcggcgctgaaatcgtatccgttcctcaataacccgatcctgccggtgctgttcctcttctccggcatctcgtccggtgcggcggtggcgctgatcgccatggcgatacgccaacgcagtaacccgcattccacggaagcgcagtttgtacaccgtatggaaatccccgtggtatggagtgaaatcttcctgctggtggcgttttttgtcggtctggcgctgggcgatgacggtaaagtgcgtgcgctggtggcggcattaggtggcggtttctggacgtggtggttctggcttggtgtcgccgggctggggctgattgtgccaatgttgctcaaaccgtgggtcaatcgcagttccggcattcctaccgtgttggcggcgtgtggggccagtctggtcggcgtgttgatgctgcgctttttcattctctacgccgggcagttaacggtggcgtaagccagaaaagaggtggtttctggacgtattccttcctgaagtcggttttctggcgttgttgttaagtctcggggtcaacgtgttgaccccgttgacggcctttgcgggagtgcggttgcgctggcctgccatgatgcgactcacttgcatcggcattctggcgcagttcgcgctcctgctgctcgcctttggcgtactgacgtattgttttctcatcagcgatttctcggtcatttatgtcgcccaacatagctacagcctgctgtcgtgggaactcaaactggcggcggtgtggggcggccatgaaggttcgctgctgctttgggtgctgctgctttccgcctggagcgcgctgtttgcctggcattatcggcagcaaaccgatccgctatttccgctgacgctagccgttttatctctcatgctcgccgcactgctactgtttgtagtgctgtggtccgatcccttcgtgcggatatttccaccagcaatcgaaggccgcgatctcaatccgatgctgcaacatcccggtcttatctttcatccaccgctgctttaccttggctatggcggtttgatggtagcggcgagcgtggcgctggcgagtttactgcgcggcgagtttgatggtgcctgcgccagaatttgttggcgctgggcactacctggctggagcgcattaacggcggggatcatcctcggttcctggtgggcctattgcgaactgggctggggcggctggtggttctgggatccggtggaaaacgcctctttattaccctggctttctgccactgcgctgctgcacagtttgtccctgacacgccagcgggagattttccgccactggtcgctgttgctggcgatagtaactctgatgctgtcgctactgggtaccttaattgtccgttctggcattctggtttcggttcatgcgttcgcactggataacgtccgcgccgtgccgttgttcagcctgtttgcactgattagccttgcgtctctggctctgtatggctggcgagcgcgggacggtggcccggtggtgcgtttttcggggttatcgcgggaaatgttaatcctcgctacgctgttgctgttttgcgcagtgctactgatcgtgctggtgggaacgctttatccgatgatttacggtctgctgggctggggacgcctctccgttggcgcgccgtattttaaccgcgcgacgttaccgtttggcctgttgatgctggtggtgattgtgctggcgacgtttgtctctggcaaacgcgtgcagcttccggcgctggtagctcatgcaggcgtgctgttatttgccgcagggatcgtggtttccagcgtcagccgtcaggagatcagcctgaatttacagccgggtcagcaggtgacgctggcaggatacaccttccattttgagcgcctcgatctgcaagccaaaggcaattacaccagcgaaaaagcgatagtggcactgtttgaccatcagcaacgcattggtgaactgatgccggagcggcgtttttacgaagcacgtcgtcagcaaatgatggaaccgtcaattcgctggaacggcatccatgactggtatgcggtcatgggtgaaaaaaccggagcggatcgttacgcttttcgtttgtatgtacaaagcggtgtgcgctggatctgggggggaggattgttgatgattgcgggcgcattgttaagcggatggcgggggaggaagcgcgatgaataaaggacttctcacgctactgctgttatttacctgttttgcgcgcgctcaggtcgtagacacctggcaattcgccaatccgcaacaacagcaacaggcgttaaatattgccagccagttacgttgtccgcagtgccagaatcaaaacttactggaatccaacgcgccggtggcagtcagtatgcgccatcaggtttacagcatggtggcggaggggaagaacgaagtcgaaatcattggctggatgaccgaacgctacggagattttgttcgctataacccaccgttaacgggtcagacgctggtgttgtgggcgctgccagtggtgttgttactgctgatggcactgatcctctggcgagtgagggcgaagcgatgaaagagcccaaaataccggtgaaaatgctgacaacactcacgattttgatggtatttctctgtgtcggcagttatctgttaagtccaaaatggcaggcggtacatgcggaatatcagcgtcagcgcgatccgctacatcagtttgccagccagcaaaccccggaagcgcagcttcaggcattgcaggataaaatccgcgctaatccacaaaacagcgaacaatgggcgttactgggcgagtactatctgtggcaaaacgattacagcaattcgctgctggcgtaccgtcaggcgttgcaactacgtggtgagaacgctgaactgtatgcggcgctggcgacggtgctttattaccaggccagccagcatatgaccgcccagactcgcgcaatgatcgacaaagccctcgcgctggactctaacgaaatcaccgctctgatgctgctggcttccgatgcgtttatgcaggcgaattacgcgcaagccatcgaactatggcaaaaagtgatggatctcaactcaccccggatcaaccggacacagctggtcgagtcgattaatatggcgaaattgttgcagcggagatcagattaatcatctggtgatgaagattatgttattgagttgtataaaaaataatcgaatgaacatatgccaaaaataatcaccaatcagtattattgcagattaaacaaataaaaatctttccataacaaatggttattcattaatcctgccataaactcgcgttattatgcattaatgcagcgaaaagctctgttgttaaagggttgcgcaacataccgcgcaaatgatactgatcataagcgttaaaaaaatctacaaaccaacgcaacacaattcatgccctggcagtatgtcacgttctcgcgtttctgaacggggaacggcgctccattgaggaagttattctgatgaaaagtataaaattcagcctggcctggcagattctgtttgctatggtgctgggcattctcctgggaagctacctgcactaccatagcgacagccgcgactggctggtcgtcaatttgctctctccggcgggtgatatcttcatccatctgatcaaaatgattgttgtgccgattgtgatctccacgctggtggtgggtatcgcgggtgttggtgatgccaaacagctcgggcgtattggcgcgaaaaccattatttacttcgaggtgatcaccaccgtcgccatcattttggggatcactctggcgaacgtcttccagcccggtgccggggtggatatgtcgcagctggcgaccgtcgatatctcgaaatatcagagcactacggaagcggtacaaagcagttcccacggcattatgggcacgattttgtcgctggtgccgacgaacattgtggcgtcgatggcgaaaggcgaaatgctgccgatcatcttcttctcggtgctgtttggtctggggctttcctccctgcccgcgacgcatcgtgaaccgctggtgaccgtgttccgctccatctctgaaaccatgtttaaagtgactcacatggtgatgcgttatgcaccggtgggtgtgtttgcgctgattgcggtgacggtggctaactttggtttctcttctctgtggccactggcgaaactggtgctgctggtgcatttcgccattctgttcttcgcgctggtagtgctgggaattgtggcgcgcctgtgcgggttaagcgtctggatcctgattcgtattctgaaagatgagctgattctggcgtactccactgccagctctgaaagcgtactgccgcgaattattgagaagatggaagcctacggagcaccggcgtcgatcaccagcttcgtggtgccgaccggttactcttttaaccttgatggttcgacgctgtatcaaagtattgccgctattttcatcgctcagctgtatggcattgacctgtccatctggcaggaaatcattctggtgctgacgctgatggtgacctcgaaagggattgctggcgtgccgggcgtgtcgtttgtggtgctgctggcaacgctgggtagcgtaggtattccgctggaaggcctggcgtttattgctggtgttgaccgtatcctcgacatggcgcgtactgcgctgaacgtggtgggtaatgcgctggcggtgctggtgattgccaagtgggaacacaaatttgaccgcaaaaaggcgctggcttatgagcgtgaagtgctgggcaaatttgataaaactgcggatcaataattgaagattgccggggttatccacccggcaatgtgtggatgcctgatgcgacgctggtgcgtcttatcaggcctaccttaaccgttggttaatttttcaaactcttcacacccggtatcaaacccttccatacagctcaggttcaaccagtgcagcgccttttgtttgttcttctcgataaaaccttcctcaccgtttaagaacatcattcccgcccagtactcggaataaccggttcgggaaattgcagagctgcgtttgaaataccaggttgccttgtcatcgtcggccttaatgcccacgccgttggcgtaaatcaaaccaagcagcatttgggcatcgacggcggagtcattctccagatcttccgaggcgttttctaacagcgaaatcgcctttggataatccggtttacccgcttgagtatttaccagaatatgcgccagcgttacttcaccttctttactgcccgcttgcgccgctttctctgcaagaacttttgcttgtggatagtccagactgaccggattggtgattttgatctgcgccagcagcgcgcaggcatcagcatcaccgctgtcggcggctttctgtgcccaatattcggctttgctcaaatcgccggagctaaaccagctgtcggcaagaaaatattgtgcgcgtcggtccccggcctctgctgcctttaaatactggctgccaggctcggagtcgttcgcgtgggcaaagaatgtcaaaaacaacatcaatgcgataatttttttcattttgataatacgattgggtagggagtaaccagtataaagagttcgaatggataaaaaacagcctccgaaaggaggctgtagaaaggactgtattacgccagtgccgcttcgcgcaggcgagttttcaacttgttgtactcgtcaatcacgtactgctcggcggcgcgctgatcggcgatcggctcgacgcgcacggcgcagtatttgtattccggcgttttcgtaatcgggcttaagttttcggtaaccagctcgttacaggcaccaatccaccactggtaggtcatgtaaatcgcccctttgttcggacgatcgctgacctgcgcacgggtgataattttgcctttacgcgagtgcacccaaaccaatgcctcatcttcaatacccagacgtttggcgtcttcggtattgatttgtgcgtagccaggttcatcagccagcgccgccagtgccgcacagttaccggtcatcgaacggcaagagtagtgaccaacttcacgcaccgttgacagtaccatcgggtactcgtcggtgagtttgtcgattggcgctacccagtcgcaggtgaagaactgtgccagaccgttcggggtatcaaacttctctttaaacagataagaagtcccctgatcggcatctgaagtatcgcggcaaggccactgaatgaagcccagttcgcccattttctcgtaagtcgcaccgtagaaatccgggcacagatgacgcaactcatcccagatctcctgggtgttgttgtagtgcatcggataacccatacgggtggcgatttcactgatgatttgccagtccgttttcagatcccatttcggttcaactgctttgaagaaacgctggaagccacggtcagccgcagtaaacacgccttcatgctcgccccacgacgttgacggcaaaatgacatccgccgccgacgcggttttggtcataaagatgtcctgaacgataaccagttccagatcttcaaaggctttacgtactgccgacagctccgcgtcagtttgcagcggatcttcgcccataatgtatgcggcacgcacttcgccatgcgctgcgcggtgcggcagctcgctgatgcgataaccggtatgagcaggcaggctttccacgccccaggctttggcgaatttctcgcggttagccggatctttcacgtactggtatcccggatacgtatccggcagcgcgcccatatcgcaggcaccctgcacgttgttctgaccacgaaccgggtttacacccgcatgcggcttaccgaggttaccggtcagcatcgcgaggctggtcagagaacgcacggtttccacgccctggtagaactgggttacacccatgccccacaggatggcggcgcttttcgcctgggcatacatccgtgccgcctgacgaatctcactggcgctgacgccggtgatatcttcaaccgactccggcgtgtagccttcaacgattttacgatactcttcaaagccttctgtacgggaagcgacgaacgctttgtcgtacagattttcttcaataatgacatggcccatcgcattcaacagcgcgatgttcgagccgtttttcagtgcaatgtgcatgtcagcaatgcgcgcggtttcaattttgcgcggatcgcagacgataattttcgccccgttacgtttagcgttaattacgtgattcgccacgattgggtgggaatccgccgggttgtacccgaaaacgaacactaaatcggtattatcaatttcgttaatagcattgctcattgcgccattaccgaccgattggtgcagacctgcaaccgatgggccgtgtcagacacgagcgcagcagtcaacgttattggtaccaataacggcgcgcgcaaatttttgcattacatagttggtttcgttacccgtaccacgcgaggagccggtcgtctggatggcatccggaccgtacttctctttgatggcgctcaggcgctcggcaacgtaattcagtgcctcatcccaggaaacaggttcgagtttgccgccacgctggcgacggatcatgggggttttcaggcgcggggtcaggatctgggtatcgttaatgaaatcccagccataataacccttcagacacagggtaccctggttggttttcccctgcgctgcctccgcccggacgattttgccgttatcgacgaccaggttgattttgcaacctgatgcgcaataggggcaaaccgtgacgacttttttcatcggtctcgctccagttaatcaaatcacgcatacgcgctctcgactacagtatgcatcttttatgccacattttatttggggtcattccctgatattacgggcactatttattcaaaactctgacgaaaaacaggctgtcgtcagttttgacgtgacgaaacgaaataccgcgtgacagccatcacgcggcagacattttattttttctcgacgacgggagccgcctgatacccgccgcccagcgatttcatcaactgaatgctttggatcacccggcggctgtccagcatcagtaatgacatctcttcggcaagtactggcaaccgggcttcagtggcctgtaagcggctggttaagccgcgctgataggcggcctcggcagcgcgctgggtgaagcgcgttgcttccacgcgttcagcctgcatttctcgctcgtcgttgagcgtttgcagacgcgtgccgttgacggcaacgtcacgcaccgcgttcagtactgactggttgtaacgttcaatcatcatgttgctggcggcgcgcgtgccttcgagattggcattcaaccgtccaccgtcaaacagcggcaatttcagacccgggatgaagttgaactggcgactggtttttttgaataaggtatccaggtggatggcatcaaggccgaaaaacgctttgatatcaaagctcgggtagaacagcgcccgcgcggaatccacctgatctaatgacgcctgaacataccagcgcatggcttgcagatccgggcgtctggcgagcaactcataagagagtgtcgccggaatgccggtctggactcgtggtaatgccaccggtttgatctccggcatatcgctggcccccgcgccaatcaatgcacgcagagattctcgcgtttcggtgatttgccctttgacggcagcaatttgtttatcgaccgccagaatctgtgcccgcgcgccgtggaaaggcacttgtgcttccagaccgtgcgccactttactctggtgcgctttcaccgcgtaatcaatcacatcgcgagtttgttctaacagatcgagcatctgatagctggcctgcatactgtaataaagctgcgctacgcccgtggtcagcgatagctctactgctgcggtttctgccagcgcggcattatgcgcgccaatggcggcggcaaccgctgagcgatgcacaccccacaaatcaagatccagtccggcaaacaaacctactgtggcttccgtatagtacggcccgtccatacccagtgcgggcgcatccatcgcataagggcttaaaaagccgttcgccgagacgcgttggcggttgagcatccctaacgctgcgacctgtaattgtgaaccggcatctaacaaatcggcctgggactgcgctttttcttcccgcagtttcgcttcggcgagggtgtgtgaaccacttagcgtccgttggatcagcgcatccagctgcgggtcattgagttgtttccaccactgcgcctgcggccagccggagctggcaagatgaatatcgtcggccagtttgatttgttccggtttgagctgttgatgaggtgcagaatccttacgtaccaggcacagccggaaatcagcgtcgtgctgccgagaatgctgcacaacagcagacgtgaaagttgacgattgatcattgcgtggctccttgtgcctgttccgtggcgggcgttaatgccggggctgtccagtctggcaagcgggcgaaaagctggcagacgtgttgctcctgttttaataaggtgggcaggatggcctgcgaggcgggtgtctcttcaagcgttatttgaggagaacggctgagtgcggttgccagaccggcagcgtatttctccagggcgtcggcaaactgagctgctctgtccggctgtagtgcgttatccagcgcctgcgccgagttccaggtggcatcccaggcgtgaagaatatcgcggccctgacgaataaccgtttgcgaacgttcaatcagtaaggcgcgttcttcgctgtccagttgacgctccagcgccacgcgttggcacatctcttcacaggcattaaacgccgcatgcagaccgatacgaatttgcagataagtgcgcagagccgtgacttcctgctggcgtgggatccgcattactttacttaacatacccagcgtgccagccagtttttgcggcagtgtgcgcgcttcactttcaggccagacaaaggtgtaaatcaccgcggacaccacggtaccaatgatgatacccagggcgcgatcgcgaatttccaccaggtcgtacactgggccaaaaacgttttcgagcgtggcgagcgcgaaggtgaccaccatctgtgtgccgatataagaagagcgttcagagctggtggcaatccatgcgcccaacaggaaaatcggtgccagcacaaacagcaattcgacaatattgtccagccagggcatgaccagtagcgtgaataacagcgccagaatcgcgccgcaaaaggccccgccaaaacgcagcaccatcttctggtacgacgaaccgacatttgggttagcgacgatcacgcatgtcagcatacaggtgtgaatgccttcccagtccacgccgctgtaaaaggtgtaacagatcaaacaggcgagcagcgtttttaccgcgtagcgcatatagtctggattggtaaaagcatcggcggccattgatggcggtttggctgcgggcgttggcggcgtattcgggtccatctgacccagttgtaacaacgtctggcagatattctccaggttacattcccgtgccgccatcgcttcactttcactgatccgccagtcgctttgccagcactgaccttcagcaacggcatgctgcagcttattgatttctgaggctaatttttgccgaaattcaataattgcctgagaatcagcaaaagaggtgggatcgtagcgattcagcgtcgagtaaatgtaggttaccgttgccacgcagctttgccaccatgcgctttgagttcgccagttggcatcgtccgcgagacaaaagacattcagtttttgcagcgccagcgcctctctttcaatccgcgtttcgggtagcggtgcgaggctgtccgtcaggtggctaatggcatcatcaagccgatcattaagcgcctgatgcatttgcgaaatggcacgactgggaaaccacagcacgccgattaacgtcatcagcaaggttggataaaggccaacaacgatacaccacagcgttaagcgcacgaccacttccggatagtcgagcatggcggggaaggtttgcccgtaaatggcgacaatggcgactgcgaaaaagaccagtcccagccgatgggtgcgcatcaaaaacatacagcccatcaggatcggcccggcgatgatcaatcggatcaacggttcgccgtatgaccatttgtagatcaaaaacaggctgccgatctccagcatcgtggcgaccacaaataagatcgcgacaaatttggtgtaaaacgcgttcgactgaataccgtaaaacagcactgccagcgataacgccacgaatgggatctcaaaggtcatcgagatcagaatcaccagcaggcagcctacccagagttgcacggtctgcggcacgcggcctggtcgccgctcgcttaactcttcatgaaagaacgccagcagcctgaccaccggtaatggcagggagttgagcgcgctcattattgcggctcaagattagcgactgccgaagcgccgatgcggaacatttccgggtcaggtttatcgaccatgattttgaccggaaaacgctgggcaacgcggacccagttaatagagcgagaaactttcggcaggccgcccagcaccaggccgccgtcatccggtagcacgccgtagccaatcgaatccactttaccctcgaaggttttgccgctgtcactcatcaggcgaatcgttgcgggtgtacctgagcgaatatttttcagatcggtttcgcggaagttggcgatcacgtaccagtgacgagtgtcgattagggtaaaaatagggcgcatggcagaagcaaattgcccgacggaggttttgagggaaatgacccggccatcaaacggcgcgcgaacggtcgccatttccagatgaagtttggtcagggcaatatccgcttcgaccgccgcacgttgcgccaccagcgcatcgacgccgctgacggcgctggcggctgactgcgcctgtaacaatacggcattaagatcggcttctgcggcgcgctgcgcagttcttgcacggtcaacgtcttccgctgagacaaaaccctctttcagtaatggctcggtgcggcgtaatgtatctgtggcctgtttcgcggcggcacgggctttttctaccgtggcattaatcgagtcggcaccaaactgttgcgcatcaacgctacgctgggtgagcataatttgcttatccagcgccgcgagggaggcttcagctttcgccagattggcttcgtacgggcgcgggtcaatgcggaacagcaaatcgccctgtttgactgcctggttgtcggtgaccgccagttctacaatgcgaccgctgacttccggcaccacatcaatggtatctgctgacgcgtaagcgtcattagttgatggcgcactgtctacgcgccagataacgaaaacaagggcaaccagcgccaacgcaaccactaacagagcagggaatttactgcgaggagcttttttcggcgtactttccatgagcgcgtctcaaatagattagaaaaatgccagccagaacagcatggcgtagagagcaaaaagggcggtataaataattccgacaaatgccagattgatatttgcccgctgaataactcgcctcgtgatgagcatcaaaataaggctggcaatggcgcagaaaaaccagctgggataataagcaccgatcaccgggattgccggagataatgagcatcccgaaaccatgaagacgggaattatccaggctgattttttgagttgcatcgccatgcgagagagaactgttggcatattaaatacatcctgtctgctgcgaacaatatctgtagtgaatatcaatatccattgaaggcgtcagtatggctattttctcgatgaataaaaatagctttattcagccaccgcattcataacttatatattttatttattaattggctgtatatatttttaaaataaatgcttttgggggcttcagcgcccccaaaagcgagtgacattaatttggggttacgatattcacccacaaatcgaaattatccagacaggcgataatttcttccagtttcgcgccattgccaataattttggctttcttcgcttttaccagatccgccattttggcttgcccggtcagcacggcgtgcagatcttcacggctgatgtagaaagaggcgtcagcttgggattgcagtgttttacggtagttaagcacgctatcgttcagcgtcaggttgaggttatcgccattgctcatattgaagttcaggctgatatttttacccgcggctttcgcgctatcgaggcgaacggacataaagtcgaacagcatttcgaccgacatcccgcgaatggtgtccggggaaccggtggtgccgtggctgaacttatgcaccccttcgcgcagctctttcgcgccggtcaggtagaaaccgcgccaggtggcggactcggcctgatagcccagctgttcaaagttattcgcttgcagattcttcgcgacctggtcacccgggttggcggcaatcacctgtttcagcagttctgccgaccagcggtaatcaccttgcttgttcgcttcttgcgccaggttgatgacacgggcagaaccgcccagcgcctgcacgtaacgtttacccatctccacctgaccatacggatgcaggttagccgggttaccgtcgtaatagccaagatagaagttatacaccgcgcgggcgttgtggctgacagaaccgtaatagccacggctggcccagttattggcaagtgcaggcggcagtttaatcatgtcgccgatttcattcatggtgtagccctggttcgccaggtgcagggtctggtcgtgaatgtacttgatagtatcgcgatatttaccaatataatcattgatatgcttattgccccagaccggccaggtgtgcggcataaacaggacttccgcgtcgttaccccacatatccagcgtttcgttcagatactcggtccacttgctggtgtcgcgggttttcgcgccgcgcagagtgtagaagttgtgcagggtatgcgtggcgttctcggcggtacacagcgctttcagggccggaatatagaagtgcatttcggctggtgcttcgctacctggggtcatcaggaagtcaaactccaggccgtcgataatcatcttctcaccggttttggtgatggttttgttcggtgcgatgatgctcgggtagcccgatgccagcgttacgccaagaccattgccgatgttaccctgagggttatgcgccagcagcaggccgtaggagtaaagtgcacggcggctcataatattacccgccagtacgttttcgctgatggcttcgtccataaagccagcaggggcgataacctgcactttaccggatttcacatcggcttcagagataatgcctttcacgccgccatagtggtcggtatggctgtgggtataaataaccgcaacaatcggtttttgcgggcgattttggaagtaaaggtcaagggcggcttttgcgctcggtggcgtcaccagcgggtcgatgacaataatcccggtatcaccttcgataaaggtgatgttggagatatcctgaccgcgaacctggtacattctgtcggtgactttaaacaagccggaaataccgtttaactgcgactgacgccacaggctagggttaacggtttcgggcgcgggcgcattgatatcaaatttataatcttccccgcgataatatggtttgccattagcatcgcgcagaataccttcatccagcagcggagcgataaatccacgctgagcgtcgtcaaaatcctgacgatcgctaaacggtaatgatttggcgtaattctgattaacctgttgggtatattgagtggcggctttcgcttcatctgttgcgtaagcggtatttaccatcatgccgctggcggcagttaacgcaataacaattctgctcaaacggaataaccgagagttattcatataaatctccatttatcatttatgtcgtaaatatgtaatccatgcaaaatacgtcatttaaagctggggttatcataattgggaatttgcgactttaataagtggaagtgtgagcggaacgatccattttattaggcatttgtgctgaagggggaaaattacgcgaatttattatctctgtaaataatatgaggtgttttatatatttattatatatattgtacttcggcaaatactgagcacaatttatcaatgcaaccggtgtttctttttaaaaaacgtaccggagcaatgggcggtcatgtcgctggcaccgcaggattctgcgttgctgtgccagccttttattcatggtcaatgagtgaggtgattgataaagacaccaggtcgtcagagcgcactgattatccgcattatgccagtgaagttgcactggcttttggttcacgagtggttggcctcgaactggcaaaaatgattgtggatgcgtggctgggcgcacagtacgaaggcggtcgtcatcaacaacgcgtggaggcgattacggcaatagagcagcggagaaattgagattcatccactacttgcatggatgagtaatgactaatgtggatagagtttctttttgaggttggctaatgaaacgctttccgctatttcttttattcaccctgctcacgctgtccaccgttccggcccaggctgatattatcgacgatactattggtaatattcagcaggcgattaatgacgcttataaccctgaccgtgggcgagactatgaagattcgcgcgacgacggctggcagcgtgaagtgagcgacgatcggcgcagacaatatgacgaccgccgccgccagtttgaagatcgccgcaggcagctggacgatcgccagcgccagcttgatcaggagcgtcggcaactggaggatgaagagcggagaatggaagatgagtatgggcgatgaggttgggtatggagcaggcatcgcccctcaccccaatggggagagggagaaaacgagcgcaatattcaatattgagcacaatcggtcccctcgcccctctggggagagggttagggtgagggggccagcgcgcacattccctctcatcacgccaccccaatctccatcccatcaaaccccacctcaaaccctgacggtagtgcgttttccatcagccacgcatcaaactggtggctgatatgggtcagaatcacctgtggcgagcggataacctgattcagcgcaagcacggtatttaaatcacagtgattacgcggtgcatccgcgcgcggcgggtgactgcaatcaatcaccatcacctgcggatgattattgagtaaaaatttcagcgttttttccggcaggccagcggtgtcagacagccacgccacccggctatgtgccgtttccagcagataaccgaaggtcagttttgagtggttaagcggcagcggcgtgacctgcaacccctgcaaatcaaacaccacaaacggttccactgtgtggctgaaatcaagcaggcccggatgtttaaacagatcgtcgcagccctgttcatccggcgggccgtagaccgggatcacatcgcccacgccccagcgtagcggaaatagcccttggacgtgatccatatggtagtgcgtcagcaaaaactgctggaacgatccaggcgaccagcgatcggtgagatcgtgccgcccggcgtcgatcagggtgatcgcgtcgttaaacttcactacgccgctgcatggctggcggcgatactgcggcgagcgccgcgctctggcgcaggccgcgcactcgcagccccatgccggaacgccctgtgcgccgccagtgccggtgagcgtgagggtcaggctcatgttacagcgccttggtgaagcggaagtggctctgctcgtagccttcacgcaggtaaaaacggtgtgcgtcgtggcgcttcacgttggtggaaagctcggtcatttcggccccggcctggcgggcttcttcttctgcccatgccagtaatttactgccgacgttcagaccgcgcgcctgcggcatcaccaccagttcctgaatttcgccgatccagttgacatgatgcagatgaaactgcaaatgcaggccgatcatgccgacaacttcgccatccagcagcgccagatggtagcgcatgtttgggtcgcgcaggttggcgttaaagcccacgcgaaacgcatggtggtcaaactccgcctgttttagctcacaaatcagcgcgtaaaccgcgtcggtatcgtactgcgtggccgggcgaagctcacaagcaggcatggtgtttctccttctgatggatcagcgtcagcagcgtgtcgaccgactggcgcaggctgccgtcattgttgagcgtatggcaatcctgtggagtatagcgggcggcgcgcgccaggcgggcgttaatttcactggcgttttcacggccacggttttccaggcgctggcgcaggatctccggcgaaacctgtaaacagacgggcagcagcgccgattgatagcgcgcccgtgcctgcggcaaatgcgcgcgtgaaccgttgacgactacgtcgaatccagcgtgcagccagaggtcaatctcgatgccgacgccataatacagaccgttagcgtgccagcttaaggccagcaggttttgccccgcgcgggtaaaaaactcccgctcactcagggcgatatggttttcacttccggcgctggcgtcgcgcgtgatgtagcgatgcgccaccagtaactgcgtttgttcccgcaggcggagttccgccagcaggctgtctttcccggagccggacggccccattaaccaaatcagttttcccatcatcagaacacccttttaccctgacgccagacgtggtcgatatgaatgtgattgccctggcgatgcgccagcaccaggtcagcgcgtttaccctcgccaatcaccccgcgatcctgaagattcagcgcctgcgccggatttttggtcaccagcctcaccgcctgcggtagcgtaaagcggttgctctcgtcatcggcgacgcggaacgccgcatccagcaggctggcggggtagtagtcggaagagaggatatccagcagaccaagctgcgccagttcactggccgccacattgccggagtgcgagccgccacgcacgatatttggcgcacccatcagcacgttcatgccatgcttacgcgaggcttccgccgcttcgaacgtggtgggaaattcggcgatcacgctgccaagttggtgggattcggcaacgtgggcgtgcgtggcgtcatcgtggctggcgagcgcaatttgtcgcgcgtggcacagggcggcgatggattcgcgattcggctgcgaccagcgtgcggcgagcgccaattgctcttcttcgtactgctgcatctgcgcatcggtgagggagtatttgccctgataatattcgcgatacttctcgcggttagcgaactggcgctggcccggtgagtggtccatcagcgacaccagcgtcaccggttcgcgctgaaccagtttttcaaacagcggcagtgtggtgtgatgcggcagttcgcagcgcaggtgcaggcggtgctcggcgcggttgacgccgcgtttttgcgtctcttcgatggcgttgatcatcttctccagattctccagccgatcgccgccgtcgcgcacgtcgccaatcgccacggcgtccagtacggtggtgatgccgcttgccaccatcagcgcgtcgtggctgctcatcgccgaatgggcgggccagtcgactttcgggcgcggggtgaagaatttatcgaggttgtcggtatgcagctcaatcaggccgggtagtagccagccaccttcgccgtccatcgcttctggcaggcggctctggctttcggcaaaggcgcggatttcgccatcctgcacctccagcgaaccgtgtaccacttcgttttccagcaccagtttgacgttattgataatcatgcagaggctcccattgggtgcaagcggtcggcgacgtcattacgtacggcttcgtcatggaagatgccgacgatggccgcgccacgggttttggcttcgcgaatcagctcgactacggcggcgctgtttttggcgtccagcgaggcggtaggttcgtcgagcagcagaatggggtagtcgacgataaagccgcgggcgatgttgacgcgctgctgttcgccaccggaaaaggttgatggcgccaggtgccacaggcgttccggcacgttcaggcgggtgagcagacgcgcggctttagcggcgcaggcttcacgcggaacgccggtatcgagcagcggctgcatcaccacttccagtgctgaaatacgcgggatgacgcgcagaaactggctcacccagccgacggtggttttgcggatctccaccactttgcgcgctggcgcggtgaccagatcgacccattcgtcaccgtgtttgatctggatttgcccttcgtcgggcagatagttggcgtacagcgagcgcagcaaggttgatttgccgctgccggaatggccgtggagcaccacgcattcgcccgcgttgacggtgagcgaggcacgttgtaagacgggcaggcgcacgccgttttgctggtgcaggatgaaggttttactgacgttttgtacgttaatcatttttcgcctcgtggttcgcatattggggagcggtgcgcgcattgcccctcaccctaaccctctccccgaaggggcgaggggaccgattgtgcgcggtgttgaatattgcgccggttttctccctctccctccgggagagggccgggntgaggggatcagcgcgcacggtgttgcattcaattctgcaaaaccgatgacaccagcagttgtgtatacggatggtgcgggtcgtcgagcacgcggtcggttaacccactctccaccacttgcccctgcttcatcaccagcaaacggtccgccagcaggcgggcgacgcctaaatcgtgggtgacaatcactaccgcgaggttcagctccaccaccaggccgcgcagcaggtcgagcaggcgtgcctgtaccgacacatccagtccgccggtcggctcgtccataaacaccagcttcggatgcgtcaccaggttgcgggcgatctgcaaacgttgctgcatgccgccggaaaaggtggtcggcaggtcgtcgatccggttggcgggaatttccacctcttccagccacttctgcgcggtggcacgaatatcgccgtaatgacgtgccccggtcgccatcagccgctcgccgatattgccgcctgccgacacctggcggcgcaggccgtcgagcggatgctgatgcactacaccccattcggtgcgcagcaggcgacggcggtcggcctcgctcattgcgtacagcgaacggctctcatagtgaatctccccctgctgcggcgtcaggcgcgcggagattgatttcagcagcgtggtcttcccggagccggactccccgacaatgcccagcacttctcccggccataaatcaaaagagacatcgctaaagcctttgcccggcgcgtaaaggtgggtcaggttattgaccgaaagtaacggtttattcattggcttttcgcctcgctctgttggcggcaataatcggtatcggagcagacaaacatgcggtttccggcgtcatccagcaccacttcatcaagatagctgtgggtcgatccgcagatggcgcatggctcatcccactgctgaacggtgaacgggtgatcgtcgaaatcgagactttccacgcgggtaaacggcggcaccgcatagatgcgcttctcgcgccctgcgccgaacagctgcagggcgggcatcatgtccatttttgggttatcgaatttcgggatcggcgacgggtccattacgtagcgcccgttcaccttcaccggataggcgtaggtagtggcgatatgaccgaagcgggcgatatcttcatacagtttcacctgcatcacgccgtactcttccagcgcgtgcatggtgcgggtttccgtttcgcgcggctcgataaagcgcagcggttccgggattggcacctggaagataatgatctgatcttcggtcagcggcgtttcggggatgcggtgacgcgtctggataagcgtcgcatcgtccgtacgttcagtggtgtttaccccggtcacgcgcttaaagaagttgcgaatcgacacggcgttggtggtgtcatccgcaccctggtcaatcaccttcagcacgtcgctttcgccaatcacgctggcggtgagctgtatgccgccggttccccagccgtatggcatcggcatctcgcgcccgccaaacggcacctgataaccggggatcgccaccgcttttaagatagcgcggcggatcatgcgtttggtctgctcgtcgaggtaggcaaagttgtagccgctcagattagccatggttcttctcctgttgcagacgtttgagtagctccagttcggcctggaaatcgacgtagtgggggagtttgaggtgcgagacaaagcctgcggcttcgacgttgtcggcatgtgccagcacaaactcttcatcctgcgccgggcctgtcgcgtgctcgccgtattccggggcttgcaacgcacggtcaaccagcgccattgccatcgctttgcgctcgctcatgccgaataccagcccgtagccgcgcgtgaagtgcggcggctcatccggcgggtcgataaaaccgttgaccatttcacattcggtcatcagcagttcgccgacgttcaccgcaaatcccagctcttccggcacaatcgacacgtcgatgtaaccactgcggatctcgcccgcgaacgggtgattgcgcccgtaaccgcgttgggtggagtaggccagcgccagcaaatagccttcgtcgccgcgcatcaactgctgcaaacgggaagaacgtgagcaggggtaaaccggcggcgtgcgggtgatatcatccggctgtgcgccgctatcctcttcaaacttcgccagcccctgacgcgccagcaggctgaaaacgtgcggcgacggctgttgttcgctgtcggcggtggtcagcgtcggcgcttcaccgtttgccagcagggtgaaatcgagcaggcgatgggtgtagtcgtaggttgggccaagcagctggccgccgggaatgtctttataaaccgccgaaatacgccgttcgagacgcatctctgtggtgtcgagcggctcgcttaccgcgagcttcgccagcgtggtgcggtaggcgcgcagcaggaaaattgcttcgacgttatcgccgctggcctgtttcagcgccagcgccgccagttcgcggtcggcaatgccgccttcggtcatcacgcgatccaccgcaagattaagctgctgttcaatctgggcgacgctcagttcaggcaaatcggtatcgccccggcgtcggctctcttgcagggcgtgagcggcgtcgatcgcctcctcgccccctttcacggcaacgtacatcagcacacctccacatgagtggttcgcggaatagccagcaggcgctcgccgcaggtcaggatcaggtcgatgccgagcgggaacgggtgcgggcgctcggtgagttcgtgcagaatgcactccggcagctgcggagcgatcattcgttcttcggcaatgcccgcgccggtgagacgtaacatgcgcccgccgctcaggctggcgacctgtaaaatcagcgttgcacccgcttccggcgcaacggcggtgccggtggaaagggcgttaagctgttcgctggaaatcgcctcatccgtcaccgcgaaggtcgcctgttccggctggctgaccagcggcgcgttggtatgaaaacgcaggctctggctgacgatatcgttactcaatggcgcggcaagccacaccggcgtgtcgttatcggccagcgtcagcagcacgctggtggtggcgatattcagcggctgccagccgcgcttgagctgatgcagggcgacaatcacgcccggctcgctcatggcctttaacaggcgacgaaaactgtgctgggcatcctgcacgggaagcataaaagcggtttccagggtcatgcgttgtctccgcgaaccatcgtaaagaagtcgacccggctggcgttcacttcggcctggcgtgcggcaatgcgtgccatacggtcagcgtccagcggggcaataagggtttctgataagttttgaaaatagcgagattgctgcatcagcgcgtcaatcagcgcgcagcgttcggcgtgctgtttgtcgcgccccagcacccagctgtagccgagcgtgccgtcagtcaggcgtacggcggcgcgggtgagcgtggcgtcgccggcaaaaaagcgttcgccggtgccgcccatccgcgcctgaatctgcaccaggccggtttcggcggcgcggataacctcatagtcggcggtgatgttcagcgcgttcaggcgggctgccagttcagccggttggctgtgcgccagtacggacatccagtgctggcgggtcgcggtatctgcgtgcattcagtgctccatagtgaattcaatcatgtcggcgcgcgtcaggctgacggagtactccgccgggctgctttcaccgtcacggtggttaagggtgcgcacgcacagcagcggcgacatattcggaatttcaagacgctggcactctttggcctgggcgcgacgggcgctgatccgcgtctggctgcggcgcagcgcaattccggtttgctcgcgcagaaaatcgtgcagcgaaccgctgtcgaagcgttgcagcgtcggccaaagggtgaggtccgcaaagtagtggtcgattaaacagagcgcgacgccgttgacgcgacgcagggtgcgcaaatggataacgttctcgccctcggtaatccccagcgcgtcagcgacgtgaccggacgcggggcgcaataccgacagcagtttttcgctggtgggatggctaccctggtccagcaggttctggctaaaacgcgcctgggcgttgagcgggtaatcgaacgggcgcatcagcaccagcacgccgacgccctgacggcgctgtacccagcctttttccaccagttggtcgatggcgcggcgcagggtgtggcggttcacctcaaagcgcgccgccagttgctgctcggcgggaagatagtcgccgcagcggtagtgttgacgaagctcctgctcaagttttgcggctatctcctgatagcgtgttgggtagctggtcggatgtgtagacaagtgcatagatatcaatgcctcgcttatcagataaagtgcttacgcaaccgttgagagaggaaatccagcaggctgaccgtgacgatgataagcaccatcagggcgcaggtttgttggaactggaaaccgcgaatcgcttcccacagggtgacgccgatcccgcctgcaccgaccatgccgacgacggtcgccgagcggacgttggattcgaagcgatagagggagtaggagatcagcagcggcatcacctgcggcagcacgccgtagaggatctcttcgagcttgttggcgccggtggcgcgaatgccttccaccgggccgggttcaatcgcttccaccgcttcggaaagcagtttggagagcacgccggtggtgtggataaacagcgccagcacgccagcgaacgggccgaggccgacggcgaccacgaacagcatggcgaagaccatttcgttaatggcgcggcaggcgtccatcaggcggcgaacggsctggtaaacccaccacggcaccaggttttcggcgctcatcaggccgaaggggatggagagaaccaccgccagcgccgtgccccagacggcgatttgcagcgtgacggccatttcggtgaggtaatcctgccactggctgaaatcgggcgggaagaagtcggcggcgaacgtcgccatgttgccgccgtctttaatcagcgtgagcggggccatttccgcgccctgccacgagacgaccaacacggcgagaacaacggcccagctcagaagcgagaaccagctacgcttgggtggggcgatggtgatggtttgcatgtttggctccggtctgtaggccggataaggtgcttgcaccgcatccggcatcaacgcctgcacattgtcggatgcgacgccggggcgtcttatccgacctacgatttactgcaccgctttactcaccgaactcatcgcgcttaacgcgttgttcaggcggtccaggtcatccagctgcgcctgaatctcggtggtttttgccagcttgtcctgctcattcagtcctttattgcttttcacgccctgcatctctttaaacagcgcgagctggcgaatcggcaccagttgcaggtcgctggaagcgcggaacggcgcccagcccaggcgttccagcaccgctttttcttccggcgttttgccgtagttcataaagaagtcgtagatcttgtctttggtggtttcggaaaggtttttacgccagacgatcggatcgcctgggatcagcggcgacttccagatcaccttcagttctttcagcttctctggcgcggaggttttcagcttgtcgaggttttcggtgttgttggtggcaacatccacctgcttgttggcgacggccagcgcgttggtttcatgcccagcgttgacggtgcgcttaaagtcgctggcggagatattgtttttggcaaagacgtagtaaccggggacgaggaagccagaggtggagttaggatcgccattgccgaaggtgagatctttccgcttcgccagcagatcgttcaggttgttgatcggactatctttgttgacgatcaacacgctccagtaacctggcgatccatccgccgcgaccgtctgggcgaagacctggccgttggcgcgatccaccgcttccattgccgacaggttgccgtaccaggcgatatccactttattgaagcgcattccctggataatgcctgcgtagtctggggcaaagaaggcgttcaccttcacgcccagcttcttctccatatcctgtaagaatggcgtccattgcggtttaaggttttgctgtgattccgttgaaataatgccgaaattcagcgccttttcctgctcttcggcgtgtgccgggcttaacagggtgctgaggctgaacatgctggtgaaggccagcgaggcaattatcttagcgttcattcgttttcctcaatgatggggatgtcaggcagctttcgcgttctcttcgatgcgattaatgctgcggtagagatggtcaaaacgttcgttatcaaactgttggctgctgccgtcgtagaaaacgtgcccctggcgcagggcgacgatgcgttcgcagtagcgcagggcgtaatccacctgatgcagcgtgacgaccacggtgatgccgtcgttctgattgatgtcgcgcagggtgtccatcacgatgcgggcggattccgggtccagcgaggcgatgggttcatcggccagaatcaccttcgcctgctgcatcagcgcgcgggcaatcgccacacgctgctgctgtccgccggagagggtggaaacgcgctgatgggcaaaatgcaccatgccaacgcgggtcagcgcctgtaacgcgcgctgtttctgctcgccggtgaaccagctaaaacaggtgcgccagaacggcgtgctgccgagcgcgccaatcagcacgttctccagtacgctcaggcggttcaccaggttgaattgttggaagatgtagccggtgttggcgcggcttttgcggatatcgcgcgccagacggccttcgcgctggactgtgcggcccagcagctcgatatggctgccggcggatttatcgccggtaatcaaaccgcttaagtgacgtaaaagggtggatttgccggaacccgacggcccaagcagagccaccatttcaccgtgatgaatgttcagatcaaccgcatgcagcgcctgatgctgattgaaggttttggcgagcttctcgacacggataatcgtttgcatgatgcagcctccctaaaaaagtggctccatcgtggcggattattgtgacgatttggttaattaaaagtgactaacagatgaagagttaacgggaattcgatgacagtgcgggagggcgggcctcccggcggattattgcgttggttgttgtttgacgacattaatcatccacggtacgccaaatttatcggtgactttgccaaagccatgcgcccagaaagtttcctgccaggccatttcgatttttccgttagcggcaagattgtcaaaccagcgttttccttcttcgacctgttgcgaatcgagcaccagcgtaaagccggagtagctggcttttcctgacggcatggcatcgctcatcatgatgtcgcttccggcaatgcgcacgttggcatgagcgatggcggtatcgggaaattgcattccggaagggcagttctcggcgctgtcctgcgctgattttggcatttcgccgaagctgattttatagagcagttcagcgcccaacgtacgttgataataagcaattgcgtcggcacagttaccggcaaaagagaggtagggacttaacggcatgatggtgacctcagttaagagaagccagttaagtgtagttcgaaatttatacagatgagagggaagcctgataagacgcggtcagcgtcgcatcaggcagtcggcatcgttgccggatgcggcgcgagcgccttatccggcttaccgatcacaatacaatcagttctttttcacaaactcagatttcagtttcatcggaccaaaaccgtcgattttgcaatcgatgttatggtcgccttcaaccaggcggatgtttttcactttggtgccaattttcagcatcgaagagctacctttcaccttcagatctttaatgatggtaacgctgtcgccgtcagccagcagattgccgttagcatctttaacgatcagctcgtcgctttcctgtgcaggttctgcgtcgttccattcgtaggcacattccgggcagatgtacatgccgttatcttcgtaagtgtattcggagttgcattttgggcagtgtggtaatgacatgtggatttcctcaaaagtcagcagggcaaaagcgccaaaaaacggcagattgccgaaaaaggccgcaattatacacaaaatccctgagtttgtcgggggtactgctgattttagacgacgatcgttttcatttgaaaggaaacgcaaaaagaaaataatctttttgcctctatttattatttaagataatgttaatgctctacttgttcttttttttattcacatgatatttttatctttctgacgttttaaacgtatcagaagacgttatttattctgataaaaaacaacacactaaatataaaattatttcttgcagtaattataaaagccgaaaacagaactcaaaaacaatctggctaaataaaagtaacaaaatttgctttaaggaagaattttctatgtacacacagaccctgtatgagttaagtcaggaggctgaacgcctgttacagctttctcgccaacagttgcagttactggaaaaaatgcctctctctgtacccggagacgacgcgccacaactggctttaccctggagtcagcctaatatcgccgaacgtcacgcgatgctgaataatgagttgcgtaaaatttcccgactggaaatggtgctggcaattgtcggtaccatgaaagcagggaaatcaaccaccattaatgccattgttggtacggaggttctgcctaatcgtaatcgcccaatgactgcgctgccgacgcttattcgccatacgcccgggcaaaaggaaccggtactgcatttttcacatgtcgcgccaatcgattgtttaattcaacaattacaacagcgcctgcgtgattgcgatattaagcatctgaccgatgtgctggaaatagataaagatatgcgtgcgcttatgcagcggatcgaaaatggcgtcgctttcgaaaaatattatctgggtgcccagcctatttttcattgtctgaaaagtttgaatgatttagtgcgactggcgaaggcgctggacgtcgattttcctttttctgcttacgccgccattgagcatattcccgtgattgaagtggagtttgtccatctggcggggctggagagttatcccggtcagttgacgttactggatacccccgggccaaatgaagccgggcaaccgcatctgcaaaaaatgcttaaccagcagctggcacgcgcctcggcggtactggcggtgctggattatacgcaactgaaatcgatctccgatgaagaggtccgtgaggcgattttggcggtggggcaatcggtgccgctgtatgtgctggtcaataagttcgatcaacaggatcgtaacagtgacgacgccgaccaggtgcgggcactgatttccgggacgctgatgaaaggctgtattacgccacagcagatatttccggtgtcgtcgatgtggggctacctggcgaatcgggcgcgccatgagttagccaacaacggtaagttaccagcgccagagcaacaacgctgggtggaagattttgcccatgccgcgctcggcaggcgctggcgtcatgccgatctggcggacctcgaacatattcgtcatgctgccgatcagttgtgggaagattcgctgttcgcccagccaattcaggcgttgcttcatgccgcttacgctaacgcctcgttgtatgctttgcgatctgctgcgcataaactgttgaattacgcgcagcaggcgcgggaatacctggattttcgtgcgcacgggttaaacgtcgcttgtgaacaattgcggcaaaatatccatcaggtcgaagaaagtttgcagctattgcaactcaatcaggcgcaggtgagcggcgaggttaaacatgaaatcgagctggccctgacctccgccaaccactttctgcgtcaacagcaagatgcgctgaatgcgcagttagccgccttgtttcaggatgattcggagccgttaagcgagattcgtacctgctgtgagacactgttacagacggcgcagaacaccatcagtcgcgactttacgctgcgttttgccgagcttgaatccaccctttgccgggtgttaaccgatgttattcggcccattgagcaacaagtcaaaatggaattgagcgagtcagggtttcgtcctgggtttcattttcctgtttttcacggcgtagttccccacttcaacactcgccagctgttcagtgaagtcatttcgcgccaggaagcaacggacgagcagagcacgcgtttaggcgttgtgcgtgagactttttcgcgctggttgaatcagcccgactggggacggggaaatgagaaatccccgacagaaacggttgattacagtgtgttgcaacgagctttaagcgcagaagtcgatctttattgccaacaaatggctaaagttctggcagagcaggtcgatgaatctgttacggcaggcatgaatacttttttcgctgagttcgcttcatgtttgacggaattacagacgcgtttacgcgaaagtctggctctgcgtcaacaaaatgaatcggtggtcaggctgatgcagcagcaattgcagcagactgtgatgactcacggctggatttacaccgacgcccagctgttacgcgatgatattcaaacacttttcacggcagaacgatattgaccaagacgttacttgacggccccggtcgcgtgctggagtcggtttatccccgctttttagtggatctggcgcagggcgatgatgcccgccttccacaagcccatcagcagcagtttcgtgaacgactgatgcaggaacttcttgcgcgcgtgcagcttcagacatggacgaacggcggcatgttaaatgcgccgcttagcctgcgtctgacattggtggaaaaactggcgtcgatgctggatcccggtcatctggcactgacgcagatcgcgcagcatctggcgctgctgcaaaaaatggatcaccgccagcactctgctttcccggagctcccccagcaaattgccgccttgtatgagtggttttcagcccgttgtcgctggaaggaaaaggcattaacgcaacgaggcctactggtgcaggcgggtgaacagagcgagcaaatttttacccgctggcgtgctggggcgtataacgcctggtcgttgcctgggcgctgttttatcgttctcgaagagttgcgttggggggcatttggcgatgcctgtcgtctgggaagcccgcaagcggtggcgttgttgctgggtgatttgcgcgtgaaagcgacacaacatctggcagagagtatcaatgcggccccgaccacgcgtcactattaccatcagtggtttgcctcttcgaccgttccgacgggcggggatcatgctgattttttaagttggctgggaaagtggaccacggcagataaacaacccgtttgctggtcagtgacccaacgctggcaaactgtcgcgctggggatgccacgactctgttcagcgcagcgtctggcgggggcaatggtcgaggaaatcttctctgtaaatttggcgtaaataatcagttacatcaatgagtcctaaacgaaatccatgtgtgaagttgatcacaaatttaaacactggtagggtaaaaaggtcattaactgcccaattcaggcgtcaactggtttgattgtacattccttaaccggagggtgtaagcaaacccgctacgcttgttacagagattgcatcctgcaattcccgctccccttttgcggccgtcgcgctgatttttctggcgtttgcggaaatgggccaactctgcgaggaaagctatgctgaaaaggaaaaaagtaaaaccgattacccttcgtgatgtcaccattattgatgacggtaaactgcgtaaagccattaccgcagcatcactgggtaatgcaatggaatggtttgattttggtgtttatggttttgttgcttacgcattaggtaaagtttttttcccgggggctgaccccagcgtgcagatggttgctgcacttgccacgttctccgttccctttctgattcgaccgcttggcggactcttctttggtatgttgggcgataaatatggtcgccagaagatcctcgctatcactattgtgattatgtcgatcagtacgttctgtattggcttaataccgtcctacgacacgattggtatttgggcaccgattctgctgttgatctgtaagatggcacaaggtttctcggtcggcggtgaatataccggggcgtcgatatttgttgcggaatactcccctgaccgtaaacgtggctttatgggcagctggctggactttggttctattgccgggtttgtgctgggtgctggcgtagtggtgttaatttcgaccattgtcggcgaagcgaacttcctcgactggggctggcgtattccgttctttattgctctgccgttagggattatcgggctttacctgcgccatgcgctggaagaaactccggcgttccagcagcatgtcgataaactggaacagggcgaccgcgaaggtttgcaggatggcccgaaagtctcgtttaaagagattgccaccaaacactggcgcagcctgttgacatgtattggtctggtaattgccaccaacgtgacttactacatgttgctgacctatatgccgagttatttgtcgcataacctgcattactccgaagaccacggggtgctgattattatcgccattatgatcggtatgctgtttgtccagccggtgatgggcttgctgagtgaccgttttggccgtcgtccgtttgtgctacttggtagtgttgccctgtttgtgttggcgatcccggcgtttattctgattaacagtaacgtcatcggcctgatttttgccgggttactgatgctggcggtgatccttaactgctttacgggcgttatggcttctaccttgccagcgatgttcccgacgcatatccgttacagcgcgctggcggcggcatttaatatttcggtgctggttgccggtctgacgccaacactggcggcctggctggtcgaaagctcgcagaatctgatgatgcctgcctattacctgatggtagtggcggtgattggtttaatcaccggcgtaaccatgaaagagacggcaaatcgtccgttgaaaggtgcgacaccggcggcgtcagatatacaggaagcgaaggaaattctcgtcgagcattacgataatatcgagcagaaaatcgataatattgaccacgagattgccgatttgcaggcgaaacgtacccgcctggtgcagcaacatccgcgaattgatgaataagctgaaacggatggcctgatgtgacgctgtcttatcaggccaattgaactcttaaggttcacttaatctctgacgcgcatactctcctccaggttaacggaggagagtgcaatgaaaaaccgtgtttatgaaagtttaactaccgtgttcagcgtgctggtggtcagcagctttctttatatctggtttgccacgttctgatctttcttcagccgtacccaggcccgcgtgccggaagtctcttgccggttttgcaggaaaaactgcccgtgatgcaactgtgtaatgcggctgacaatacttaaccccagaccaatcccgccataacggctgtccatacgtacaaacgctttactcaactccccgcatttactctcatcaatacctggtccttcatcttcaactgccatgaccgctccgccatcttcttgcagcttaatcataatgttgctgccttgcgggctgtaacgatgggcgttttctaccaggtttcgcaataacatccgcagcagggttgcatcaccctgaacggtgatgtcggcggcgctctctggcaatagcagggtttgctgtcgctggtcgagcatggtactgagttcgtcatacgaggggagaatgacatcttccagcagttttacatgttgataattaccggaagaaaatgactgtccggcacgcgccagttgcagcagctgggagacgctctccatcatctgatcaagccgtgccactaacggtgctacatcaatgtgatgcgttttcgccagcagttccagatgcaaacgcacccagccagtggcgttcgcagttcgtgcgcgacgtcagcggtaaacaacctttcgttatccagcgtgctggtcaggcgactgaccagatcgttcaacgccgaaaccaccgcttcgatttcgagggtggcgctgtgaatggcaatgggcgttaagttgtcggcggtgcgcgcttccagctcttttgcagctccgccagcgggcgggtgatgcggcgtaccgcctgatagcagataaatagcgtcaggctgaccataaacacgccggggacaatcaggctggcgaccgcctcgcggatctcacgcatgatgtggcgatcgttgttgcgattgtcgcgtagcgcctgctcaaacagctgaatctgctcggtactttcatgccatagccagaagacgctgatcagctcaaacaccaacaaaatggccccgatggtcaatatcagccgttggcgcagcgatattggtcggcgcagaaaatgcatcagattcaattagttttcctcattcgcgaccagcatatagccaaagccgcgcacggtgcggatacgggctttgcccactttgtcgcgcagattgtggatatgcacttccagggtgttggtcgagggttcattgtcccagttatagatgtcgttgtagagaatttcccgatgcaccggactgcctgctttgagcattaaccgtgacagcagagcatattctttgggcgtcagaatcaactcttcaccgcccatccatacctgacggcgacccatattcagcgtcagattgccaacaatcagctcactttcgccctgattattatggcgtcgtagcagggcgcggatacgggcgtgtaactcttccagcgcaaaaggcttcaccagatagtcatcggcaccgacatccagcccggcgattttgtcggtcagcgtatcgcgagcggtgaggatcagtaccggcagggtatattttttctgccggatacgggcgagaaaatgcagtccatcttcgtcgggtaaccctaaatccagtaccaccaggctgtaatgaccggcctcaaggctttgttccgccatccgcgcggttgtcacgccatcgcacgcgtagccttcagtttgcgccgccagaatcaatccctgcaataacagcgtatcgtcttcaacaatcagaattttcattcactcactctcctgcaagtttgcagaatatcatccgcagcctggtaatacttcgtctcaacgccagttaatcccaatagcgtggagaataaattgtcttgtgaatagtgttgcgtttgcgcctgtttttgcaggcagttctggtcaacctgataccgtttttgataatcctccgacagccacagcagcatcggcacctgtttttggctatccggggcgatggcataaggcagaccgtgcagatagatgccattttcacctaacgattcaccgtggtcagaaagataaaccaggctggtggtaaatttatcctgatgttctttcagcagattaatcgctttatcaacaatatagtcgacgtaaaccagcgtgttgtcgtaagtgttcaccagttgctctttgctacaggtctggatctcattggtgtcgcaggttggggtaaatttcctgaactgcggcggatagcggttgtaataggtcggaccgtggctgccgatggtgtgtaagacaatcacgccatcaccctgcaggttattgatgtactcttccagcccgtggaacagtacttcgtcatagcattcgccgttgatgcactgaccaggcagattcagcgcggtgacgttctggtgaggcacgcggtcgcaggcacctttacagccgccatcgttgtcattccacagcacgttgatgcccgctcgctgaatgatatccagcacgccttcctggtgctgtgccagctcttctttgtaatgctcacgcggcatatccgagaacatgcacggtactgaaactgccgttgccgtgccgcaagatgcggtattagggaaatagaccacgttatctttcgccagccgcgggttagtttcacgcgggtagccgttgagggagaagttctccgcccgcgaggtttcgccgacaatcaggatggtcaaatttttacgtttttcgttctgcattaacgggttgcggtgggcgtcttcaccaattcgcaccagcggtagatttgccagtcgctgatgggagtaccatgaccagctggcaacaatgctgttagaggggcttaaggatttcaccagctctttgttattgcggaacaacgaggcgtagtctttataaaacagtgcggcgaccagcaaaatcagtagtacagaaaccagaatattggctccacggaaaagaacactgcgcagacgcgaggtggcaggtttgatttttatccagcaggcaatcagcgcagcaagcacgccgctgaatcccagcgttaataacatttgcggtgtcatcagcgcataactttctgccggagtggtatcaataatattggcaatcatcgagcggtcgatgacgatgccgtaagtcattatgaaatattgtgcagccgcgccaaccagaataaacaggcaggccagtggtcgattaagccataagaaagagcttagtgtcaggacaatattaatcacgctgaaagcgacgaccggcatcgacaagaaaaccagtacgttatgcagcgaatccagcggcagcgcctgcaacacctgtttaaaaaaggcaatattcaggcagatagagatataaaaagcggccaacaatagccaggcgagtaaattcaaagagggtctttttagtaggcgcttcaacatcacggtgtttccatcgaacaaagtgcgcatatgctcgcaaagcaaaattaagccaaccttaagttcttaaggttggcttttatgtttgctggattaaggggaattaatctttgcttattggtgcatctaagggatacgggtttttatgtagccggttgtaattcagcgcatacatggcggtgatgaccatcagggtgacaaatgaccacataacctctttcgctccggaccccaccacggcccagatgcagtagaggaaggcaatggtagtaactgccagatatgccgggcgtgctttaccaaagtgaccgtgtccgagcagcagtaacgccgcacaggtgtaaagatatggcaccagtgtaaagatgaccgagacggaagaaaccagaccgaactctttggtcgcgtttggtgaaatgctgctgagctggaagatggtcatcaaaataccgacgataatcagccccgccactggcgtacccgctttatttacacgggcaaaaattggtgggaacagtccgtcatcggcagcggctttcgccgtttgacccgccagcaacgtccagccgcccagtgaacctaagcaacccgcagctgcgcagaaggaaacaatggccccggcggtgtcacccaacgccatccgtgcggcatcaccgaatggcgaagcagaaacgcgcagtgcggcattagggatcatccccataatcgcggtggtagaaagtacatagcaaacggcggcaatcaataccccaccaatggtggcgatagggacattgcgtttcgggtttttcaccacacctgcggcaacggaggcactttccacaccgatgaacgaccacagcgtaacgttaagggtactttgaattgcaccgaaggtgcccaggccgctgacgttccatgccgccatataggtttcaccacggaaccagaaccagccaaatacggcaatcccgacgatggggatcagcgccagcacggtggcaactgcctgcacacgggtgatcattttcggaccgacaatgttcagcaggacgaagatccacagcaccacgacgcaggtgatggttaataccaatggatctttcagaatcgggaagaagtaacttaaatatcctacgccaatgaccaccatggcgatattgccgatccagcaggccagccagtagaggacgttggtttgataaccgagaaacgggccaaagcagcggcgggcgtaagcgtaagaaccaccagggcttgggtcgaggaacgacattttggcgtataccatcgagagccccagtgcaccgataatcgtcaccaaccatccataaatggcaatcccgccagtagaggccaggtttgcaggtaacagaaaaacacctgaccccataatattccccgacaccatcagggtgacggggattaagcccactttgtgagcatcagcatccgaagacataattaaactcctgcgaaggcgagcttcgtgacaataaattacgtcatatcatacgcctgcattcgatagttgaattattatcgaccgggttatcgctgatgccgttattaatatagctcttcgttaaggttaaaaatcaggcgacagtgcgttctctgtgctgactaacataatgcagcggcgtcataccgtagaagtctttaaagacagaaataaagtacgacgtactgttgtagccgcaggactgtgatacctgagagatatttttaccgtccatcattaattcatttacggcataacgcatgcggcaggtggtgattatttggctataactggtgttttcgcttttcaactttttctttaacagacttgggctaagacataaacaactggctaccatactaagattccagtctttgtgaatatcgctttcaataatttgataaacgctgtcacttacacaattacgtaacatatacatcattaatgaaaggaattttttactgtcgagaaaacgggatagcaccgtgaataataatgcgcgtgttcgttccttttctgactcagtttctgcgggcatcatgctgtgttgcgcggcaacgcgaaagacgtctggcgtcaggcatggcagggtgagtatgggcgtagcgctacgttgccatactggtatttgcgagagatctttattcagaaaccggaggtaatctttgatgatgtcgtgactaatatgagcaaccaaagtgttgttaagagaggagacgtcgataatattattttcacaatttaataacgccatatggttagctttaaggctaataggttctttcccattcacccttatccagacatctttttcagtcaataaaacaatacaaggttggtcgctgcaaatcctcatacatgtactcctgagtgcaaataaaagaccagttctcgctaaagcaaagcgataccgggaaatggttatataattgtatgatgaatataaacatgcataaaaataacgagttttactaatattacaaatttttatagtaatttctcatgtacatatttttttacaggataaataacaggcaaaaaaagcgcggggtggggccgcgcaaaaagtatgacatttttgtttgcagcaatttttatgaaaacgttgccatactcaaaaggcctaaggccaggcggcgtaatgttatttaaacaattacgccttcagcggaatagtggttacgctttcacgcacataacgtggtaaataccgtcaataatttcagtcccttcagtttcgtgttcaaatccagggaaatggtggtcccaggattgcagcgagcgtaaataacttacttgcggactgtttttatcgccgaagttttcaccagacagcagcatcgggattcctggcggatacgggataactgagtttgccgcgatgcgtcctggcagattttcaatggataccagttcgacattgttgtcgacaatcgcgttgtacgcttcacgcggggtgatttccgccatcggcaggccggaataggcttcgttcaaccgtgcgccagggttgttttctttcagccaggcaaacatggtgtcacccagatcgtgaatccccatgttcgcgtaagtgtcaggatattgttcaacaagttccggcatcacctgcgccagcggtgtgttggcgtcatagtggcgtttgaaggagcaaagggtgttaaccagagtcccccatttcccacgggttacgcccatagagaacaggaacataatttggaagtcagtggtgcgggtaggcacaatgccgtggcgaccaagccaggcagtgaccagcgccgccggaacaccggtttcttccagttcaccatcttcacccattcccggagcaaggatgctgactttaatcgggtcgagcatactccagttatccggaatatctttgaagccgtgccagctttcgcccggatgcattacccagcagtcctgaacggtggtcagcagtttggttggtgcgtcagcaaagtcataggttttgccggtttgtgggtcggtgacgacttctttgttccacggtttgaagaaccagctaccgtcagcggtgaactctttatacagccgcgccatcgcctgacggaaatcaaccgcttcgtcgatcacttcctgcgtcagtgacaggccgctgttgccgtccatcatcgacaccgccacgtcgttggatgcgcagatggcatacagcggggaggtggtggcatgcatcatgtaggcctggttaaagcgggagaagttaatcgccccacgaccttcacgtacatgaatataagaagcctgtgaaagcgcattcagcagtttgtgggtggagtgggtggcgaaaacggtaggaccgttgtgatcgccaggttcgccgcgcatggcatagtgatcggcatagatcgggttgaaacgtgcatagccgtaccaggcttcgtcaaagtgcagacgatcggaggttttttccagcagatcctgcgcttctttagcgttataacacacgccgtcataggtgcagttggtcaccacgcagtaagacggtttttgcccagctttgtctttagtcagcgggctttcactgattttcttctgcaaggtttcaggttgcatttcctgcggatagattggcccgataatgccgtagcggttgcggcttggcaccatgtagactggtttcgcgcctgtcagcatcaagccttgttcgatggatttatggcaattacggtcaacgaccacgacatcgttatcggtcatgcaagcctgcatgatggtgcggttagagccggaagtaccgacgactaccgaccaggagcgatcggcaccaaatacgcgtgcggcatatttttcgctttcgccaaatgcgccagtatggtcaagcaaagaaccgagggaagttcgttcgatgcccatatcggtgcggaacagattttctccatagtagtcatggtagaaacgtccggcgggtgttttggtaaaaccaacgccgccctggtggcctggcgctgcccaggaatattcatggatgtcgctatatttcatcagcgcgctgaacagtggcggcaacagctgctggcggtagcgggtcatcgcggcaacagcgcgtccggcgataaagtcggcggtatcttccagaatccaggcgaattcatcgacaagctccagcaggtcgcgatccattgcggcgagggctttttcccgatcgcccaacaggaagaccggcacgttttgttggcgctcatgaagcttaccgatcaattgtctgacgttttgatgttcgtccggatgttccatttgataactgaacatcaggcagtcaatggcttcgtttgaagagagaatggcaaaaccatcatcaaaggaggtggatttaatcacggtaacattttgctggcttaaagcatctgccagacgctcaacggcgttaccgacccaggtgtcttgatggagaaactcgctttcaacaattaatactttcatcattgcttacccggttatgaaggaatcttcgttgcgggcaagtatcttccggccttttcgggctgtaaagcgcgtgaaaaacaaacatttttgaaatatttatttttataaacaatgcgttatgtgattattttaaattattttcactgcttattatcgacggctaaactatttttttggctgatactgatatcgtctttagccgggaaacgtctggcggcgctgttggctaagtttgcggtattgttgcggcgacatgccgacatatttgccgaacgtgctgtaaaaacgactacttgaacgaaagcctgccgtcagggcaatatcgagaatacttttatcggtatcgctcagtaacgcgcgaacgtggttgatgcgcatcgcggtaatgtactgtttcatcgtcaattgcatgacccgctggaatatccccattgcatagttggcgttaagtttgacgtgctcagccacatcgttgatggtcagcgcctgatcatagttttcggcaataaagcccagcatctggctaacataaaattgcgcatggcgcgagacgctgtttttgtgtgtgcgcgaggttttattgaccagaatcggttcccagccagagaggctaaatcgcttgagcatcaggccaatttcatcaatggcgagctggcgaatttgctcgttcggactgtttaattcctgctgccagcggcgcacttcaaacgggctaagttgctgtgtggccagtgatttgatcaccatgccgtgagtgacgtggttaatcaggtctttatccagcggccaggagagaaacagatgcatcggcagattaaaaatcgccatgctctgacaggttccggtatctgttagttggtgcggtgtacaggcccagaacagcgtgatatgaccctgattgatattcactttttcattgttgatcaggtattccacatcgccatcgaaaggcacattcacttcgacctgaccatgccagtggctggtgggcatgatatgcggtgcgcgaaactcaatctccatccgctggtattccgaatacagcgacagcgggctgcgggtctgtttttcgtcgctgctgcacataaacgtatctgtattcatggatggctctctttcctggaatatcagaattatggcaggagtgagggaggatgactgcgagtgggagcacggttttcaccctcttcccagagaggcgaggggagagtccgagcatcatgaggccgaaaactctgcttttcaggtaacttattaccataaactcagatttactgctgcttcacgcaggatctgagtttatgggaatgctcaacctggaagccggaggttttctgcagattcgcctgccatgatgaagttattcaagcaagccaggagatctgcatgatgactgcacccaaaattacatttatcggcgctggttcgacgattttcgttaaaaatattcttggtgatgtgttccatcgcgaggcgctgaaaacggcgcatattgccctgatggacattgatcctacccgcctggaagagtcgcatattgtggtgcgtaagcttatggattcagcaggggccagcggcaaaatcacctgccacacccaacagaaagaagccttacaggatgccgattttgtcgtggtggcatttcagattggcggttatgaaccttgcacggtgactgatttcgaggtctgtaagcggcatggtctggaacaaaccattgccgatacgttggggccgggcggtattatgcgcgcgctacgtaccattccgcatctgtggcaaatttgcgaggacatgacggaagtctgccccgatgccaccatgctcaactatgttaacccaatggcgatgaatacctgggcgatgtatgcccgctatccgcatatcaaacaggtcgggctgtgccattcggtgcagggaacggcggaagagctggcgcgtgacctcaatatcgacccagctacgctgcgttaccgttgcgcaggtatcaaccatatggcgttttacctggagctggagcgcaaaaccgccgacggcagttatgtgaatctctacccggaactgctggcggcttatgaagcagggcaggcaccgaagccgaatattcatggcaatactcgctgccagaatattgtgcgctatgaaatgttcaaaaagctgggctacttcgtcacggaatcgtcagaacattttgctgagtacacaccgtggtttattaagccaggtcgtgaggatttgattgagcgttataaagtaccgctggatgagtacccgaaacgctgcgtcgagcagctggcgaactggcataaagagctggaggagtataaaaacgcctcccggattgatattaaaccgtcacgggaatatgccagcacaatcatgaacgctatctggactggcgagccgagtgtgatttacggcaacgtccgtaacgatggtttgattgataacctgccacaaggatgttgcgtggaagtagcctgtctggttgatgctaatggcattcagccgaccaaagtcggtacgctaccttcgcatctggccgccctgatgcaaaccaacatcaacgtacagacgctgctgaccgaagccattcttacggaaaatcgcgaccgtgtttaccacgccgcgatgatggacccgcatactgccgccgtgctgggcattgatgaaatatatgctcttgttgacgacctgattgccgcccacggcgactggctgccaggctggttgcaccgttaaaacgcgactaaacgctactgcgccgggggatttattccggcgcacacctctgacgataccaataacagaaggcgggcgttggtaacagcgacccgataccctatgagcatttcaatgactacaaaactcagttatggatttggagcgttcgggaaggattttgcgatcggcattgtgtatatgtacctcatgtattactacaccgatgtcgtcgggctgtctgtgggtttggtcggtactttgtttctggtggcgaggatctgggatgctattaacgatccgattatgggatggattgtaaatgctacgcgatcgcgatggggtaagttcaaaccctggatcctgatcggtacgttggcaaactctgtaatcttatttctcctctttagtgcgcatctgtttgaaggtactactcagattgtctttgtttgcgtgatctacatcctctggggcatgacttacaccattatggatattcccttctggtcgctggttccaaccatcacgctcgataaacgtgagcgcgaacaactggttccttatccgcgtttttttgccagtctggcaggctttgttacggcaggtgtgacgctaccatttgttaattatgtcggcggtggcgatcggggatttggctttcagatgttcactctggtactgatcgccttttttattgtttcaaccatcatcactctgcgcaatgtgcatgaagtcttttcgtcagacaatcaaccgtctgctgaaggaagccatctgacacttaaagccatcgttgcgctaatttataaaaacgatcagctttcatgcctcttgggtatggctcttgcttataatgtagccagcaacattattaccggatttgctatctattatttctcatatgttatcggtgatgcggatttgttcccctattatctgtcgtatgcgggagctgctaacctggtgacgttagtattcttcccacgcttagttaaatcattatcccgacgcattttatgggccggagcatctattcttccggtgttaagctgtggtgttctcctgttaatggcattaatgagctatcacaacgtcgtcctcattgtgattgcgggtattttgctgaatgtgggaacggcgcttttctgggtattacaggtcatcatggtggcagataccgttgattacggtgaatataaactgcacgtacgctgtgaaagtatcgcttactccgtgcagactatggtggtgaagggcggttcagcctttgcggcttttttcattgcggttgtgttagggatgattggctatgtaccgaatgttgaacagtctacgcaagccctattaggtatgcagtttattatgattgctctaccaactctgtttttcatggtaacgctgattctctacttccgtttctatcgcctcaatggtgacacgctgcgcaggatccagatccatctgctggataaatatcgcaaagtaccgcccgagcctgttcatgctgatattccggtcggtgcagtgagtgatgtgaaagcctgacgtggacaatagctaacgaaaatggcctgatgcgatatgtttatcaggccacgtcttaatgtaatgctttggatttgcaaattttgtagaccggataaggaattcacgccgcatccggcatcaacaaagcgcaagttgttatccggttatcaagccaaagcgccgtagctggcggcaatgaaagcgagcgaggaatatcaccgtcgttaatgcgccaagcagcgcgcagaacatatcggattgcgtgtcccactggtcgccctgggtgccgagaaaatcatccgctccctgacccattgccagcgctgcccaccactcgattaattcatacatcgcgcttatcgccagcgccacgcagcagaccaggaacgccaccattttacgtccgcgcacgtacatcccgcgaacgagaatttctcgtgccaccagtgcaggcaccagcccctggaaaaagtgccccagcttgtcatacggattacgactcaaccccagccattcctgcacctcaaaaccaacggggactttcgcgtaggtgtattgcccgccgaccatcaggatgatggcgtgaaagaaaatgagcgtatagagcagcggcgttaacggataacgtctggcggtggcaagcagtagcggcacgacaataatcaccggtgtcacttccatcagccaggtgagtttgtcatgggccgaaatgccggtataaatcaggattaacgttagcgccagtgcgccggtgttaagaattaacggcttgagtgtgcgggtcatggtgagttcgcaagtcagggaaaatactgactattcaccagcaagcgtgaaattacaatcgcaaaagaggtggcccagggggatcacctggcagcatgctgccaggcgctgggccgaagaggttacttagtgcagttcgcgcactgtttgttgacgatctgctggaagaagtcgttacctttgtcatcgaccaggataaacgccgggaaatcttctacttcgattttccagatagcttccatacccagctccggataagcgacgcattccagatgcttgatgctctgctgcgccagtaccgccgccggaccgccgatgctaccgaggtagaagccgccgtgtttatgacacgcgtcggtaacctgctgactgcggttacctttcgctagcatgatcatgctgccgccgtgggattgcagcagatccacgtaggagtccatacgacctgcggtggttgggccaagtgaacctgatggataaccggcaggggttttcgccggacccgcgtagtagatcgggtgatctttgatgtactgcggaagttctttaccggcgtcaatcagctctttcagcttggcgtgtgcaatatctcggcccacgataatggtgccggtgagcgacaaacgagtggataccgggtattgcgaaagctgggcgaggatctctttcatcgggcggttaaggtcaactttcaccgcttcgccttcaccggcctggcgcagttcttgtggaatgtactggcctgggttgtgttccagtttttcgatccagataccttcgcggttgattttcgctttaatgttacggtcagcggagcaggagacgcccatgccgaccgggcaggatgcgccgtgacgtggcagacggataacgcgaatgtcgtgcgcgaagtatttaccgccaaactgcgcgccaagaccgagtttctgggcctcttccagcagttcctgttccagctggacatcgcggaacgcctgaccatgttcgttcccttccgtcggcagttcatcgtaatagtgagcgcttgctaacttgacggttttcaggttggtttccgcagacgtaccgccaatcacaaacgcgatatggtacggcgggcaggctgcagtaccgagggtacgcattttctcgacgaggaagtttttcagtttgccgggagtcagcagggctttggtttcctggtagagatacgttttgttggcagagccgccgcctttcgcaacgcaaaggaatttgtactcatcgccatctaccgcgtacaggtcgatttgcgcaggcaggttagtgccggtgttgacctctttgtacatgtccagcgccgcattctgtgaatagcgcaggttatcttcgatataggtgttatagacgcctttcgacagcgcttcttcatcaccgccaccggtccacacgcgctggccttttttaccgacgatgatcgcggtgccggtatcctggcaggtcggcagcacgcctttggcggcgatttcggagtttcttaagaattgcagcgccacgtacttgtcgttttcgctggcttctggatcgtgaagaatagccgcaacctgtttctggtgtgccgggcggagcataaaagaagcgtcgtgaaaggcttgctgcgccagcagggtcagggcttctggttccactttcaggatggtttcgccgtcgaagtcggcaacgctaacgtaatcggaagtgagtagatagtattcggtattgtctttccccatcgggaaaggtgcctggtagataaagggtttgtttgacatagcttccagcctgtaactctgtatttgttattcgaaaatggcgtgccgcgtagtcacgggcggcacgcaaagtgcatttataagaacccgtacatcgcggcgaagatccagccgaagacgcacgatacgctcacaccaatcaaccccggcagaataaagctgtggttgatgacgaagcgaccgatgtgggtggtgccggaacggtcaaactgaatcgctgccagatcgctcggataagtcggcaggatgtaataaccgtagcaagccggtgctgaagccacgatgtatgccggatcaacgccgatcgccagcgcgaccggaacaatcgccgccagcgccgcagcctgagagtttacaaacttggaaaccagcagcagaacaatggcataggcccacggatactctttcaccatttcacccagtacgccctgaatttcagacatatgcgcaccgaacatggtttctgccatccatgcgataccgtacaccgccacgatggcgatcataccggaacggaagacttcgttttttgagatagacgcgggattggttttggtcaggataataatcagcgccccggtcagcagcataaacatctgaataaccagtaccatcgacagcggtttgccgccgaaggatggacgcaggtccgaatcagcaccaagaagggcgactacagcgattgcaccgaggaaaatccacattgccagccagttgcttttcggcagttttttatcgagcagcgtcgcggtatcaccgtaaacatactcacggttttccggtacggagatgaatttctggaactcttcgtctttatccagatctttaccgcggaaccagctgaagataccgatcgccaggataccgattaacgtcgatggaatggtgattgccagcaggtcgaggaactcaagatggcgaccatcaaaggtgacattacccagcattgcaaccagagacacgaccgcaaccgacaccggactggcgataatccccatctgtgcaccgatagaacttgccgccatcggacgttccggacggatgttgttcttaatggcgacgtcgtagatgatcggcagaatggtgtaaaccacatgacccgtaccgcaaagaatggtcagtgtacaggtcacaaacggcgcgacaattgagacatatttcgggttgcggcgcagcagcttctcggcaatttgcagcatgacatcaagaccgcccgaagcttgcaaggtcgccgatgccgccaccaccgcaatgataaccagcatgacatcaaccggtggtttacctggctgaaggtggaagacgaagaccagaatgaccagaccgataccgcctaataaacccagcgcgataccaccctttctggcaccataaaacagacatatcagtattatgataagttggatagtaaataacatgtgtgaaccctcgcgataatcctatttaaatttttgctgaatagatcacagtcacgttctgttttgtatgaactgttttcagagcctgactaaatatccgtttggtcgttaccggctttagcaaatacctcacagtaaatattggctgattgaagcagcggcaaatttatgcactgtgataagcggctttttcagagagaaaaactctctggcgatgggtttatagtttgtactgcgcagatgttaatgttttgtttgctgttatcttattgatatttatcggtctattttttgttctcagggcagatatcattaggtttaaagattaatctgatctacccatttgtgggtaaaaatacacataatgcgggtgacataatagttaattaacttttgttagcgttttgaaattaaaaacaccgttcacctgaagagatattaatttttagcgatgatggagggataattatatttgatctggcacaagttttactgatgaaggatgtaacttgtgccaggggtattttgcattacggtaataattattacttacagataaccagcgatccgttattggcaatattgtttcagtagtgagtagtgttctgcctgaatacggtaacggtaaaccggacgccccgtgacgccataatggatactggtgaacaagatgtggcagttgaccagccagatgaggtattttcggcaggaaacacgcgagatgttaacctcgttagccagctcgtcggttgaaaactcatagtcctgatgcgcgtcaatccactggcacagcgtgcgtaacgtctgcggcgttaagccttttggcaagcgacgaggatcctgttcgttggagctgctgccgtggattagctgatcaagctcggcctggtcataatactgatgtttttccagcgccattttcttttgccgccagccggtgagcgcctcttcaaagcgggaagcctggaagggtttgatcaggtaatccacgacaccgtaatgcagcgaatctttaatggttgccgcatcggctgcggaggagatgacaatcacatcacttttgcaacgcgcgttatgcaggacaggcagtaaatcgagcccgttctctttttgcatatagatatcgagcaatatcaggtcgataggcgtatcgctattgaagataatctctttggctttctccagcgtcgaggctgttccacagcattgaaagcctgggatttgtgctacgtatcggcgattcagctccgcgaccattgcgtcgtcatcgataattaatacattgatcatctgttcgacctctccccgtcccagggtatctggacaaaaaattgtgtgaaaatcccgggttccgattccacggcgatgctgccgccgagattttctacctgttgtttgacaagtgctaaaccgacgcctcgctcgcttccttttgtcgagacacctttgtcaaaaatgtgatcgattttgtcgggtgcgatccccggtccatcatcgttaacttcgcagtgcagccagccgtgacggtagtgcaatgttacgctaatttcgccaccgggttccggccctaatgcttccagcgcgttttctatcagatttcccaatgtggtaatcagcgtcgcgacctggtcctcactgccgctgtctggcagcaggctttcactgtttaaaatcagcgtatggcctaaatcggtcgcgcggttaatcttgctgattaaaaaaccagcgataaccggagatttgatcttacccagcagagagccaatctcttcctgatagttattggctgttttgagaatgtaatcttccaactgcttataactcttcagatgcaataatccgagaatcacatgcaatttattcataaattcgtgggatcgttcacgaagtgcatcagcatagttgaccagaccgtcgagtcgctgcatcagtttacgaacttcagttttgtccctgaaggttgaaatggcaccgatgataacgccattactgcgcaccggaacggtgttgatcagtaatagccggtctttaatcgtaatctcttcgtcgcggcgcggcgtaccgtcgcgtaacacttccgagacatctaccacctgtgaccatgagtggcttagcgtcgacagtttctcatcgtcctgcgacttacggtaattcagcaattcttgtgcggcatcgttgatcagcgtgacctcgccgcgatcgtccacggcaacgacgccttctttgatagactgcaacatggcctggcgctgctcaaacagcgtggagatttcgtagggttccaggccgaaaaggatttttttcagtaccttaaccagaatgcaggtgccaatcagtccgaccagcatgccaaataataccgaccagataatgctccagcgactgtcattgatttgttgggtcacgcggcttaactcaaggccgatcgccaccacgccaatttgtttatgattttcatcgtagatgggggtaaatacgcgtaaagcctgcgccagaaaaccgcgattgatagcgacattttctttgccattcagcgctttaaggatgtcatcacctttaaatggctgaccaatacgctgggcttcaggatgcgagtagcgaagactttgcatatcggtaacgacaataaacagcagatcgttgcgtttgcgcacggcttccgcgatggcctggattccgctctcctgcggttttttctgcaagccctgacggatttccggcgagtcggcgagggtacgcgccactgccagtgccttgttggccagcccgtctcgcgtcatatcactgatttgcgagaagtaaatcagatgcaccaccaatagcaccgagaacagtaccgcgctgaccattaagatcactgtggtactcaatttcatcggacgtttgcgtaacatgcggtagggcaatgaatgtctcatcagcttccttgtgtgacaaatttcttaagcattatctctgatgaggcgggtaattcaaagggagtaagaatgattggctatataggggaagagactctggcaacggaaactgccagtgctgtatgaagattccagggctatgcttatagcgataatcatactgatgagagagggaaagtcatggatcaggcgctactggacgagggttatcgctgttataccggcgaaaagatcgatgtctatttcaacactgcgatatgtcagcattctggcaattgcgtacgtggcaacggcaagttatttaatctcaaacgaaagccgtggatcatgccggatgaagtcgacgtcgtcactgtggttaaagtgattgatacgtgcccgagcggcgcgctgaaataccgtcataaataagcgagggtaaaatggaaatacgcgaaggccacaataaattttacattaatgacgaacaaggcaagcaaatcgctgaaattgtctttgtgccgaccggagagaatttagcgattatcgaacataccgatgtcgatgaaagcctgaaagggcaggggattggtaaacagctggttgcgaaagtcgtggaaaaaatgcgtcgggaaaaacgaaaaattatcccactatgcccatttgcgaaacacgaatttgataaaacgcgggagtatgatgatattcgcagttgatgggagagtacagagtcacgatatttttcatgctctccgcggagtgatgcaggagagcatctgaagggtagggggatgcacaaagaatgggcagagagcgcgtttttttgtcccaagtcatcccctttactgagcaaaaaaaagaatatctcctatatgagaatcatcaatcggggttaataatttttgcgtccccagagcattcaatattgataggagtcatattatggaaggtaaaaacaagttcaatacttatgttgtttcttttgattatccatcatcttattcctcagtgttcttaaggttaagatcattgatgtatgatatgaatttctcttctatcgtggctgatgaatatgggataccacgacaattgaatgaaaattccttcgcaataacgacatcgttagccgcaagtgaaatcgaagatttaatcaggcttaaatgcttagacttaccggatattgattttgacctcaacattatgacagttgatgactatttccgtcagttttacaagtagccaggaaggataagaagaacataaaaaatggcactattctctaaaatattaattttttatgtgattggtgtgaacatatcctttgtcattatctggtttatctcacatgagaaaacacatattcgtttacttagtgcattcctggtcggaataacctggccaatgagtctgcctgtggcattacttttttctctcttttaggagctgtagttgagtggacccgctggttatcgtgaaacgaagcgtctctcctcaaaactggatttgcggaacgacgaacgaagcagtcgcctgactgccttcgttcattaaagtgaaatttatttctgtgggcgcatcgccgggaagagaataacgtcgcgaatagtatgactgtttgtaaacagcataatcattcggtcgataccaatacccagaccagcggttggcggcagaccatattccagcgcagtcacgtaatcttcgtcatagaacatggcttcgtcgtcacctgcagctttagcgttaacctgttcctggaaacgttcagcctgatcttctgcgtcgtttaattcgctaaaaccattaccgatttcacgaccaccgatgaagaattcaaaacggtcggtgatttctgggttaacatcattacggcgtgccagcggtgacacttctgccggatattccgtaataaaggttggctgaatcagatgtgcttctgccacttcatcaaagatctccgtgacaatacgtcccagcccccagcttttctctaccgtaataccgatagattcagctaatgctttagcagcatcaaaattatccaggtcggccatatcggtttctggacgatatttttgattgcttcgcgcatggtgagtttttcaaacggtttgccgaaatcaaacacatgctcgccataagtgactttagtggtacccagaacctcttgtgccagggtgcggaacagggactctgtcagttcaatcaaatcgtggtaatccgcatacgccatgtagagttccatcattgtgaactcaggattatggcgaacagaaataccttcattacggaagttacggttgatttcgaatacccgttcaaaaccgcctacaaccagacgtttcagatacagctccggcgcgatacgcaggtacatatctaaatccagagcgttatgatgggtaataaacgggcgagcagatgccccacctggaattacctgcatcatcggggtttctacttccataaagccgcgcgcgaccatgaactggcggatagcggccagaatttttgaacggacaacaaacgtttgacgggatttatcgttagcgatgaggtccagataacgttgacgataacggacttcctgatcctgcagaccatggaatttatctggtaaaggacgtagtgcttttgtcagcaggcgcaactcagtacagtgaatggaaagctcaccggtttgcgtcttaaacagcgtaccgcgggcaccgataatgtcacccagatcccattttttaaactgatcgttataaacaccttctggcaggctatctcttgcaacgtacagttgaatacggccaccgacatcctgcaacgttacaaaggaggctttccccatgatacgacgggtcatcattcggccagcaaccgagacttcaatgtttaaggattccagttcctggttatccttcgcatcaaactcttcgtgcagctggtcagaggtatggtcgcggcgaaaatcattgggaaacgccacaccttgctgacgtagtgctgccagtttttcgcggcgatttctcagttcatcgttaaaatcaatagcctcattggctccccgtgtttcttgttcagacattttggttcctctaaatccagctttcaatttagcgtagataaagagacagatcggtacactgtattatctgcctcgactattaataactcagtttatcttatcgaaactaacgcttacctcaagttgatatcactaataaataaccatcaaaatggtttaaatgacttattaatctcgatttactagtgtgattaactgaaagttaatttattcataaccaattgtttttacgacagttaatcgttgctctcctgtatcatattcgtcggcgtgctaaacagaaaacgggtagcaaaggccaatacgacgatgatcgcgacacaagccaacgtccactctcccatctgagaaaagaatcgctggtaagctgcaattgccataccgctaatttgcgactctgtcgtctgctgtgccacgacgcctgccagccagttggcgaccgcgcctgttgccagcatataaataccggttaatacgccagacattttcagacgcgtgatttgcgcaatcgccaccgggtcaataaagagttcggcaaagcccattagcgccaacccggatatcatcacgcccattgacgcttgaccgtcagccgctgcatgtcgggcatcaaatgccaacaacataaagccacaagccatcagcagtaagccaaaggcaaacttcagccagacgcgcaatgttgagttgccgcggctttctggcgacgccagccaggccagtacaaccccaacgagcatcaccgcaattgcattcaccgactggaatagtgctgtaggtacttcaatattgaatgcctgacgattcacaaagcgatcgataaacaagctgatggtactgccgccctgttgtgccagtacccagaacaatgtcccgacaaacatcaacaatacaatttgccaaagagcacggcgatgttcggggaatttgatcatcatgcgggcaatgatttgtgcggcaatgaggcaaacgatcgccagcaaatatcccgaccagtcgttctccagcagcagggtaaaaaatactggggctaaacagagcatcaccactaaccagctccatactggtaaggcaaatttcacgctagtgagcgcttttttatccatactacgcgtggactggaaatgacgatgcccgcttaagaaaatcaacaaaccgataaacatgccgccacccgcaagggcaaagccaacatgccatccataccactgagcagccaggccgcaggcgattggggcggcgatagaaccgatattgcccgcagcatacagcagcgaaaaaccgccatcacgtcgatgatcgttctcgtcgtagagctcgccaagcaaacagctgatgtttgatttgaataaaccgtagccacaaataatgattgccagcgccagatacaggctaaaggttgaatttgtatcaatgcccagcaccacatggccaagggtcattaacagcgcgccggcaatcactgcagtgcggttgccgagcaggcggtcggcaagccagccgccgagaataggggtaacgtaaaccagagaagcatatgcgctgaacaggctgatggcatggttatcatcaaaaccaagctgatgggtgagatagagaatgagtaaggcacgcatgccgtaaaaactgaagtactcccagatttggatcgccacgatatagtatatcgcgcgcggctgtgagggtgttttcatgtgttctccttatgagcaaaaaagggaagtggcaagccacttcccttgtacgagctaattattttttgctttcttctttcaataccttaacggtatagcggccatcagcctgacggtatgcaccgtgaatatcggtttcaaagcccggatagtgagcgccgatttcacacagcatctgcaggaactccagaaccggacggctttcttcggtgatcatttcacccggcattaccagaggaactcccggcggatacggaaggatcatattggcgttaatacgacctaccatttcgtcgaggtaaacttcttcggtcataccgtgcagctctttctggaatgcagcatacggagtcattaccatcgtcggcagcacttcaaatgcgcggtacatcagatccggcagattgtggtgaacaatcagtttgtggatattctgagccagttcctgaatacgcatgttttcatagaattcaggatcttcacgatacagagacggcagcatgtttttcacacgcaggttcaggtcgaacgcacgtttgaagtcagtcagagcacgcagcaggctcagtgctttggtcttatcgataccgatgctgaacaggaacagcaggttatacggaccggttttctcaacaacgatgccatgttcgtcgaggtatttcgccacgatgctggccggaataccaaagtcgctcatggtgccgtctttttccatccccggagtcagcagggtgactttgatcgggtcaagatacatgtgctcgttatcgatgtttttgaagccgtgccaggtgctgtcagaacgcagcggccagcattcagtcgtatcgatatgatccggctgccatacatcaaagaaccagccatcagattccgttctcagacgtttgatctctttacggaatttgatcgcacgttcaatggaaccgttgatcagacgtttacctgcattgcctttcatcatcgccgcagcggtttcagtggacgccacgataccgtagtgcggagaagtggtggtgtgcatcatgtaggcttcgttaaaggtttcttcgtttacgtcacctttaacgtggatcatggaagcctgagagaacgccgccagcagtttgtgagtggactgggtttcgtaaatcactttcccttctacacggccaccgctcataccgcatttaccttcgtaaatcggtgagaagttggtgtaaggcacccacgcggagtcaaagtggatggatttcacatccagtgttttcttgatgaagtcggtgttgtacagcagaccatcataggtagagttagtaattacagcatgtaccggccaggttgcgtttggtgtttctttcacgcgcttagcaatggtagcgtgctggaattcactctgtgggataccaccaagaataccgtaagcgttacgggtcgggcggaaatagattggcgtaacatcgctcatcatcatcaggtgggtcagcgatttgtggcagttacggtcaatcagaatggtgctgcctgccggagcagagtacatgccaacaattttgttcgcagtggaagtaccgttggtcaccatgtagctgcggtctgcgttaaagacgcgagcgatatactgttctgcttctttgtgtggaccactgtgatccagcagagaacccagttcagatactgaaatggaaatatcagatttcatggtattcggaccaaagaaatcatagaacaggctacctaccgggcttttctggaatgcagtaccgcccatgtgaccaggagtacagaaagtatatttaccttcacgaacatatttaaacagtgctttagtcagcggaggcagaatagtgttgatatattcgtcagtggtctgcttgatcttattagcaatatcttcagcagcacccagcgcatattcaaagaagctaatctgtaaacgcaggtcattcaggcttacatcgagagtggaatacgtattagcgaacgcgtacaacggcaggttctcgttcattttgctaatttcttcgcacagctcgagattatatttatcccagtcaaaaataacgccgcacagacgcgcattgttttcgatcagttttaataagtcgtcacggtcgttcgggtaaacaatctggaagttcagacgttcaagcgcgcgatgaagttcacggatgggttcttctttaaaataaacccccatgtgattcaatattgcaataacgttcatagtcatatctccaggtaaaaaaggcccctcccaacacatgggacaaaatgaaaggaggagcctcggaaaatacttttaattaatgtgcgttagacgcggtgtggttatccattgagtggctctggcgctcgtgcattttgcgagcgtagaacatcaggataatcaggctgacgatgaaggtacctgccagctcgaaggagcttgcgcccatcagcgcgatgaagcagaacacgcaacccagtacagagcagatcaggctgacaaagttgcggatgttaacgccttcaaaacgaatcaggtcaacgcaagagtagaagtacggcagcatagtcagcagtactgcgataccggtcagttcaccgaacaggtcagatgctttaccaccggcagagttcatcagagtgatgaggatcatcaggcagtcattttcactgcagccagcagcagaccttttttcggaataccgttgctgtcgacttcaccataaactttcgggaagttaccgtcgttagcggcacgtacacctgcctggcctaccaacatcatccaggagcccagagaagtcaggcacgcaaaggcggtgaatgcagaaaccagcggcgcagcccagttaccgaggatagttgaagcactgattgcaaacggagcaccggaagccgccattacagaagacggatacataccggaaagcacctgagtcgcagcgatataaacaatacctgctaaaccagtacccagcatggttgccagcggaacggtacgtttcgggtttttaaccataccagtacttactgctgcggattcaacacccacgaaggcccacaggcagagcagaatacttttaatgatcgcatgaccatcagtggtatccgcagtattccagttagctgcataagttgccgcatcaaaccaatgccagccaacaatagcagtcatcaccacaggaataagaaccagcaccagaccaatagtggttaaacggcttacccaggtaccgccgagcatatttacaaaggtaaatacccagacgatagcaatacaggcgatacccgccggaacaggatcatttaatactgggaagaaggtggaaagataagatacagcggtaataccaatcgccaggttaccaatccagttagcatggtaataaagaacacctgtctgaaaaccaaatgcaggggaaatttctccggcataagcaattgggccaccttgttgcgggttttttgttgccagtcgggcatatacatacgccagcgacattgcaccaataatagagataatccaaccccagatagcaataccaccgatacttgctaggttcgcaggtaataatgcaataccgctccccatcatattaccggcaacaacaccggtacaggcaaatagcccgatcttcttggcagaactcatgctcttctcctaatttcatttttgaatttggagtccgggtcatgatgtataactatttcctgaccagaccaaactggcgctaagaatactcacgaaaaaaggattaatcctaaagattaggtgaaataacacaaaagtttctgtaagtgagaacttgaggttttttattaacacatcaggatcgcaagttgatatcatgaaaagataaacattcaatttttacaatggattgcgggatattctctggttaaatttatgtaataaaaattatgcggcaaataaattgccgcaacatattataccaacagaaacatacaaaaactcaacaacaaatattcccgagcataaatcaacccgggagttacttattctgaagcgagaaatttgtcgagataaggtacaacataaggaacagaagtctggaatataccattttcaatccagtaaagggtgtttgcccctgggcgtaaattaaaggcggtgagatatgcatcagccgcttcccggttcatccccttcatttcataaaccttgccaagcaacacataatttagccaggacatttcaagatcaatgccagtatttatcgcctggtaagactcatctgttttaccttttaccagagcactgaccgcttttatttgatatataatggacaggttattcaattccggcagtgtaacaatgttgtctatttctgtgttcagtgctgctaattgtttttcatctaaaggatgttgagaatggcgcacgatatcaactaatgctttttctgctctcgcgtaggtaaattctggggatgattgaacaatctcacctaataattcactggcacgattcaatgatttatcatcgccatgcagtaaataatcatgtgcctgataaaaattagttaataacgcaccgcgatgaggcaatatttgctggagcgtctcctgcattcgttgtggccacggttggtttaacgcttttgataaactctccagtaaatcattttgaatcgccagctgattaccgttagtgatgacataacgtttatccagcatggttgaaccatctgcattgtctaccaattttatcgacataaagcattgttgagcacggtattggcgctgattaacaaacgcaatagataatgttttaccggaactgctcggttcatcaatgttgtagttgattttgtcatgcaccataaaggtggagaaggtgttaagtgatgtcgccaccaaatcacccacgcctatcgcgtaagagagctgatacggggaactccagctgttacaacttttatttaccatattaatgtcaatatcgcgtggattgagcaaaatacgcgatttgctcataggaagacgtgtatcaagagttgaaaacgctaccagtgctacacagatacctaacgacaacaggaaaaaaaaccatacccaaaaggtagtgaatcgtttgcttttaactggggattgttcaggtggcgttgcggtgttttgaatgttaagactgtgggagggagaatctgtggcaggaaccgcctctggtatagggggaggcgaagatagcattatttcctctccctcttcttcgctgtaccagataaccggcaccattaatttatagccgcgctttggtacagtagcgatatagacaggactatcttcatcattatcttttaatgacttacgtagttctgagatactctgcgtcacaacatgattggtgacaatacttctcttccagacattatcgataagttcatccctgctaagtacttcgccactgtgttgagcaaagaaaaccagaagatcgattaatctcggctcaagggtaagttgacgcccattgcggctaatttggtttatggacggagtaacaagccattcgccaacgcgaactacaggttgttgcataatagaaactcattcgaaaagggaatgatgcaatgataattgccacaacctatttttaccatctatagatgggtttatttacatattattggtgaatgcaagacgttatttttaccagtcataaacttcttgattacatagtattacgaaaggattttactgagaaccagaagtaatattccttaccatcaaaattcatcatctttgccaaagaaaaatgttcagaaaataatccatggaaaattgtccggagcgcttactattttaatggattgttagtctttgcatgagcaagcggactgatacatttctctttgttctcattcagaaaatctcatcagtcggcgttcagaccggtgttgtgctttatggatgcgttacgctcctgatgacgtcatttgacgttcaacaacatcacggggccgcacgacatttcacgtcagttagtgctatcgctcaggaacaaattttcccgaattgggatatgcccgcaaattgctggtgatgtggggagaatctggttgagttcggtagaattgatttggaggcagaacgcttaaattgtggcgtccagaaacgaaaaacggacctccgtggaggtccgttgatatgaatttggtgccggactcggaatcgaaaatttcttttatcatattgatattaatgcaatttgtttggtttgattaaaaatgtaccctcaattatacccgcagtcccttttgatatcgaaagggaatcactctcgggatcaggctgagagcacagaaggaaagtacctggctattatatcgttaattctgtcaatcagttccagccttttgaaagtgatgtgtgcagatcccttcttaaagtatttaatgatgaacatctcgtcttcatagcgctctttaccctgaacggactggatgtgaccatccagacgaatagtgatgttttcccggttgtcggggatcggtttgccgctgaacagatgtagcattctttccaggtcgacgagtcggtcagtctgttgcccggtgataagatgaaacccccaccggtcccacctcaccagattgttgacgataattttactgccaaatttacagggggagttggttttgtaattccagctcagccctctgaagacgttgatcactcctcgctcaaacacttcatctttgttctggtgcagttgttcaaatgtgctcagaatgttcgcttcgctgatttccggaaaattatcatattccagtgacctgtaccatgtgtcccgggtctgcgcatccatcagactcagcatcccggaacgttgcatcagatcacgccagagttcgcgatcaagattgcgtgtgatggctttcattgcggtttccggtttctccatcagccagcaaccgcagcgaaaatcctgtttcatggcccagtccagagccgttttacctctaatactttctgtcattgctgatacttcagccagttgtcggataagtgtgtcgatttgcagcaatgtactctttcgtacagccagaatgtggcggatactggttgagcagataacgtccgtatgcccgttgaccacttccggacgagaggctgtgatttcagacataatcgatattcctttttgcagataaacgaaaacgccagccgtattcaggctggcgtcagtggaatgaagtctggtgagtaagactcaccggttctgttgcagaaactgcagctgacgcagggtacggatatcttccctggcctgttcaatacagggcagcagtgctgccgaatccgttttatcctcatcgttgtcgaagataatccctgattcgcagtcaatattgtcctgcagccacgcaatcagaatatccagcgccgtttctgtggttaataatttcatccagtgtcttttgtcctgattaccagtcgaaagtggggagccccggcagacattctgcgccggcgtccagatgaatgagactgacgccataacgccggrtgagwgtgacraccagacgacggaacgttctkgacagkcccagkcgtttaagycgcagaaccggrtacgaccatgcatcggtacgtaacagatagccgctgcctgtaaaatgaatccattctgtttcgccgtcgtcattagtctggtgtgacagcgagtacagccaggcgttgtccgtttccgtgatatgtgcggtgctgcaacgtatgcaggtaagggttgttaacggtggtggtgtactggttgcgtgttggtcggatttatcgaccacgcggagtgaataaccgttttcagagaccttgttaatcagttcactgagattaacaccatcgacgtcaacgacaatgcgccccatgttcagtgcctgcacgttaacgctgtcggcttccagcgtcagggccagtttcattgtttcgcttccggatgcttcccccgggtaatgttatttaccgttctgtagttatcgcgggtcatcaggccggttgcccggcgtgcccggagaatatcaatgctgttgattaactgcgacggggctcctgcgctgaatcccggctggtcggtacgtaccagcgcgtatttttcaacgagaaagttcaccgcgtcacacagtgaaattcctgcctcaatatgctgctcaatcacacgttcatcagcgaacggtgtgtcattcagcgtgaggccatagtgctggtccagcagtcgggtgagcagtgtctgccagatggtgatgggagacgggcagcccgatgcctcccgtacgtgagtgtcgggtaatgtattcatcttaaattctctgtaacaggtggttataaaggggagatatccggtgttatacggtggttgcgggcgctgccggtgtcggataaacagccagataaacgtaaccacaggagccgagggtgtcggcttcgcaggtcagccctttcgcatacagtgtgacggtatgctgatggcggggattcagttcaccgccagtgagcatgagttccagttgtttcatcagcagcggaaaggcctggtccaggtggtacgcatctacgtcgctgaacctgcctctgataccggcgcggtctgcaaggtaatgcaggcggttaccctcctgtaccagtcgggccccgaaacagggcgtcacggtgcagggcagcccccaccaggggcggtcgtgattgtcgtcgggaggcgttgtcccggggagtgtgtctgacacgataaagtcctcacagaaaatcggttaagaatggtccggtagtggcgataattctgctcatcagaattcccttccagactcagttcagggtgacgctcatcagccggacatacggaccaaaactgtccttacggcgttctgcaaacacagccagtacaccgggaatatcctgcacttcacggccggtatatgtatccgtgctaccgtgccagcggtatttaccggtacagaacggaaaaagacgggatgcaggatgctgacggtgaatacgcatggcttcaccacgggtgatgattttcatgagaatagtcctcctgaatgtgaaagtaagaaacagctgagaaagagaaactgaagtgatatgaaggtgattgtgacggtgacgggttaaagcagaccgtgttccgcaaaggagaaaacctggctgccaccgactatcagatggtccggtacccggatatcaaccagggccagtgcctgtaccagacgytcmgtrataagscggtctgccttrctgggkgkgacttcaccggacgggtgattgtgygccagcaccacggcagcggcattgtggtacagggcgcgtttaatcacttcccggggatggacttccgtgcggttgatggtgccggtgaagagggtttcaccggcaatcagctgattctggttgttcagatacagcacccggaactcttcacgctccagtcccgccatgttcagaatcagccattcccgtgccgcatgcgtggaggtgaaggccacgccgggttcatgaagatggcggtccagggttttcagggcccgcagaatgaggctgcgctctctggttgtcatttctccgggcagaaaggaaagctgytgcaattgtgcttctctccattcagtcgatgatgcgcataatggcgctgcattccggatgctgcagggcgtaatcccgcagccggtaataatggaccgtcatggcataacactccgtacgacaggcatgatgactgtacgtcatcagacaggcagcaatgccggcagcttccggactcatttcagcgcggttaccgttcatggcattgaacagtacccatgtttcgtcatcatcgtcatccggttcgggtgctataaatgccccgccgttgttcagggtgtacagattccagataccaccgcagtagtcttcgcacagacggtccatccagccgaagacacggggctccagggtcacccactgtggaatgaggccaaagtgctgcggccagaagctgatgcgctgttcatcagggacgagggtggcaaccagttgttgcaggtcagtctccggtgcacaggccgaagaggtggtgttctgagacaatgttttcatgtatgaaatccttgtaatgtgaataaatgagagggagtaaaggtcgggagctggcaacatcacgttcatcactgaccgtgatgacccggtaatatcagggatgaatgatattcggctgaaattccggacagccgtacgcgtaaccgttccggtcacagacggatggccagatgccattgcctgtatactcagtctgcacagactgatttctccgggacggtaaagcagacgggtacaccaggcgcacaggtcatcatcagaaatggaacgacaccccggcagcgcctccggggcgtcgggtgattctggtgcctgaatcacgccttcagggacatgctgcatcagcgcaggctctccagcagcgtttctgccattacccacaatgcgcggttgagcttaatatcggtgtcgatgttgtgaatggcacgggtgtggatacgttttccttttgcactgcggccggaaatcctgaaccgccccgggaatcctggagactaaacttcctgagaaagaggtaaacaggatgactaaaaatactcgtttttcccccgaagtccgtcaacgggcagtccgtatggttctggaaagtcagagcgaatatgactcacaatgggcgacaatttgttccattgctccaaagattggctgtacgccggagactctgcgtgtctgggttcgccagcatgagcgggataccgggggcggtgatggagggctcaccaccgctgaacgtcagcgtctgaaagagctggagcgtgaaaatcgtgaactgcgccgcagtaacgatatccttcgccaggcttccgcttattttgcgaaggcggagttcgaccgcctctggaaaaagtgatgccactgctggataagctgcgtaagctgtacggggtcggaccggtatgcagtgaactacatattgccccgtcaacgtattaccactgtcagcaacagcgacatcatccggataaacgcagtgcccgtgcgcagcgcgatgactggctgaagaaagagatacagcgcgtatacgatgaaaatcaccaggtatacggtgtgcgtaaagtctggcgtcagttgttacgggaaggtatcagagtggccagatgcactgtggcacgtctcatggcggttatgggacttgccggtgttctccggggtaaaaaggtccgtacgaccatcagccggaaagccgttgccgcaggcgaccgcgtaaaccgtcagttcgtggcagaacgacctgaccagctgtgggtggctgattttacttacggtgtgcccggagttcagggcgggcatggatgcttaaatgaaccgcgagtctgtctggaatattgaaccggtaactcacgatgagaaacccaacaatcccaccgggtgtgacggtggagaacctgagcggcagtgacctgcggcatgcccgcagggtgatgtaacccgctgacaacggggattgaggcgagatcactaagccgagatgatcctcaaggttaagtactgaaaggctgaagaacatgaacccgttaatccgcctctgtgggttgaaaacgtcaccacggcctacgtgatctgacaggccgtgcaggaggaactggcagtgatacgtaagcactgccggtcgaaggtgttttgacatgtatgcgaaacaccggggcagcagcgtctatcacacttgcgttgctgacttctgccaacttgcggcaagcaaggataaagagtgcgacgggcagcctcctcagtatgcctgagtccaggcaggtaaaccggggaaggtcagcgacggatgttaagggggcatggctccgatgacgcgctggctggcggagcttccgtagtagtccgcgatggggaaagcccattacatggcgaagggaagcagtttgaatgtgtttgcgacgtgaattaactgacctaacgaggtgaagacctttgataatcagcgaaatgcaacgcaagcttgccacatgggcagccaccgatccgtccctacggattcaacggctgctgcgtctgataacacaaccagaatggctggctgaagcggcgcggatcacgctttcatcaaagggggcccatacccccggcgttgatggcgtgaacaaaacaatgctacaggccagactggctgttgagctgcaaatcctcagggatgaattactctcaggccactaccagcccttgcccgccagacgggtttacatccctaaaagcaacggcaaactgcgaccactgggtatccccgcgttgcgggatcgtattgttcagcgggccatgctgatggcgatggagccgatatgggagagtgattttcatacgctctcatatggcttccggcctgagcgcagtgtccaccacgcgatccgcacggtgaaattacagctcacagactgtggtgaaacccggggacgctgggtgattgaaggcgacctgtccagttacttcgacaccgtacatcatcgactgctgatgaaggttgtacgccgcaggatcagtgacgcacgtttcatgactctgctgtggaaaaccatcaaggcgggacatatcgatgtcggtctctttcgggcggccagtgaaggtgtgccacagggcggtgttatatcgccgctattatcgaacatcatgctgaatgagttcgatcaatacctgcatgagcgctacctgagcgggaaagccagaaaagatcggtggtactggaataacagtatccaacggggccgaagtacggcggtcagagaaaactggcagtggaaacccgcggtggcgtactgccgctatgccgatgattttgtcctcatcgtcaaaggcaccaaagcacaggcggaagccatcagggaggagtgtcggggtgtgctcgaaggcagtctgaaactcaggctgaacatggataagactaaaatcacccatgttaatgacggctttatctttctggggcacaggatcattcgcaaacgcagtcgttatggcgagatgcgagtggtctcaacgatcccgcaggagaaagccagaaacttcgccgcatcgctgacagcactgttatcaggcaactacagtgaaagcaaagtcgatatggctgaacaactcaaccgaaaactgaaaggctgggccatgttctatcagttcgttgattttaaggccaaagtcttcagttatatcgaccgtgtcgtgttctggaagctggctcactggctggcccgcaaataccgtacaggtatcgcttccctgatgaggtggtggtgtaaatcaccgaaaccgggtcagagcaaaacgtgggttttatttggtaaaaccaatcacggcaagctcagcggcgaaatactgtaccggttggtggggcaaggcaagaagctgttccgctggcggctacccgaaggtaatccctatctgaggacggagaccagaaacacgtatacatcgcgctttacagaagtggcaatggcgttcgccagcatttaaatggagagccggatgcgctgaaaggtgcacgtccggttcggggaggagaggcagggaaatagtccgactacgccctgcctcttactctactcagcacatggcggggcttcgtctatgtggcgttcatcattgatgtgtttgccggatacatcgtggggtggcgggtctcatcgtccatggaaacgacattcgtgctggatgcactggagcaggcgttatgggcccgtcgaccgtccggcacggtccatcacagtgataaaggttctcagtatgtatcgctggcctacacacagcggcttaaggaagccggattactggcatcaacaggaagtacaggcgactcgtatgacaacgcgatggcggagagcatcaatggtctttacaaagcggaggtaatacaccgtaagagctggaaaaaccgtgcagaagtggaactggccacactcacgtgggtggactggtataacaatcgacgattgctggaaaggctgggccatactcctccggcagaagcagaaaaagcttattatgcttccatcggaaacgatgatctggcagcctgagttcacagataaaacactctccaggaaacccggggcggttcatactctataacatactcccccatttttcgttggccttcattgcagcaaagttccggctcaggatattgggcgcagatcatcctctcaggaatttcaggatctgccagacggtgctgagacgacgcttacttgtaaggttagttttcagacggacaatgaaatgaggatatgcgataaatttcagtcaaagatccataaaacagaaataatgttattcagtggtgaacagtccattccggagacggaatatcttgttaaggctgtatattatactggctgtaaacaatactggctgtaaacaacatggccaccaaggaccatgttgtttacagcatacccttgttgcaaaagcatccccgtcagaacagcactgagtagttcagaccaaaggttcggccccggcctttgtagtcgtacagtgaagcagggccgtaacccgggctgtagtacagaggtgcacgctgtccccagacagtggtatagtcacggtcgaagaggttctcaacgctgaagctgagtgttcccaccggaagctgccaactactgataaaatcgacggtagtgtaaccattaatatcgttaccctctgcatcgcttacgtcgaaagaagtggtgctctgtacacgcagactccacggttccggcgcccagttaatgtaagctgtcgctttcgatggacttgattccttcacgtcatatttttgccattgaccgttcactttcgactcggttttcagcacattgaagttcacaccggtactccagtcagtatccgggatcaggtagtccaccgcaccttccacgccgtaaatacggcgcctgtcgtccttcacactgatggtcagatctttattcctttccacgctcttattggaaagtgagtaatatgccgcgatttgagtccgcaggttgtcaccggtaaagcgccagcccagttcataagaatcgactttcacgccttccagcttactgtcgctgacgttcacgctctttgtcagggaaagatggccgttcactgctgcaccatagatgccgcgaccataatatttccccggatccggcaatgccaccccctgggaaaaattgaaccatgcctgctgacgttcggtgatgtgcatcagcagaccagcattgaacagaaagttatcgtaatctaccgaaccaccaggaatggcgtcggcagatatcgccttcccggcagcaatcttctgttgctgcgtgtagtcgatgaaatcatctaccctgttctcagtatactgatagcgtacgccaccgctaacggtaaaaatatcattaatgtcatagctggattgcaggaaggccgccagattggtgatgtcatatgacggatagcgcccggtggtgtaaatcttatggttgttcagccctccggaagcacttgcctgagccagatcgaagaacatctggttggaggtaaagcgctcatgctcagcatccagcccccaggtgatttgccagccgtccatcagttggctgttcagagtcagtttcatgccgtactggtcggtatcctgctgtgacgaggagaaagccgtcgcctgtttattcgcatttaccgtcgggaacgggtagtaccgcaacgactcatcgcggtagtaaacctgaccgaccagttcctgtcccaggaaatcactgtcagagtactgcaggctgatcaaatgccgctcagtgccgggaatgcggtcagaattcagccccttactgacgtatggtgtgctgctcccgctgatggcggaaaagcctttcccgagattaagcccgtaattgtcgtctccctgacttttatagtactgcgttatcagttgaagctgccgggattcatcgatgttcagcgtaccggttcccatgatgtccagccgattggagtgctgcaggccggtctgggtgttatcaagcagggtggcatcgccgttaccgtcaaaccagccgccaaatttctgatatgccacggaaagacgtccggagatatggtcatttccgccggagacagcaccggcaatgcgctcatcgtgatctttactgctgttaaagccactttttgtgccagcctcaaactccatcatggtttccggctgaccttttttggtcacgatgttgatcaaccctccggtactcccgccaccgtacagggccgtcgcgccggagatcacttcaatatggtcgatattaaaaggatcgacagagtccagttgtcggctgtcggaacgtgaagagttgaggcgcacaccgtcaatcaggacaaccagtggacggccacgcatgttcataccgtagttggttcgactctggctgctgacatcaaggccggggattaactgagccagtgcgtctttcagctctttaccgccctgaatctgctgctccagttcggcattttcgataacccaggtggtttgcgccatctccgctacagttcgattgctgcggctggcagacactatgatctcattatcatcgttttgctgggcgacagctggtgacagcacgacaagaagcagcggaccaagagcccggggcatatactttttgcgcatcatcgttattcctgaatatttgctgtatagtgagttaaagaagcagcctccggctgcggttttttccggctgccgctgcgccactgaatcagtgcgggcggcatactgagatcgaataaatcacgccccagtacgcgattaagaatacgtgcagatcgccaggccatcaggctgagctggggttcggcgatgccatgagtttgcatgctggcgttgaccgcaaagatgttattttctttcgggccactccattccagagtgaagtcatcacgcactttaaaggtgttcttatcgtgcatggtgatcaagggcatcagtgagggaagtatttgtggcaatgcagaacggtaacctgtggcgaaaatcaccacatcactttccaggctctctctgccctgatccagatgatgttccatcaataacctccagcccggaccactactttccagagttgttaccgagcgactgggtagcagacggatatttcttggttttctcagaacttcaaaacggtggtacaactcacgataaatggtcagtaaagaatcggcagtgatgccatccgatgtcattttctgctcatccagtaactgatggcgaatatcttccttcagtccggagaagcctgaaatatattcaggtgtaaaatactcatcagcaaaagcagcctcatccagtgcgttaaaattattacgccgtgagacccagtttatttccgccgcttctccccattccccgcgtaatgcattaaggaacaggtctgcaccactctgtcctccaccaaccacggttatccgttttccactcaggtccggccgacgaagattcatttcactggcatggaaacaggattgtgtcacatgcttcacacagggtggtaaataaggttgttttcctgtaccaaggcagatattgcgggcaaaatattctccccgactggtctgaaccagaaacaatcgactttttttgtcgaaatcaatattttcaacggtatgactgaaatacaggttattcatatcttcagcagcccagcggagatagtcagaaaactcttcacgggatactgtacgtagcctgcttgtaaggaagcgatagaactttttgtgcttcaccagatagttaacaaagctgtagggatttgtaggtgcaactgcactgaccagatctttcagaaagacggtctgcatatgacaatccggtaccagcatacccggatgccaggaaaaatgaggatgttcgtcaaagaagagacagttcagttcttcgatctgatgtgacaatgcagcaatgctgagattaaatggccctgtcccgacaccaataaaatcgacactttttttcatgattcatattcctgagttaccagccacagcggattttgcagattctcaaggtaattcggcagcatgcgactgccgccatccagatccggccaggtcagttttaccgggttcagcaccacgcgaatgatttgtggcctgaagagtgagaaaagcgcaaaacgctctgccatttgtggatgtttgttcatgtaatcactcaacactgctgccagcagttgataaaatcgcctttcaggtacgccaagacgaaccatcagtggcgaaataaaacgcagtactgtcacgaagtgacccgtctgcaaatcatggattaagtagtccgcactcagacgggatgtgacatcacgcacctcctgaggcaaagagtccatttcgggaaacgcttctttcaccagccgcatatcgccctggaagtctttcagcagaacacgctgtggtaccccctctttcatggcgagcgttatattttgtccgtgtgcaataagcgcgacaccgtagcggcaaagcaggtgatacagcggaaccacaaccacccggaacaattgcgtaagccaggtttcagcgtccagtccggagcggtcgatatatgcgcctgccagcggctgattgttttcgtcgcactccatcagtgttgccatcagaacaggactttcatccggtttcagccagcggcacggattctcccgccagataacaccaagcatttcctggtagcgatagggagcccgggcaagcgcggcatagccttcatgggacacatagcctgcagccggttcaccaaggatcactgcgccgctttgcaccagggtggcgtcggtcgcaaaaacctgttgcagccagcgtgaagccagtggtccggcagcgatatatctgccagggatcccccggtagcatgaggtgttgtagatggtcagcggcagcttgatatccagccctccccggcggctggcgttggtcagggtacgcagcgactgctgggcgagccactggtcgccaaactcgccgagagacaccatcctgccttcggcaaaatcagcgatgaagtctgtggcgattttttgctgccactgccacggatgtaccggcagcggcagccagttgtgatccagcccgttttcctgccagacctgactgaagcgtgtaaactcctgcggatccattgcggcagtcaacaactgctgaatatccagatcgttatcgcagcgccagatcatatgttcacgttttatcgccagccagtgcagtctgaaggtgttggtatactctggcgcatatcgttccagcgcctctttgccccagccacggcgacctttattaaaaacgaatttaggatgaccgctcagcaggcattgcagacgatcggcatcaagattaatcaggtcactggcactcagtccgcgacgggccttcagcagttgcaggtcgcccagtagcgtggcatacaaatcctgcatatgctctgcaacagtggcatcactcattgacagcaccggctttagctgcatcagcagcgtctgcgccagtactggttcgtccgtgcagcgcaacgtttgggcatcaatccacagccagccccagataccacgttcagcgatgaagcgccattgtgctcccggcaggttaatgcagtagtggtcatcgccctgagattccgcatggaaaacctgctcatactccatctcagacaacatttttgccaccagccgacggttaacaaaatcccagtccttgtgattcattacagaccgacctccgtgaagaagtgatgacgatccgccatcaccatgcgcgagcgcttatgtgggaagtcgaactctttaattgtccggtatcccgcaggctcaagatggcggaacaggcgctggttatcggtgcgtggctccagtactgtgcgctgcgtacggggctcatccagcagcaggtaatgtgtcagcccgcgcagccagctttgcacatagtgggccccgcgccattgctgttcaccaaccagcagatgcaggccacggtcaaagggctgccacgaatagtgacgaccaatgcggtcttccgccgcccagtagatttcaaaatagctgaatggccgatcgtcgaagcacccaatcagcgggaatgcatgtttaccggtgagctggcgctccagataggcggtctgtacctccagtgagccactttgctcccagaaatactcaacgcgcggatcattcatccagcgggtgaaacgttctgcatcagaaacgggatcggcaatgcggaaactcagcatcctgcgaatacgtggatcgtaacggcggtaaacctcaccctgcggacggggtgggcgctgcgggaaataaatctcacgctctgcatcaaaaaccatttcaccggaggcccggtttgccggtgaactcaaccataacggtaactgccagaaggcggtacgatggataatgtcgctttttacctgcccaaaaagcgtcagcgcctgtggctcctcacaccattcggcccaggggagagccactgctgacagttgtggtgcggcgataaatatctgatccagcgcatcgcacagccaccctgtcggcagctccccgggacagtgcaacaccgcgctattgtccagtccccagccaagattcaggggcttgtcgagtttttcacagcgcagtccatatctgctgtgaataatgtttgcctcagacattcagacctcctgagcctgcagcgggttagcgaaatcgaaatagatcaccgaagggtcaacaatggtgttctcgttatgatcgttcagataacagaaaaagttaccttttacgttccagtacggactttccagcacgtagttgagacaggttttatgagtcacctgatcacgcacttcagccagcgatgctcgtacacgagccatcagattcgattcgctgtccagcccggcagcccccagcgcagcggtcacagcaaaagtggagttaaccagcaggtaataagggaaatagcgcagcaactgctcatgggtgaaaatattttccgcctgcgcctcgccaatagaatcgagccagtctgtcgcgtgaggcataaaagcgctgccctgacagtcacggtaaataaatccgaccggcagatccccaagcatctggacaagaatattttgctgatgcgccagcagcaccaggccgtaatccgcttcagccgtaaacagcggctttagcacttgctgacagtatgcatcgacccatgcatgggcggcctgttgcacagtgataccgaggcgatcgctcaggcgttttaccgccgaaaccagcagcgaatcaccgccatcaggtgcggcctgagtcagggagaccagtacgttggtctggcttttcggctgatccaccagcagattttcacgcagggcaaacagactttcctgcatgatgttgccgttaagatcgagcagcccggcccagccatcctcctgcattacccggaaagtcgggaagcggacctgtagcatctgccagccgtcggtttgagccaggcgtgccaggcgcatcccacgcttcacttctttcacggacagagtacggatggagttggtcagccgtacgctcagggagaacttgatcatatcgcggctggtggcacagtagagggaacgggaagaggtggtcggcagccacgacgtgccggcctcacctaagtctttaatcagccctttagcaacaagtgcctggcaccacccctgctgcaaaagatattccccctgccacgggtgcaacgggaacagccattggttgtcacttaattcgttgagtaactgaggcgcattctctgcggcaaatcgcgtcagccgctgttgaaggttgagatgcaaactttcaccggcgatttgcgttttatccaccgaaaaccaccgcagtgggaagtggggtgccatatcaggcaggtagcgttcagcctcccgccggttaaacggttcatgagacttaggcgcagggtggaaagcgtgtcctgtcagcagcgcctgctcagcttcgccaaaattcaacgctttttcacgcagggcggtccagtcatgacgggcatcaattgtctgttgcgtatgggcgtggctttccagcacgcgctggtggaaagtttcgcagaggggaacgggcagaaacagttgatgccgtagcttatcaataataagccgggagagagtggtaaagtcgacaggataactgcctgatgccgtgaccagacgtgcaggaaatgcaaagcggtgatgctgggttggggagaaataagccactctgaaatggagcgatttctgctcatccagcgggatgatcaattcgtctggcgggtattctgtcagtttccagtctgtggtttcacgaatcagtgcattcaggaagcactgcgcagccacatctgtggctggtttttcagagggcagggtcatagtcaaacagctcccacacagtaaaataataacaattatgtcaataatgattctcattatcaataagaaatgttattgtcagataaattaattttacaaataaacacaattaatacatggagttgaaacattaaaatgtcccctgggatcgaagatacgccccaaaaaccactgtcctgctggccacttgcgttcagtgccgggcttctcggtatcgggcagaacggtctgctggttgtgctccctgttctggtcatacagacaaatctgagtctgtctgtatgggctgccctgctgatgcttggctcaatgctgtttctgccatcgtccccgtggtggggaaagcaaatttcccgtactggcagtaaacctgtggtgttgtgggctctgggaggatatggcataagctttaccctgctagggctgggaagcgtgctgatggctaccagcgccataacaacagcggtgggactgggaatattaatcatcgcccggatcgcctacgggctgaccgtgtcggcaatggtgccagcctgtcaggtctgggcattgcagagagctggagaagggaatcgcatggccgctctggcaaccatcagctccggcctgagttgcggcaggctattcgggccgctgtgcgcggcagcaatgctggccattcatcctctggcgccactggggctactgatggcagccccagtgctggcgctgctgatgctgctgcggttgcccggcacaccaccacagcccacaccggagtgcaagagcgtcagtctgaagcgggattgtctgccttatctgctttgcgcaatattactggctgcggcggtgagcatgatgcagcttggactttcgcctgcccttactcgccagttcgtcacggataccaccgccattagccaacaggtggcctggctgttgggtctgtccgcagtagctgcgcttatcgcgcagttcgggggtactccgtccgcagcgcctgactccggtggccctgctcctgagtgccggagtgttgatgagtggtggtctggctatcatgctctccgaacagctatggttgttttacccgggctgtgcagtgctgtcatttggagcagctctggcaacacccgcttatcaacttctactgaatgataagctggctgatggcgcaggcgcgggctggctcgctaccagtcacacacttggctatggactgtgcgctttgctggtgccgctggtatcgaaaacaggtgtcgcaatcgcgctgattatggcagcattatttgcaactatattatttaccattgtgtctgtatttatctggcattaccgtactatcaaataaagatatgatcatcaccttactggagtaaatcagaggatatgagagaggacctgcgtctgatgaaagcatgtcaggcagtgttctggcttgctgcccccgcccatcaggtatagtgaattcaaccagttgctgcggtgtaatctccatgattctttcgtgcaacaacctatgatcccgtttaccattaatattcagcgttgctctgttattaaatttcattctgacaagccagtcagcttttattccgggagtctgctctgcgcgttcaaacaggtcataaaaatcgccttcacgatcagaaattgacaatacatgggtatcagggcattggcgagccagttctgttgctttattatatccttcaacccaacgccaggtttctttttcactgacatgttttttatgaagtaaatcattgcagatttcttgtcgggtatttttactggtttttaattcatccctgaaccactgatagtcatcataaacaccgaggcaaacacctgactcactgatgacgagttgaggatgaagaaataagtttctttcatctttatgttttttgtgaccaactccttgtttttctttctgaccagaataattaagttctgttgtatcctgtaaaactaaaactcttttaaactgctgagctctttcagtgatattttctttgtgaggagccataattttattagcagagactttatcgtttgaaaaacaaagataagctgcctttgtttcactccaggtacggcaggaaacaggaatactttcttctggtgaacgactgaggctattgaggatatgttttactcttttatcaagtcttgagtcccctatatccagtgattttagctcctgaataacccagttttccataacacctctgaaataatctctgtcttttcaatataatactattatttcaacttgtgggtaagggtatgagatgcgaagtgatgatcgatagtgatgcgaataagtgttcgattcagatgcgattatgcaatatgattttatgtgtgttgcttaattatcatatttcttgcccgttccccgccgcgcagatccggtttccggctgaagtggatacagacctgatttgttgctgagtatcggtaaaagtgcggcttataagctattctgaaacatggcaagtgaatctgggcggtataattccggcaaatgtcatctgtatttaaaggacgtgtgagtatgaaatttctggaatgtgctgtccgggatgtgatttatgggatcaatgtccgtattgtcaaaccggtcaacatttatgaatgtgaactcagggacaacgtgtttgtcggccccttcgttgagagtaagcgtcaacggagcaccgtattgacgcttatttattggtgagtactacgttccatggcaggagttcgccaactcggttggaaggccattccggcagtacgctcagaatatggcgcagatacgcttccggatcgataccgttcagacggcaggtgccgatcagcccgtacagcagtgcaccacgctcgccgccgtgatcgctaccgaagaacacgtagatggtatgacctttatatactcactatagcattggtgggatattccagaggaggtcattatgcattcggaaaatattgcagcttacatcgggctggatgtgcataaagaaacgttggcggttgctattgctgcacctgaacggcttggcgaagttcgttattatggtacgattaacaacgaagccaggctgtacgtcgattatttcagaaattgcagggactttacggaaacattctttcctgctatgaggctggcccctgtggttttgggctatatcatcaactcacagcgatgaatataaaatgccaggttattgccccttcccggataccaaaatcaccgacagacagaatcaaaaatgatcatcgggacgcaatttctcttgccaggttactgcgggctggtgaacttacccctgtctggatccctgacctgactcatgaagctatgcgggatctaatcagagcccgtgcagcagctaaacgagacagcagagttgcccgacagcgaattctgagcatgctattgcgaacagacaaacgttatgcagggaagcactggaccggcaaacatcgaacctggttagctaatcaatcatttagtcagccatctcagcagattgcttttcaacactattgtcaaagtctggagcagattgaagatcgcatacttcaactcgaccagaaaatatctcgcctgttacctgagtggtctctgtgcaatctggtctgccagttgcaggctctaaaaggtgttggtcagctaattgcaataaccctggttgctgaactgggtgatttttcgcgattttccaatcccaaacagctcatggcttttctgggactggtgccaggtgaatattccagtggaaacagtattcgtcccagaggaataacaaaagttggaaacagcgaactgagacgtctgctttacgaagccgcctggtcttatcgtacacctgcaaaagttggtgcatggcttatatattaccgaccggattctgtaacacaatattccaaagatattgcatggaaagctcaacaacgattgtgttctcgttaccgaactctgacagcaaaagggaaaaaatcacaagtagccattacggcggtggctcgtgagttgactggatttatgtgggatattgcacttgctgcccaatcatcattcagtcagcagaagcaaaattataccctgtgaaccgccccgggtttcctggagagtgttttatctgtgaactcaggctgccagatcatcgtttccgatggaagcataataagctttttctgcttctgccggaggagtatggcccagcctttccagcaatcgtcgattgttataccagtccacccacgtgagtgtggccagttccacttctgcacggtttttccagctcttacggtgtattacctccgctttgtaaagaccattgatgctctccgccatcgcgttgtcatacgagtcgcctgtacttcctgttgatgccagtaatccggcttccttaagccgctgtgtgtaggccagcgatacatactgagaacctttatcactgtgatggaccgtgccggacggtcgacgggcccataacgcctgctccagtgcatccagcacgaatgtcgtttccatggacgatgagacccgccaccccacgatgtatccggcaaacacatcaatgatgaacgccacatagacgaagcccgccatgtgctgagtagagtaagaggcagggcgtagtcggactatttccctgcctctcctccccgaaccggacgtgcacctttcagcgcatccggctctccatttaaatgctggcgaacgccattgccacttctgtaaagcgcgatgtatacgtgtttctggtctccgtcctcagatagggattaccttcgggtagccgccagcggaacagcttcttgccttgccccaccaaccggtacagtatttcgccgctgagcttgccgtgattggttttaccaaataaaacccacgttttgctctgacccggtttcggtgatttacaccaccacctcatcagggaagcgatacctgtacggtatttgcgggccagccagtgagccagcttccagaacacgacacggtcgatataactgaagactttggccttaaaatcaacgaactgatagaacatggcccagcctttcagttttcggttgagttgttcagccatatcgactttgctttcactgtagttgcctgataacagtgctgtcagcgatgcggcgaagtttctggctttctcctgcgggatcgttgagaccactcgcatctcgccataacgactgcgtttgcgaatgatcctgtgccccagaaagataaagccgtcattaacatgggtgattttagtcttatccatgttcagcctgagtttcagactgccttcgagcacaccccgacactcctccctgatggcttccgcctgtgctttggtgcctttgacgatgaggacaaaatcatcggcatagcggcagtacgccaccgcgggtttccactgccagttttctctgaccgccgtacttcggccccgttggatactgttattccagtaccaccgatcttttctggctttcccgctcaggtagcgctcatgcaggtattgatcgaactcattcagcatgatgttcgataatagcggcgatataacaccgccctgtggcacaccttcactggccgcccgaaagagaccgacatcgatatgtcccgccttgatggttttccacagcagagtcatgaaacgtgcgtcactgatcctgcggcgtacaaccttcatcagcagtcgatgatgtacggtgtcgaagtaactggacaggtcgccttcaatcacccagcgtccccgggtttcaccacagtctgtgagctgtaatttcaccgtgcggatcgcgtggtggacactgcgctcaggccggaagccatatgagagcgtatgaaaatcactctcccatatcggctccatcgccatcagcatggcccgctgaacaatacgatcccgcaacgcggggatacccagtggtcgcagtttgccgttgcttttagggatgtaaacccgtctggcgggcaaggctggtagtggcctgagagtaattcatccctgaggatttgcagctcaacagccagtctggcctgtagcattgttttgttcacgccatcaacgccgggggtatgggccccctttgatgaaagcgtgatccgcgccgcttcagccagccattctggttgtgttatcagacgcagcagccgttgaatccgtagggacggatcggtggctgcccatgtggcaagcttgcgttgcatttcgctgattatcaaaggtcttcacctcgttaggtcagttaattcacgtcgcaaacacattcaaactgcttcccttcgccatgtaatgggctttccccatcgcggactactacggaagctccgccagccagcgcgtcatcggagccatgcccccttaacatccgtcgctgaccttccccggtttacctgcctggactcaggcatactgaggaggctgcccgtcgcactctttatccttgcttgccgcaagttggcagaagtcagcaacgcaagtgtgatagacgctgctgccccggtgtttcgcatacatgtcaaaacaccttcgaccggcagtgcttacgtatcactgccagttcctcctgcacggcctgtcagatcacgtaggccgtggtgacgttttcaacccacagaggcggattaacgggttcatgttcttcagcctttcagtacttaaccttgaggatcatctcggcttagtgatctcgcctcaatccccgttgtcagcgggttacatcaccctgcgggcatgccgcaggtcactgccgctcaggttctccaccgtcacacccggtgggattgttgggtttctcatcgtgagttaccggttcaatattccagacagactcgcggttcatttaagcatccatgcccgccctgaactccgggcacaccgtaagtaaaatcagccacccacagctggtcaggtcgttctgccacgaactgacggtttacgcggtcgcctgcggcaacggctttccggctgatggtcgtacggacctttttaccccggagaacaccggcaagtcccataaccgccatgagacgtgccacagtgcatctggccactctgataccttcccgtaacaactgacgccagactttacgcacaccgtataccttgtgattttcatcgtatacgcgctgtatctctttcttcagccagtcatcgcgctgcgcacgggcactgcgtttatccggatgatgtcgctgttgctgacagtggtaatacgttgacggggcaatatgcagttcactgcataccggtccgaccccgtacagcttacgcagcttatccagcagtggcatcactttttccagaggcggtcgaactccgccttcgcaaaataagcggaagcctggcgaaggatatcgttactgcggcgcagttcacgattttcacgttccagctctttcagacgctgacgttcagcggtggtgagccctccatcaccgcccccggtatcccgctcatgctggcgaacccagacacgcagagtctccggcgtacagccaatctttggagcaatggaacaaattgtcgcccattgtgagtcatattcgctctgactttccagaaccatacggactgcccgttgacggacttcgggggaaaaacgagtatttttagtcatcctgtttacctctttctcaggaagtttagtctccaggattcccggggcggttcactgaagcagtcagacacggaatgagtgatcctcgaaaaagaattcagggaagccagaatgcgctaatacctgcacgtagaaagaggccagctcactgcgtaaatcgtcatggggctaaaatccccgaataagagtttgtaaaatccaagatacagtctgactgtttcaggttctttaatccgcgatataacgaagctcccggagctgcgtaggtctttttgggcttaatatttgacaaaggtcataagaatttttctttccgagacagactgcacgaagcgctctttccgctgtgttattgtccgcctccgccagaccgtcatcacagaagttgcacaacgtaacccagtgcttcctgatataccggaacgcatctctcagacggcattttttcgataacgtgtgttctttctcctgcatcagcttatacagggaagtcagtagcggtttactctgcatttgcctgaccgccaggcgttcagacaccggcaacccgcgtatttcgtgctcaatggcgtacagttcaccgattagtttcagtgcttcttccgccgtcgcgcttttggtactgatatatacatcgtggattttgcgccgtgcatgagcccagcatcctgcttccgtcaacgcgccgccttctgcagaatgagtcgtagatggagagtggatgatgcagggggtgtttgtcgaagttcaccagattttcatcaagatgcacgtcatactctttttctccggaggcagtgccagcatggactgctgctcttcgagccagcgatcgcagggacgtgcctggattgtttcatgctttcgttggttagcgacatcgtgcagccagcgcagaccgtggcggttggctgtttcaacatcgacagtgatccccatcgggcgcaggcgagtcattagtgggatgtaaaaactgttacgggtgtactgcaccatccgttccaccttacctttagtctgtgccctgaaggggcgacacagtcggggagagaagcccatctccttgccgaactgccacagcgaaggatggaaccggtgctgaccggtctgatatgcgtcacgttgcagaaccacagttttcatattgtcatacaacacttcgcgcggcacaccaccaaagaagcggaacgcattacgatggcaggtctccagcgtgtcataacgcatattgtcagtgaattcgatgtacagcattcggctgtatccgagaacagcaacgaacacgtgaagcggtgagcgaccattacgcatagtgccccagtcaacctgcatctgtcgtccgggttcagtttcgaaccgaacggcaggctcctgctcctgaggaaccgagagagaacgaatgaatgccctgagaatggtcattccaccacgatatccctggtctctgatctcgcgagcgattaccgttgccgggattttgtaaggatgagcatcggcgatgcgttgacgaatataatcccggtattcatccaggagtgaagcaacagcaggtcgcggcgtatattttggcggctcagattttgcctgcaaataacgtttaacggtattgcgggagatccccagttctctggcaatcgcccggctactcattccctgcttgtgcaggattttaatttccataactgtctcaaaagtgagcataaactctcctgaatcaggagagcagattaccccctggatctgatttcaggcgttgggtgtggatcactattgcaccgttcgtgacaccatccgcagactcatcttgcttgcttcagcggtgtgctgcaagcggatgcgtacgccgggttcaacgagctgtatcgcaatgatgggataacggaagctgcctgctgggttcatgcccgccgaaagatccacgatgtgcacgtccgcactgacggaagaagccctggagcagatcggtcagttgtacgccatagaggcggatataaggggaatgccggcagagcagcggcttgctgaacgtcagcgaaaaacgaaaccgctgttgaaatccctggaaagctggttgcgtgaaaagatgaagaccctgtcgcgacactcagagttggcgaaggcgttcgcgtacgcacttaaccagtggccggcactgacgtactatgcgaacgatggctgggtggaaatcgacaacaacatcgctgaaaatgccctgcgggcggtcagtctgggtcgtaaaaacttcctgttcttcggctctgaccatggtggtgagcggggcgcgctactgtacagcctgatcgggacgtgcaaactgaatgacgtggatccagaaagctaccttcgccatgtgcttggcgtcatagcagactggccggtcaaccgggtcagcgaactgcttccgtggcgcatagcactgccagctgaataacacatccccgtcaatacggccctcgctgtacgcttaccgcttatccaacggacatccgcaaagtgatctatacgacgaatgccatcgagtcgctaaacagcgtgatccgccatgcgatcaaaaagcgtaaagtgttcccgacagacgactcggtgaaaaaagtggtgtggctggcaatccagtctgcgtcccagaaatggacgatgccgttgaaggactggcgaatggcaatgagccgctttattatcgagttcggtgaccgcctggacggtcacttctgagaaaggcatttacacagaatcttaaacaggctcgcgccagtcggcaaaactagttgacgtctaatacactcccccttaccgaagaccttcagttttatattttaagagtctctgagaaaggctgccttccggcagccctttacccccacatcagaacatataccggaaattcgcgtttaccgcattatccacgttatatttaccaaaggctgacttctcaaactccagaccaaagcgcatattgtcctttatctgcgcattcataccaacattaaacagcatccggctgtccttctctccttttatccgtttctccccggacgcatcacgcagtacggtctctccattattcagcaggtcaaactgccagctggttccggcacgggccgtcacactccagtccttaccactgaaggtcttgcccagttcaacccctgttcttccaaccagcggactgaagtccctgttcttcatgctcaggtccatatcaccgtctttccagcggaatgttttcccggacacggcgccgtaaaccagttcagcctgcggctcaatgaacgtgtcctctgtcaggtgatagcggtaacccgtttcagcaccggcataccaggaatgggtgttgtagtgtttcgttcccaggctagcaaagttacctgtgtaatcattgtcatggtgaatatatttaccaatcaaatcgatataggcaccggactcaaacaatgctgaagcatacagaccgccccccaccgatttcgtctttccgctgaatgcatggctgtctgcactgctgtcggtataggtcatcgtgacaccggtaaacaggtccacaccgtccagttcatgttttttgtcaaagccgacctgaacatgggtgtaattatcactgtaaccaccgtctgcagaaccggcaccactcatgatgcgcgcccaggcaccggcatcaccgtttgtgtcacgcaggtcacccatacgtttgttcagattgttaacttccgtcatgaagtttttatacccggcattcatgaaactgtcagccttcgcggcagcggctttatcagcctccgctttaaaaccatccagtatccacttcgtattgccaccactggtatcaacatgcagggttggggtcacccgactgaaacctgtcacccgggtgccggccttaaacatctctgctgaagttcccgccggtgccgtgaccagaggaatattcagggcctgtccctgagcaggattattcataaagctgacgttcaggctgttatctgaaccagtggctttttcagtcacattaattttatcggcatttttcaggtccgtacgcaaaacaaaatcactgcctgttgcatccagtttattcaccgtcagggtacggaatgtacggtctccttcagaactaatacggctgtttctgacggtaagactgtggatggcagagtccccacccagagtccacagtgcattatgcatactgacatcagccctgccaccggttatggcaccattgaatgctgcgttatagccctcaagaagactgccggcaaacgccgatgcagccgtttccgcagaagccagttctgccggcgtgtcagacccgatggtaactgttgatgccgcagaggcatgaatatcaccggaagcatgtgctccacgggtaatttccagtgctgcgttatcgccggtcaggtcatatccgtccgtcagatatacagcaggggcatactgattagccgtatctttaaccggtgtaccgctcagggtgattttgccgttcttaccggcctgaatatgcccgtcgctgaaaagaccgttcagtgctgtaagatgaccgccatcatgcactgtcagtgaactgccggcaaaagcacccggggctgtcaacaggacgtccggagaggtgatgctgacggcactgtcataagcgtcaatcccccggtgaacctgctgccgatatccagggctgagttatggttcagcgtaatattcccttcatactggctcctgtcattcacggtgtccgggacagaggtaccttcctccggaatgacataatttcctgttccgtcatttttatccacaaatgccctgtcacttcccagtgtgatatggctgttatccgacttaatgtcactgttcagcgaggcgttacgtgaaagatggaagtcagcgtctttcagcgacagtgttttcattgtaaactgacggttttcccagtctttctggttcaggctgaccggtgcactgccactgatggaggcatggataaccggatgtccctggaatatcagggtgccactgtcctgactcagggtaccttccggcaggttcacgctaccatcaaagatkacctttcttcccccnggcacctgtggaatggcgacatccatattcccggtcagctgaccatgaaagataacgggttgttttgcccgcccggccaggatcctatcttttactgtctgaactgctttgtttttgttcatgccaacaaactcccactgagccggatcattcaggctgttcccccacagagtgttaccatagctggcagatttcagaatatagaagcgggtctggctgttgagtatcatgctgtacaggtttcctggagtgccggtaccaccaaagggggatatatttccaatcgtcggttcactgacatttgtatcctgagccttaagatccagtaaaagctgggatttttgctgtgcattatttgtaatcaccgccccgtaatcagcagcctgcagtcgggtgaaggtaacggcattaccattaaggtcaagcttacctccccggtatccccatgaaatgttatccggattgacctgacgggcatccccgagcaccacggtcggacgtccgctggcgaggttcactgaactgaaggcctggatattacctgcagtgtctgcctgctggttaagtacaacgataccgtctcccgttttcagtcctcccgggtttacacctgttccgtttatggtcagggttccttcccccagcttatgcaagttgtcaccggcaacgccgttgaccttccaggttacattcgtccccttgtcagtaataatgccggcacccgtccatgtttttccggattcagcagatacggtgtaactgtctttaaattcgagataaccggcaccctgagtcacactgtctttcaggataattgcaccattctgcccgctgaatacctagatttttaccggcattgaggtcattgtctttctgcccgtgcatggtccagtttttactgccctggctcagggtacctgtgcctgatgttttgtcgtatgtccagttcagggggcccagtccggaaacaaagtctacgggggcatcgaaatcgtcctgcataacctggttcagataatctgttggtatgacattccaccagttcgtagcaccattaatacctgcatatgctcttaatacagcaacaataacccattttttttgttgtttatcataagcaaacaaaggagaaccactatccccaggggctccatagtcaggtaaagggccgtttacaggattataagtttgcccgggattagagactattgttgcatcagatatcagaggaactcctgtggttcctcctgttttaaaagcatatccaccggcaaccttaactaaatttccgtccttgtccttagtgtactgcgtaccactacccacccgataaaaagcggtgtaacgttcagtgtatttataagcattggctttggttccttctgatgttaccgctgagggaataacttctgtaaccagtttattcagacgtggagcatggaagtcaatagaagggtggttattacggtcaacaagggaatatgtatttttcccattaccaaagctcacactccgatatcctccgttatgctttacgctgacgatatactgaggcgatacaagcgtagcaacgccatttgagctcacactgctgaaatcggccattggggctttacccagtcttcccacaagttttccgtccttatcatataccggaatatcattggcaccaggtacaaaaagccctttgttttcggcgaaatcacgataaatctgataggcaatatcggaacggacaatacccgcctgggatatctgagagtaacacagacagattgctggaatgccagccagaagaatatgcgttaatcttcggcatgtcttttttattaccctgcgggcaagttcagagacagcaataagccccccggtgacggggcaatatttaagagaataaactttattcactatggattctccatgatgtttacaagggatataaaagtaaaatagctgaagaagctaatgataacccgacgttatcaccagaaaggaaaatatagttactgcattaatgtgtttttgtgaactgaaccgccccgggtttcctggagagtgttttatctgtgaactcaggctgccagatcatcatttccgatggaagcataataagctttttctgcttctgccggtgggatatggcccagcctttccagcaatcgtcgattgttataccagtccacccacgtgagtgtggccagctccacttctgtccggtttttccagctcttacggtgtattacctccgctttgtaaaggcccttgatgatctctgccatcgcgttgtcatacgagtcaccagtactccctgttgatgccagcagttttgcttcttttagtcgcgccttataggccagtgacacatactgagagcctttatcgctgtgatggatggtgccagacggacgacgggcccacaacgcctgctccagtgcatccagcacgaatgtcgtttccatagacgatgagactcgtcaccacacgatgtatccggcaaacacatcaatgatgaacgccacatagacgaagccctgccatgtgctgagtagagtaagaggcagggcgtagtcggactatttccctgcctctcctccccgaaccggacgtgcacctttcagcgcatccggctctccatttaaatgctggcgaacgccattgccacttctgtaaagcgcgatgtatacgtgtttctggtctccgtcctcagatagggattaccttcgggtagccgccagcggaacagcttcttgccttgccccaccaaccggtacagtatttcgccgctgagcttgccgtgattggttttaccaaataaaacccacgttttgctctgacccggtttcggtgatttacaccaccacctcatcagggaagcgatacctgtacagtatttgcgggccagccagtgagccagcttccagaacacgacacggtcgatataactgaagactttggccttaaaatcaacgaactgatagaacatggcccagcctttcagttttcggttgagttgttcagccatatcgactttgctttcactgtagttgcctgataacagtgctgtcagcgatgcggcgaagtttctggctttctcctgcgggatcgttgagaccactcgcatctcgccataacgactgcgtttgcgaatgatcctgtgccccagaaagataaagccgtcattaacatgggtgattttagtcttatccatgttcagcctgagtttcagactgccttcgagcacaccccgacactcctccctgatggcttccgcctgtgctttggtgcctttgacgatgaggacaaaatcatcggcatagcggcagtacgccaccgcgggtttccactgccagttttctctgaccgccgtacttcggccccgttggatactgttattccagtaccaccgatcttttctggctttcccgctcaggtagcgctcatgcaggtattgatcgaactcattcagcatgatgttcgataatagcggcgatataacaccgccctgtggcacaccttcactggccgcccgaaagagaccgacatcgatatgtcccgccttgatggttttccacagcagagtcatgaaacgtgcgtcactgatcctgcggcgtacaaccttcatcagcagtcgatgatgtacggtgtcgaagtaactggacaggtcgccttcaatcacccagcgtccccgggtttcaccacagtctgtgagctgtaatttcaccgtgcggatcgcgtggtggacactgcgctcaggccggaagccatatgagagcgtatgaaaatcactctcccatatcggctccatcgccatcagcatggcccgctgaacaatacgatcccgcaacgcggggatacccagtggtcgcagtttgccgttgcttttagggatgtaaacccgtctggcgggcaagggctggtagtggcctgagagtaattcatccctgaggatttgcagctcaacagccagtctggcctgtagcattgttttgttcacgccatcaacgccgggggtatgggccccctttgatgaaagcgtgatccgcgccgcttcagccagccattctggttgtgttatcagacgcagcagccgttgaatccgtagggacggatcggtggctgcccatgtggcaagcttgcgttgcatttcgctgattatcaaaggtcttcacctcgttaggtcagttaattcacgtcgcaaacacattcaaactgcttcccttcgccatgtaatgggctttccccatcgcggactactacggaagctccgccagccagcgcgtcatcggagccatgcccccttaacatccgtcgctgaccttccccggtttacctgcctggactcaggcatactgaggaggctgcccgtcgcactctttatccttgcttgccgcaagttggcagaagtcagcaacgcaagtgtgatagacgctgctgccccggtgtttcgcatacatgtcaaaacaccttcgaccggcagtgcttacgtatcactgccagttcctcctgcacggcctgtcagatcacgtaggccgtggtgacgttttcaacccacagaggcggattaacgggttcatgttcttcagcctttcagtacttaaccttgaggatcatctcggcttagtgatctcgcctcaatccccgttgtcagcgggttacatcaccctgcggcatgccgcaggtcactgccgctcaggttctccaccgtcacacccggtgggattgttgggtttctcatcgtgagttaccggttcaatattccagacagactcgcggttcatttaagcatccatgcccgccctgaactccgggcacaccgtaagtaaaatcagccacccacagctggtcaggtcgttctgccacgaactgacggtttacgcggtcgcctgcggcaacggctttccggctgatggtcgtacggacctttttaccccggagaacaccggcaagtcccataaccgccatgagacgtgccacagtgcatctggccactctgataccttcccgtaacaactgacgccagactttacgcacaccgtataccttgtgattttcatcgtatacgcgctgtatctctttcttcagccagtcatcgcgctgcgcacgggcactgcgtttatccggatgatgtcgctgttgctgacagtggtaatacgttgacggggcaatatgtagttcactgcataccggtccgaccccgtacagcttacgcagcttatccagcagtggcatcactttttccagaggcggtcgaactccgccttcgcaaaataagcggaagcctggcgaaggatatcgttactgcggcgcagttcacgattttcacgttccagctctttcagacgctgacgttcagcggtggtgagccctccatcaccgcccccggtatcccgctcatgctggcgaacccagacacgcagagtctccggcgtacagccaatctttggagcaatggaacaaattgtcgcccattgtgagtcatattcgctctgactttccagaaccatacggactgcccgttgacggacttcgggggaaaaacgagtatttttagtcatcctgtttacctctttctcaggaagtttagtctccaggattcccggggcggttcacagctactgycwacacattcgataka

SEQ ID NO: 208 - DNA, 6450 bp, Escherichia coli
  modified_base (20)..(20): a, c, t, g, unknown or other
  modified_base (6174)..(6174): a, c, t, g, unknown or other
  modified_base (6192)..(6192): a, c, t, g, unknown or other
tgcacgatgcattgttggtngcccggccagaggatgccccgtcgctgcatatggatcagggttggcaatatcgaatcgcaggctataggcaaagttaaagccccatggagtagcacaaaatatgccgcacaaaggaaacggtctgaataacgcagtgatgaagaacttcttcagcacacggctaaaacgcatagtgatcgagcgctgattctagcgaacaactgaactaatacatcagaatctgcattatgttaaataaatataaaaagatggtttaaataccccgttacttttgacttacactatacggtatcgcatcgtttaatattcgcaccggccagatttttatttctattagttgtcacaatactgaatgcgtacgaccacagtattctggctcctgtgtggttatgctttaattctgcgttccgggcagataagcagttgcttgcaggaatccttcttgtgttaatgtcagttcccctttttaccagtgctgatttccacattccgtccaacagagcttatagcctttccctggattatagcattgtccggctgaagttctttttgaataataatagaagcactgctggcagatccagtccgtttttcataacccactgtactgataaccataatctaatcagtagaaattgagtcgaaaataagcactactccatacaggataattagaggtcagtttgattattcacaattcatcatcagcattttctatttctgacgaaatcaatatgaaaataaccatatatgataattattataataacggctttaattggaatacatatattacaacgtattatatataattggtattctgggaactatattctcaaaatacagtagaaacgaggtatgtttctggtggaaaggacagtgggattaaaaagtaagaattgataaaaaaaacgccagcaacacatagtgccggcggagggaataccccatggagaaaatgtgatgcctagagcatcatgaatatataattaaaaatagttagcgttgtcaatactttcacaaaaataattttcgtagtwtcgtagtatagaaagatatttttatgcatgacctacctgaatttgctccgggtagaggttataaataaaaattgaatcacgacaaacacaatattcatagtatggcgatgcctacgccagcaagaatagcgccaataatattgggaatataatagacaccagacgcacaggcatctcactccttaacaaacaacaatcaggatatttacttttaccaagctaactgtttacacccaaagcgcacacaattaaccattcaataacaaatggcaatatccatagccatacgactttaccttgtaatgttcggtatttctttataattattctgggaaatctatcatttatttttaaaatcaaattatcttgttgtttaaaaataagttcacatactttatcatcttcttccgccatcaacatctctgcatacttaaacatttcagaacgttcctttagcacagaagagtaattatatgtccagttcccaggcaataatgcttatggatatttaattcataatttagagaatattttgcaataatatttggcagtattcagaaatacctgaaaaatcatactatacagccccagggaatggataaagattctaacaaagcatttcaacaatatatacttgttaaaaatccatatcgaaatgccgttgcagcattaatatatgcctcattcataaaatgtaaaagagcaagctcgtaccagtaggggggaaattcattgacatgtcctgtcaatacgtacagagccctgccatgcttgccagcacgtaacaattccgcccccagtaaccagcgtgtcccctgattattctcagggttatatgttagtattttatcaatgagtataacggcatcctgatgacgctgtaaatgaacattcgccagaattgcagcataaagagcgcaaatgcatatgccagatgagcgtgaatatcaatgatgtcaggagcatgtcaggcaagacgcctgagtttgttgacgtaatttgtttcgtttatttcatcactatcgtatgcgtcaagagttttttcaaactcatcccgaaatgggctaagcctggtttcaggaaataagaaatacccctggttattgttcacttaaaagtataatttgtaattcaaatcctgagcctgtaaagcggggagtaacatattctattctgaagagaataaaagtcgtgatgcgatgtatcaagcccggattgtaatcccagattaacatagatcacaaaacaacttattcttcactaacgtcaagataaatatcgttgtatgccttatcacgactacgaataccagcaagatacaactgacatacggaaagataccacgttttttactcccgaaaataacgctaaaaagctacttccccatcgtttgtccttagtattgtcagcgccaacaatgtgggctgacatgataaagctgtctaggaaattgttcgcctcctcagcggacaatccaaatggtgattgtctctgttaaacgtttattttgaaggtcgactgaataaggtgatgacgctgtagaatttttcacgtgccacagaattttgaacgctttctcttacaatatttcaatgtttctatcagtattcgccggaagaagtcatcgaccaaatcatcccagtcgtctcgcaccactgaccattcatggttgacatgtggtggaaatccgcttctacagtaaccattttttattcgcaaaaccgaacacgacatacggatagctgttaactggcatgccgaggcagtcgttatttatatttagttttgtcaataatctttattttttgtaaaaggtaaatataaattattctcattattgtttgtatttgtgtattgtcttgccggttaacatgatcggagattagtaatatgcgaataaccactctggcttccgtagtcattccctgtctcggattttcagccagcagcatagctgctgcagaggatgtgatgattgtctcggcatccggctatgagaaaaagctgactaacgcagccgccagtgtttctgtgattagccaggaggaattgcagtccagccagtaccacgatctggcggaggctctgagatcagtagagggtgtggatgttgaaagtggtacgggtaaaaccggagggctggaaatcagcatccgaggaatgccagccagttacacgctgatactgattgatggtgttcgtcagggcggaggcagtgacgtgactcccaacggtttttctgccatgaataccgggttcatgccccctctggccgccattgagcgtattgaggttatcagggggccgatgtccacactgtatggctctgatgcgatgggcggtgtggtgaatatcattaccagaaagaatgcagacaaatggctctcttccgtcaatgcagggctgaatctgcaggaaagcaacaaatggggtaacagcagccagtttaatttctggagcagtggtccccttgtggatgattctgtcagcctgcaggtacgcggtagcacacaacagcgtcagggttcatcggtcacatcactgagcgatacagcagccacgcgtattccttatcccacggagtcacagaattataatcttggtgcacgtcttgactggaaggcgtcggagcaggatgtgctctggtttgatatggataccacccggcagcgttatgataaccgggatgggcaactggggagtctgacggggggatatgaccggaccctgcgctatgagcgaaacaaaatttcagctggctatgatcatactttcaccttcggaacatggaaatcgtatctgaactggaacgagacagaaaataaaggtcgtgagcttgtacgcagtgtactgaagcgcgacaaatgggggcttgccggtcagccgcgggagcttaaggaatcgaaccttatcctgaattcattactgcttacccctctgggagaatctcatctggttacggtggggggcgagtttcagagctcgtccatgaaagacggagttgtccttgccagcacaggtgaaactttccggcagaaaagctggtcggtatttgctgaggatgagtggcatctcacggatgcacttgcgctgactgcgggcagccgctatgaacatcatgagcaattcgggggacacttcagtccgcgtgcatatctggtctgggatgtggcagatgcctggacgctgaaaggcggtgtgaccacgggatataaggcacccagaatggggcagctacataaagggattagtggtgtgtccgggcagggaaaaacaaatctacttggtaaccccgacctgaagccggaagagagcgtcagttatgaggctggggtgtattacgataaccccgccggtctgaatgccaatgtcacaggttttatgactgacttctccaacaagattgtctcttattccataaatgataacaccaatagctatgtaaacagcggaaaggcccggttgcacggtgtggaatttgccggcacattgccgctgtggtcagaggatgtcacgctgtcactgaattacacctggacccgaagtgaacaacgtgatggtgataacaaaggtgcgccgctgagttatacccctgaacacatggtgaatgcgaaactgaactggcagatcaccgaagaggtggcatcatggctgggtgcccgttatcgcgggaaaacaccacgtttcacccagaattattcgtcactgagcgctgtacagaagaaagtgtatgatgagaaaggagaatacctgaaagcctggacggtggtggatgcaggtctgtcgtggaagatgacggatgccctgacgctgaatgctgcggtgaataacctgctcaacaaggattacagtgacgtgagcctgtacagtgccggtaagagtacgctgtatgccggtgattacttccagacgggatcatcaacaacaggatatgtgatacctgagcgaaattactggatgtcgctgaactatcagttctgataataacaaaacgctatcactgacggtagaatacgttgccactgcaactcctggcggaacagtggcaacgtattaggttaagtgcatttccgatccgctaatgagatttcgttaccaacaactaatatcgtcacaggaaatgcacggattatttttaacttatcatttacatacttgtccagagtgtaagcgcaccgtgaaggacgtggggtaaaaattagtttacagagagagtgacgttccaaggcaacaactctttcatgcggttggcaggccaggtgttgattacactgatcacgtggcgtagccacgtttccggctcgattccgttaagttttgcagctaccgatcaggctgtacatcactgccgcactatcgctcgtcatctcaaagtccggtctcgtcagcaggaaggtatcattctctcccgccatttttccaggggcccggtcagataagtccctttgtctatcgctgactcctgactcataacccggttagcagaatgcagggtcaccacctcgccacgaccgaatccgaataagtcaattgcaccttctcaatcgccattttggtaagcgtcaacggagcaccgtattgacgcttatttattggtgagtactacgttccatggcaggagttcgccaactcggttggaaggccattccggcagtacgctcagaatatggcgcagatacgcttccggatcgataccgttcagacggcaggtgccgatcagcccgtacagcagtgcaccacgctcgccgccgtgatcgctaccgaagaacacgtaatttttctttccgagacagactgcacgaagcgctctttccgctgtgttattgtccgcctccgccagaccgtcatcacagaagttgcacaacgcaacccagtgcttcctgatataccggaacgcatctctcagacggcattttttcgataacgtgtgttctttctcctgcatcagcttatacagggaagtcagtagcggtttactctgcatttgcctgaccgccaggcgttcagacaccggcaacccgcgtatttcgtgctcaatggcgtacagttcaccgattagtttcagtgcttcttccgccgtcgcgcttttggtactgatatatacatcgtggantttgcgccgtgcatgagnccagcatcctgcttccgtcaacgcgccgccttcacgttcggcactgaacagccgatcgtaacctgcgaacgcatctgcctgcaggataccccggaagggacgaaggtgttgctccggatgtttaccctgatggtccggtgagtaggcgaaccagaccgccggaggttctggcgaaccggcatttcggtcatcccggacatacgtccagatatatcctgttttcgccttcttcctgcccggtgccagtacttttactgg

SEQ ID NO: 209 - DNA, 2787 bp, Escherichia coli
agccgggaaataatgcgggcaacagtgtttaattatatcgaatgtgattacaatcgctgtgaaccgccccgggaatcctggagactaaacttcctgagaaagaggtaaacaggatgactaaaaatactcgtttttcccccgaagtccgtcaacgggcagtccgtatggttctggaaagtcagagcgaatatgactcacaatgggcgacaatttgttccattgctccaaagattggctgtacgccggagactctgcgtgtctgggttcgccagcatgagcgggataccgggggcggtgatggagggctcaccaccgctgaacgtcagcgtctgaaagagctggagcgtgaaaatcgtgaactgcgccgcagtaacgatatccttcgccaggcttccgcttattttgcgaaggcggagttcgaccgcctctggaaaaagtgatgccactgctggataagctgcgtaagctgtacggggtcggaccggtatgcagtgaactacatattgccccgtcaacgtattaccactgtcagcaacagcgacatcatccggataaacgcagtgcccgtgcgcagcgcgatgactggctgaagaaagagatacagcgcgtatacgatgaaaatcacaaggtatacggtgtgcgtaaagtctggcgtcagttgttacgggaaggtatcagagtggccagatgcactgtggcacgtctcatggcggttatgggacttgccggtgttctccggggtaaaaaggtccgtacgaccatcagccggaaagccgttgccgcaggcgaccgcgtaaaccgtcagttcgtggcagaacgacctgaccagctgtgggtggctgattttacttacggtgtgcccggagttcagggcgggcatggatgcttaaatgaaccgcgagtctgtctggaatattgaaccggtaactcacgatgagaaacccaacaatcccaccgggtgtgacggtggagaacctgagcggcagtgacctgcggcatgcccgcagggtgatgtaacccgctgacaacggggattgaggcgagatcactaagccgagatgatcctcaaggttaagtactgaaaggctgaagaacatgaacccgttaatccgcctctgtgggttgaaaacgtcaccacggcctacgtgatctgacaggccgtgcaggaggaactggcagtgatacgtaagcactgccggtcgaaggtgttttgacatgtatgcgaaacaccggggcagcagcgtctatcacgcttgcgttgctgacttctgccaacttgcggcaagcaaggataaagagtgcgacgggcagcctcctcagtatgcctgagtccaggcaggtaaaccggggaaggtcagcgacggatgttaagggggcatggctccgatgacgcgctggctggcggagcttccgtagtagtccgcgatggggaaagcccattacatggcgaagggaagcagtttgaatgtgtttgcgacgtgaattaactgacctaacgaggtgaagacctttgataatcagcgaaatgcaacgcaagcttgccacatgggcagccaccgatccgtccctacggattcaacggctgctgcgtctgataacacaaccagaatggctggctgaagcggcgcggatcacgctttcatcaaagggggcccatacccccggcgttgatggcgtgaacaaaacaatgctacaggccagactggctgttgagctgcaaatcctcagggatgaattactctcaggccactaccagcccttgcccgccagacgggtttacatccctaaaagcaacggcaaactgcgaccactgggtatccccgcgttgcgggatcgtattgttcagcgggccatgctgatggcgatggagccgatatgggagagtgattttcatacgctctcatatggcttccggcctgagcgcagtgtccaccacgcgatccgcacggtgaaattacagctcacagactgcggtgaaacccggggacgctgggtgattgaaggcgacctgtccagttacttcgacaccgtacatcatcgactgctgatgaaggctgtacgccgcaggatcagtgacgcacgtttcatgactctgctgtggaaaaccatcaaggcgggacatatcgatgtcggtctctttcgggcggccagtgaaggtgtgccacagggcggtgttatatcgccgctattatcgaacatcatgctgaatgagttcgatcaatacctgcatgagcgctacctgagcgggaaagccagaaaagatcggtggtactggaataacagtatccaacggggccgaagtacggcggtcagagaaaactggcagtggaaacccgcggtggcgtactgccgctatgccgatgattttgtcctcatcgtcaaaggcaccaaagcacaggcggaagccatcagggaggagtgtcggggtgtgctcgaaggcagtctgaaactcaggctgaacatggataagactaaaatcacccatgttaatgacggctttatctttctggggcacaggatcattcgcaaacgcagtcgttatggcgagatgcgagtggtctcaacgatcccgcaggagaaagccagaaacttcgccgcatcgctgacagcactgttatcaggcaactacagtgaaagcaaagtcgatatggctgaacaactcaaccgaaaactgaaaggctgggccatgttctatcagttcgttgattttaaggccaaagtcttcagttatatcgaccgtgtcgtgttctggaagctggctcactggctggcccgcaaataccgtac

SEQ ID NO: 210 - DNA, 3866 bp, Escherichia coli
  modified_base (874)..(874): a, c, t, g, unknown or other
gaccgtgtcgtgttctggaagctggctcactggctggcccgcaaatactgtacaggtatcgcttccctgatgaggtggtggtgtaaatcaccgaaaccgggtcagagcaaaacgtgggttttatttggtaaaaccaatcacggcaagctcagcggcgaaatactgtaccggttggtggggcaaggcaagaagctgttccgctggcggctacccgaaggtaatccctatctgaggacggagaccagaaacacgtatacatcgcgctttacagaagtggcaatggcgttcgccagcatttaaatggagagccggatgcgctgaaaggtgcacgtccggttcggggaggagaggcagggaaatagtccgactacgccctgcctcttactctactcagcacatggcggggcttcgtctatgtggcgttcatcattgatgtgtttgccggatacattgtggggtggcgggtctcatcgtccatggagacgacattcgtgctggatgcactggagcaggcgttatgggcccgtcgaccgtccggcacggtccatcacagtgataaaggttctcagtatgtatcgctggcctacacacagcggcttaaggaagccggattactggcatcaacaggaagtacaggcgactcgtatgacaacgcgatggcggagagcatcaatggtctttacaaagcggaggtaatacaccgtaagagctggaaaaaccgtgcagaagtggaactggccacactcacgtgggtggactggtataacaatcgacgattgctggaaaggctgggccatactcctccggcagaagcagaaaaagcttattatgcttccatcggaaacgatgatctggcagcctgagttcacagatnaaacactctccaggaaacccggggcggttcasggcggttcaggccttcctccaggcgtttggtgaacaggcacagaccatcagcatcagcccaaagaattttaacggtgtcaccccgtcggccacggaagataaacaggtggccggagaagggattatcattcagcacatgttgtacctgttctcccagtccgttgaaggatttacgcatatcggtaacgccggcaacgagccagatacgggtacctgatgggagtgaaatcatcttcccctcccgctcagttcgcggatcaacaccgtgagcagctctggcgatggattttccagcgtcatgttaccgtgacggaactccaccttgcaggaactggcactgactctggtctgagtggaagtggataaagacggcgcaatggccgccacaggttttttctgctcatccggcgttatttctacaggtaataattcaacgccagtgtcagaagaggtcgttaccggaagacgccgcgaaacacgcccttcgttctgccagagcctgagccatttgaaaataacattatcattgacgccattttcacgtgcaatctgtgcaacacaagctccaggttgtgatgccagttcmaccatacgaagtttgaattcattcgaatactttttacgaggttcttttcgccagtcctgtaattccatacttagatgtccgtctatatcagatgggcgtctaagttaccaattttcgtctgatggctacatacggcggtcagtttacgcttacccattttgtcacaattaagtttgataaagcaggtcacctctgcactgaatctgctccagtgcctcattggtctccgtcctcccctttaaactgccggataagactgctgcacgtaagcggctcgccagaaccgtattgatatttactgagaggtcagatcaactttccagggcaacagatcgcgtacccggtttgccggccagtcctggatatgttcaatgacgtaacgcagccacttttctggctccacattgttcagacggcatgtgccgatcagcgagtacaacaccaccgcatgttcgccaccgctgtcggaacccgcgaagagccagtttttccggcctacggccactccccgtaagrcgttctctgcgatgttgttgtcgatttccacccagccattactgcagtacacgttcagtgcatcccactgtttcagcaggtatgcgaacgcttttgccgtatctgagtgacgcgacagtgttttcatctgttgctgtatccagtcatacagtgactgcatcagtggcgcggctctggcttttcttgccgccagacgctgttctgctgaacagccccggacttctgcctcgatggtatacagttcaccgatacgctgcagggcttccgtggtgatgtcggttggcactcttgcatgcacatcgtggatttttctccgggcatgggccatacacgcagcttccgttattctgccggattcgtataacgcccggtaaccaccgtaagcatctgcctgaagcacaccgctgtaaccggctaggtgattctgtggatggatacctttccggtccgggctgtacgcgaaccagaccgccgggggcatctgtgaaccggcgttacggtcatcacggacgtagacccacagccgggctgtcctggktttaccgctgcccggctcctggaccggaacggggatatcatccgcatgaactttaccgggcatcagtacatactggcgcaggacgtcatacagcggctccagcagttcagcaacggcaccggtccagcgacccagtgtggcacggctcagctccacgccctgacgacggtatatttctgactggcggtataactgtcaacgacggatgaaaagtggctcttccgcaacctgggtggagattttcatgccagtggactcattaccctctgcctgagtagttcaaatcctgctcgaccatacatctggcgtttcagcatcttcttcaggcgatttacatgaccttcgacaacaccattactccagcgactactgattgcctcacatatagctgcagcatcagcttccatccccgccgccacgcgccgaaattctgctgaaccgctttcgtggactcgagtgaaccaactgcttagctgtgatttattttgggttttcagaatacggtagaactcgagtgccagttgctgcgctattttcagctcaggttctttttcacacatcagactaataaatcgggaagcataattttcttcatccctggttattctccagggcatcaaccagcggcttacccgggagactgaaggaagtctgacggcagtagtaaccggtgggttccagcctttacgccatttggcaaccgcatccctgacgatggtttcactgcctgtaaatccccgggccaccatttcccgccatatccggctggcgttataattaccactttctcgttgctcttttaaccactccctccatggtgtcagcgaaaaacgaaaccgctgttgaaatccctggaaagctggttgcggaaaagatgaagacccagtcgcgacactcagagttggcgaaggcgttcgcgtacgcacttaaccagtggccggcactgacgtactatgcgaacgatggctgggtggaaatcgacaayaacatcgctgaaaatgcgttgcggatggtcagtctgggccgcaaaaactacctgttcttcggttcggatcatggaggagagcggggagcgctactgtacagcctgatcgggacgtgcaaactgaatgacgtggatccagaaagctaccttcgccatgtgtctggcgtcatagcagactggccggtcaaccgggtcagcgaactgcttccgtggcgcatagcactgccagctgaataacacatccccgtcaatacggccctcgctgtacgcttacgatcgaagaagatgaacgggaaatagagcatctgcgggctcagatagaaaactgcgccgga

SEQ ID NO: 211 - DNA, 148717 bp, Escherichia coli
  modified_base (9522)..(9522): a, c, t, g, unknown or other
gcgtcrrtgmtccgttgacgcttaccttacgataatacgcttatgaacattacaacacgctcatgcggaacctggatgggggaaggaacggtgaagctgttagcgaatgaccggcgtttatacaaacgccggtcatgatgaatgatatttcagaatatacctcgggctaaaataccgggacagagatcaggcgtgattaatctgcagcatttttaataacagaagtactgagcttactttacctttgatgatgtaatagttatttccgtcggtactcatttttccctgaaataatgtcacggatgtttcttcctgctgatcctgcaggcgcagtcgtaaggtcatatttttaatgagctgagatccgggtggcaaggggtatttgctgtcagatactgggcgactgagtctgatgtggcgcgtatacagcccgttttcgtacagggtggcctctgttatggtgtcagtgaccagcatgtgggagacaatgctgtattcttttttaaagcacccaccagaaacggtgattgtaatgataatggtcttctcgatcgagatgtaaatacccgtttcgttatactgtccgtatcggaaccatgagaactcagttgcattccagccatgctccagaatatgtgcatttttttgcctgatagtttctttttttattcgctcatgtttaaggcataacaggcagataaataatgtcagaaaaagaaagctaataatgagagcaagagcgatatagtctgtcacagggtaatacatattctctccggtagaagaagggccgcaaacgcggcccgggctgttatcagaaagagtaacggaagttggcgttgatcgcgttatccacgttgtatttaccaaatgccgatttctcaaactcaagaccgaagcgaagattatcgcgaatttcggcgttgagaccaacattcatgagaatacgaccgtctttttcacctttgatacgtttctcaccggacgcatcacgcagtacggtttcaccgttggcaaacaggtcaaactggtagccaaggccggcgcgggctgtgactttccagtccttaccggagaaggatttacccacatcaacaccggtacgcccaatcagcggattaaagtccttatccttcatggtcacgctcattccgcgatcctgccagtcgaaccgtttacctgatacggccccataaaccagttctgcctgcggctcaatccaggagtcttctgttacatgatagcggtagcctgcttcagcacccacatacaaggaatgagaactgtagtcttttgttccgagtccagcaaaggtcgccgagtactcattatcatggtgaacatacttactaatcaggtcgatataggcaccagagtcaaatatagcggaagcatacagacctgccccgacggacttcgtcttgccactgaatgcattactgctggcatgactgtcggtatacgtcatagtcagaccagtgaaaaggtcaagtccatccagctcatgttttttatccacaccaatctgcacatgggtgtagttgtcactgtatccaccagaagctgaacctgctccgctcatgatgcgggcccatgcaccggcctcgccattggtgtcacgcagatcccccattcgtttattcaggttgttgacttctgtcaggaaggctttgtaattaccggacatatacgattttgctgcaccggaagatgctgtattttcagccaccttatatccggtcagggtccacgtggtatgttcctgatcctctttcgtgctgatcacaggagatatgttgctgaaacctatggcctgagtactggctttaaatatctctttattgcttccttttggggctgttatcaggtcaacgtttaatcctgagttattatttcccactttctgtatatcgaccgacagactgttattgcttccggttaactgatttttaacaatgagtttatccgattgatttacagactggctcagatcagcccgcataatcacagcagtattagtggcatccagtgtgtttactgtcacagtatggaaacccgaattctctatgttactaaacaacaaaagactgtcgcgggtttttaatgattgcagggctgactgtccgtttactctccataaggtgttatacatgctggctgagrctgcaggagcatcaatacctccggtataagaagtatcaaagccacccagcaaacctgtagccagcggtgtgtgtgtggttttgtccaggttatcttctttatactggtcaacaccaaacagaatagatgcttttttgtctgattttatattaccattgacccaggcataattttgagcctttaacgtggcaccatcttctgtcatattatatccatctgacatatagattgccgggctgtatttattattttctgtaggggtgcctgttaatgtcagggttccggccagttcaatagctttatctacatacatttttccctgggcggtaacagtagctcctttgttgataatcaggtctgtattaattaaggataatgcaccagtcatagtaacagttgatttatcaccaacagttatttttgctgttttgagcactcagactgccgttgaaactactttcgcctgctgaatccccggagcgaagctgttgtctgaatccaaaaccttcgccagtaatgtttcttcctgagaacatgtcaatgtatgcagttttatttcccagaacaatttgagagtttttagcctctatgtgtccttttacattagcatcccggcctatactcagggttgcgttttctaaatttaatttccggaaattaaatttacgactttcccagtcgggctgggaaaaagaggctatctgattgttggacttatattccgtattgtaacgtttatttacagtgctttcctggtcctttatggcagcagaatagtctttttgacataaaaaaggaattggacagttgttattgccttctttaaatatggcatgttctgtcgcatgtccttgtaatgttaactgtgcattccggacagagatatcgtttttgatatcgactgagccatcaaagatcagattggcattattgttatgttgctgggtagtattgataatatgatttatgcttatattacctgatacattcccatggtacatatatgcatcagtattagtaagtgataatgttgattgcttcacgtttgagttcgttacggttgttcccgcatctgttgctgcgattttctgaaatgactggtcatagccgtttagatccagtgttccgccatttctggtaaaatagatttcgccattaccgctttcgcttaaagcgtctttggcatttatttttaccgtacctttacctccggccatgtaaattttattgaaggctttttcagcactaaggatgacagtcccattacctattttaaggttatttccctgtgctatttttacatccagagtaccactacctattttatgcagattatctccggcaacgcccttaacattccattcaacggtggtattattatcaatatctatcccggcacctttataagacttatcttttccgtacactttatatgtctggttcttatcgaatataagcccgccaatgccaagatcggtatcctgcttgagcgttaatacccctcctcctgagacagacaggtccttatcttttataatcgatgataactcttgttttttaccatccagctgcatagtgtttgtgaaattcttttttaaattgtttaccagaatattattaaataacgagtagtttgtccaggctatattggtactactgataaaaccaactgtactggtaacaccatggaaaacccatttttgttgttctttatcatatagataagaaccagaaccactatcgccaaaaattggtgagtttttaaaaggggttctgttggtataaatgtaactcttgtttttccagtccagattaaaaagacttgcgcttaacaagtcgggattatagttttgtccaaacagatattgtttgccgtttaatatcgttgaggttgttccggcacctgctctgaagccaattatttgttccttaccgttgtagtttacgccatatcttttcatcgcatcttcgggagaaagtgagaagtcggcactctccgtaacccctgttgtttccacgacgaatttattcagacgatgaaccgaaaagtcgccagatgatactctgttacttgctttatatgctgtctgatcccatgactgtgttgttattgcatgatgctgtgtaccgttatgagtcgcagtaacactgtacgcacctccaattgatgttgttgcacctttgttggaaacagcagaaaaatcaggtacaggtagttctggaaaatgaaatatctttccatctttcatcattaattgaacatttgttgcacccggtctgaactctcctctgttttgagcaaggtcaagataatcgcgggtccatatattatttatatccagcattgctgcaaatgctgtttcgccataacttccatatattgaggataaaataataccgaggataactttctttcttgatgtaccgacactaactttccgggtcagttcagaaacagcaactaatccacctgtaatatgactatatttcagtgaataaattttattcatacgtgaactccgatatttctgagttgtggttatgggatagcatttaattacaacggggaactatcagtcatggtacgtaactgataagggtataatgataatcactgtcagttatatttgtatgacagatgtaacaaaatgaaaaaaagataagcacaagtgattgattggttagatattgatcacttggtgtttgtattttgaattttgcgatcaaaatttgatctttgttgtttccggtcaatcctttacaggttttctgtattatccgggggagttaagtctgtcgatgtccgacagacttttgatgatggaaacaacatgcagcgataatgtgcatgctgttttgcaggtggaactcagaaggtgaactggaactgtgcgaccgcaccgtaagtgttgtccgtgccgatcaggcctgcaacatcaaggtgaaccacatcaaacggtgagatccccaccccggccgtgaatgcactgccgtcgttaccggccagattctgacggtaaccggcgcgcagctgtgcccatttccaggcattaaattctgcgccaatggcggcaaactgacggttgctgtcggaggtgaaaccgctggccggggtcagatccacatcaaatgcagtggtgaacatcgcgttgtgccaggagacaccggccgtcacctgcgggcggatcctgaaggtttccgtgataccgttcacttcttttgtctcaatactacgggagatcaggttctgtgcgaccagtcccagcgtccagttgtcatccaggtccgtactggcaccgatgtcggcgttgatgccatttttcgtgttgtggtagcggtcgcctttgaaggcgctgctgtcataatttctgaccagcacgttgtagttgaacaggtcgacgcgctggaatttgggggggaagcccagagaccatttctgcccggccgtttccagttccgtagccagagcaatacccacatcagtgatcagtgccgtgcgggcacaggcctgtgatgtcaggcggcttttgtccacctcctgcccggtgctgtttgccacctcttccaggtaagtgaggtcagcatcagagactttaccgtcgacactgacggtgccgtgtgatttaaccatcagtgcggcagagaggcgatcaccgggaagggccgccacagcagaaacgcccagctgtgcggcggcatgtgtgttacggaagtcccggaggtgttctttcaggcgtgcggcagcctcaggaacaccgtggttactttcgatggcgcggtcgaaggccttccactcatcactgatccggtcggcgttgtcggtgatattatccggattggagagctgcgcgccgacggacggaagcaggatgctgggctcatgcgcgacgcaaaatccacgatgtatatatcagtactaaaagcgcgacggcggaagaagctctgaaactaatcggtgaactgtacgccatagagcacgatatacgcgggttaccggtgtctgaacgcctggcggtcaggcaaatgcagagtagaccgctcctgacttccctgtataagctgatgcaggagaaagaacacacgttatcgaagaaatgtcgtctgggagatgcgttccggtatatcaggaagcactgggctgcgttgtgcaacttctgtgatgatggcctggctgaggtagataataatgcagcagaaagagcgcttcgtgcagtctgtctcgggaagaaaactttttcgaggatcactcattccgtgtctgactgcttcagggtttaattttgcttctgctgactgaatgatgattgggcagcaagtgcaatatcccacataaatccagtcaactcacgagccaccgccgtaatggctacttgtgattttttcccttttgctgtcagagttcggtaacgagaacacaatcgttgttgagctttccatgcaatatctttggaatattgtgttacagagtccggtcggtaatatataagccatgcaccaacttttgcaggtgtacgataagaccaggcggcttcgtaaagcagacgtctcagttcgctgtttccaacttttgttattcctctgggacgaatactgtttccactggaatattcacctggcaccagtctgaggtgtactggcaatagcggacactaccatttgttctttttttaagcagccatctgatgatatttttccctgaaggctgccggggagatattccccagacgagagtgacgacgttgacgattgtagaaaatctcaatgtattcccgtattactgagatggcttcatcccggttattaaaacgatagtggctcaggctctcatttttcagcgttctgagcctctgattcttccggacagaagataatcatgtcggtatgaatgttataattaaggactgtgcaataatagccattccattcagccatcttacgctcgaaaacgatcggtaagctggctactcaccattcctgctctaaacctgacgcctctcaagactattataaatagcctcaatctcacccttcaggttatcaccgcaataaaccattgatgtatcgtatcgttcatatcgcgcttcccgtgtcgcactaaaccagttgaacgatcccacacacagcaaaccatcatcaccaataacaattttgctatgaacacggtttaccagctttgtagcaatacccagcgcattcagtttctccagcgccgctttaaagttctgctgcttctcttttcgcttctcaaaatcattatgttcagtgttgtagcttctgtcagtgactatcgtgacgttaattccacgtgaacacgccgcaatcatggaatcaagaaaaccggtttgctccagcctttgccaggtcagccatggagaaattatcgtgatgtgtttactggtattttcaaatgtctgattcaggaaattatcatgttgctccacaccatgaagtgtgtagattttggtcccggcggtttttaaatccttacgctctttataatcaaaagagagcgcattcttctctgactcaaaagaggtattttgccagtaatccccgtggcgatgaggctggctggacctcaaacaggtccatatcgccgaagaccagaaaactgtccttcgcacgggagactgcaacattcagcatgctgttatcgctatcaataaacccgccgtcttcatgttttgaatagactggcgagaatatcacaatcgctctttccgctccctgaagagagtgcacggtgcccactgtgagcgacttttcattcgtgcctgtactgatatcttgtttgcccagcacctgtttgatagtggatacctgagcgctaaaaggcgtcacaataccgacaacttcatgaagcgatttaccgtaatgcgcttcaatattttgctggttctctgccaaccagaccgctatcgtttcagcctcaagcaaattatatcgacttccactacttgccagctctcctttaccatcaatatggagataccccattgcgggcattaaattgctctcttcacgccctcttttaggcaacaacttaccgtgatagcagagcgtattacagtatccaataatattgtcgtagcaccggcggtgttcatataggtacataccacgagccagttcgggatcatattgatagcgcgaagcaaactgcgctattttcataacgctgccagatgcggcacttttaccaaggtctgcgattgccgtatatttctcggtaatctcttcttgcgtactgccagacagaattttttccgccagcatgttaccgacatcaatcgcaggagcaatactccatattggcgggatctgctccgtatcgccaatcactaatgccttcttagctaatgcaaacgaggcagcagccacttcaggaagcacctgcccggcttcatcgacaatgagtaaatcggcaaaatcatacaaataacttttctcgaatttacgttgtcctttgtgctcacttatctgcatattaccgggcagcatatagcatgtcatcaccacacatggcgtgagtttcattcgacgttgccaacgggcggttacccctttagcaccttttttcttcttctcgtcctgcagatcatcaatgctggccatatccatcagccaacgaccttcccagtagtgagtcgtcagtaaaaatgcagggaagcgaatctgcgtatcagccagttcatcggcctgtgagaagctcagttcctcgtcgccctcataccctaaatcaaatgccagcctctgccactcctgaaccgcctgctgttctttaagaacgatttcatgggcggagtcaatctgctgccggtatgttgtttgctcgcgctcagcggaattgagcagcccatcaatattacgttcgatagtttcaggatcagaccactgatttcctgcaatcagcgcgcctaatttatcttcgagaaacagctgtatttggtactgtcgcttattgcgaaccgccgggagccaggaaaataatgaatagatcagtgattcaccggcgcgatattttttccattccgttttagcactcttcagtagagtgactttttgttcttgtccggaaagtaatttatttaaattatcgagatattgctcaatatcattagcaataagctcacgcgcagcccgaatctggcttaacgtttgccatgttgcgttcagtcttatcagttgctcagattttgctgccaactgaccatgcaagagttcaatgaccttttcaggggatgaacactcttttccaggaaaggctgccttagccttttccagataaaacagcagtgcatcctctacatactcttttgactcaacctggttgaagaaatcttcagtttgatatttttnggctgcctcagctttacgactgcttgagggaaaataagcaccgaagcttttcagctctggcaaccatcgcccggccatcgcacctgaaccttgcgaaaagtctttcccgaatgcctcaataatgttcgttacagcctggttattcgttgaagtcgcgataataaccggaggctcagatttttcgagagccgctctggcccactgcgtggcgatgatagaaagcaccagcgtggtttttccggttcccggagggccattaacagcaaggatatcgccatgtcttgcatccagaaaatggcttaaggcatcgcgctgagcctttgccagcggaaacttatctccggagtgtccaagcctgtcgctgaattttgctcctggggccagcaaagactctgcagcatgaacctctcgcgaggcgaagcgattgaagagcggcacatccttattgcaaacaagcaggtgatcataaagagaaaggatatgggaactggcaccgccagattgagccgttttaacaatataaccgtgctcagcgagttcatattgctcaggtttttcaatccagtcgccggcaacgctcttcagtagcctctctgagtcatacagatattgacgccactcctgctgcaaggcggcatatcgtgcttcccgttcttcatccgtttcggcagtcttatcaacgctgtcatcaaagttgatagagaacgtggtatgggtcgtcttgtatttgtcatactgcccaatctcaccaatcgaaaatgctccttttggcaaaggttcaagcaggtctctgggaatggaggtcgctggcgtcggatataaaaaaccctcacggcttagcaaggctggcgtcactatcggggtaacaatatcagacgcgcctgcggaacggtccttaccatgctgcagtaaccggaaataaacttttgggcgcaagatgacatcgaccgtttcgacatcgtctttttctccctcaaaaaatttactgacaatcgcttcgtcaagacgtcccgccgctatcccatgccagtgagtgaaattttgggcgtctttccgtttaaaactgccctttcctgactcagcatccgcaagcgagttgcgccagtatgaggcaaaccctaaagcattttcatccattaccagtcctgtgactcaatgaaatccattgatttatcgaatataaaatcaccgtatggacagctattgtccatattgaaaagttggatgcaatgttttgtttataattcgatatcaaatgaactggttgtacaaggttcagaacacaagctcattaaacagtacgtcaggactattgatttcataacagtgaatacattttttaccgtttataataactacctgtgttggacggggataccagagcagccgaaaacaccgggggttattacctgctctcatggaaaccatatattcctggtgctaatcacagtcataaatagcctgaagaacgtgacgaagggactttaatggaagccggagtaacttgtcagaaacatcaatcttcgtcatcatttacaaagaaaaataattagttaaagcagtccgggctgattgcccggactgcttactattttaatggattgttaatctttgcatattcaaacgggctgatacccttctcccggttcgcatctagaaaatcggcccaccattgcaacatcagtcgccgttcttccagatgttctgctttatggatatacgcagcacgtacaccattacgctcctgatggctcatctgacgttccacagcatcgcgggaccacaaacctgattcaatcaatgcactgcacgccatcgcccggaatccatggccacagacttcctgggttgtgtcataccccatcaccctcagggctttatttacagtattttcactgattggtttacgcgggtcatgtgcacccgtaaagatcagaccattttcaccagcccatgtctgaagttctgccagtatggctacaacctgtttgctgagtggcacaagatgtggtgttcgcatcttggatccccggtgtgagaattttacgcctggcagaggttcgcgttcggctggaatagtccacatggaattgtcaatatcaatttccgaccagcgggcatatctgagttcactggaacgaataaaaaccagtaaattcagcataactgccagtcgggtgacaggctggcctttataaccgtcaatacgcgacagaagttcaggcaggcgtgaaagctccagagcagggcgatgctggcgttttaccgtggtcaatgcaccagccatatccagagccgggttatatctgatgatgccagactgtacggcgtaacgcattacagcagatattctttgctgcagacgactggcgatttcataaatttgttttgcttctgcagcacgaacagggataagcaggtccggggtattgagtgttgtgatatcccggttgccgataaaggggaaaacgtgtgtctcgaggcttttgagtactttatcgctgtgtgattgtgcccattgtttattactggcatgccagcgtcgtgcaatatgttcaaaagagagctgtaaatcagggacaacttttttaactcttttctgttcgcaagggtcaatcccctctgaaatcagttttcgggcctcatcccgttttgtacgagcttcggagagagaaacttctggatacacaccaagtgccagagtcttctccttacccagaatacgataacggagacgccagtaacgggaaccattaggatgaaccagcaggaacatgccggccccgtcagtgagtttataagccttgtcagtgggctttgcagcccggatttttgcgtcagtcagtgccatagttcagccttctgaatgcgttaaagagggtacaaattctgtcgaactggggtatacccgcaattatacccacacaatggggttgatgtggggggaatctggttgagttcggtagaattgatttggaggaagaacacttaaatcatggtgttctgaaacgaaaaacggacctccgtggaggtccgttgatatgaatttggtgcccggactcggaatcgaaccaaggacacggggattttcaatcccctgctctaccgactgagctatccgggcaacggggcgcattaaaccgtaatctgcacatctcgtcaacctaatttcagtaaaagcgattcaactgcttaagattgcggcaaatcgcttcttttctgtgtttctgtcaggtcaatgcaccaccctggcggcagcgggcgaagcgcaggatatcttccgccagccgatgtgcagtgtcgacatccgcctggctacgattcaccagcattcggcttaaacagccttccagcatcagttccatctgctttgctaccatcgccggatcgtcaacttccagcgtggttaacagttcgtgggtgaaatcgtaggccgcgcttttttgctgatcggccagttgatgaatagggtggccaggatcgggataaaacgtacaggcagcgataaatagacagcccggatagcggttgtttttaacgcactccgataacgcctgataacgtgccagcagcttttgttcggcggtttgcgtttcgtccagcatcagctgacgacgccagacatctatctgttggctaagataacgcagcgcatcgtagaggattgcctctttgtctggccagaagcggcgtagctcgtccagtggataatccacacgttcagcaaccatctccagcgtggtgttggcaatcccttgtaattctaataatttcagggcttctcccagtacatcttcacgttgcacgctattttcctccgtctttcccactgcaagtgtcgttcacggttggcgatcgcgcaaatgtgcgctgaaggtttcagcatccataaagcccgtgacgcgtgcttgtggatgctcctggccttgtccgtcaaaaaagagaattgtcggtaggccaaggacattaagatgctttaacagcgccacatcttgtgcgtcgttggccgtgacgttggcctgaagtaagaccgtgtctgctaacgctttttgcacctgcgggtcgctgaaggtgtatttctcaaactctttacaggcgacgcaccagtcggcataaagatctaacatcaccggtttgcctttggcttcaacgagcgcctgatttaactcatctaccgttttgatttgtgtaaagttgagatgcgtctgagtttgcgcggtatgcgtcgcaccaaatgcccaatcctgaagtgggcgcacgctaaccaatgccgctgccagcaggattatttgcaccacgcgcatccagccgcgtttagcctgtaggctggtgataaaggcccagccaaagaatgcgacacccagcgccgaccacaagcgtaatccccatacatcaccaatcactcgctccagcaggaagaccggcagtgcgaggatcacaaaaccaaacgcggttttgacttgttccatccacgggccgcttttcggcagcaagcggttaccaaagacggtaattagcatcagcggcaggcccatgcccaacgcatagagataaagcgtgccgccgcccagccacatgttcccgctttgggcgatatacagcagaatcgcgctaagcggtgcggtggtgcatggtgaacagatcagtccggcaatcgcccccataacaaacacaccgccaggtgagccgccctgttggcgattgctcatcaacgtgagacgtgtttgcagcgaagaggggagttgtagagtaaacaagccaaacattgacatcgccagcaaggtaaagacgatggcgaggccaatgagcacgtatgggtgctgtagcgccgcctggaactgtaaccctgcggcggcaactaccagacccagcgccgtgtaagtcagtgccatcccctgcacataaataaaggtcagcaacaatgctctggcagtggagagccgctgtttaccacccagcacgatgccagaaatcagtgggtacattggcagcacgcatggcgtaaaggcgataccaataccgatcaacaacgcccagagcgcggaaaagggcaattgcgcggtgtgctgctcttgctgcgaaacagacacaggctgtgacgctgcgttgttggcgaccacttcgcttaacggaacggttttggtttctggcggataacagaaaccggcatcagcgcagccctggtaggtgacagttaacgtcgctcccgcactcgcctggttgatggttacgggaagcgtcagccgatcgcggtaaatctcgcttttgccgtaaaactcatcttcatgccagacgccttgcggcagctgcacgtcggcaattttcgcgtgttccggcgtaatgcggatctgtttacggtagaggtagtaaccgtctttgatctgccaggtcagattaaggtcatgttggttttgctgaaaatcaaaagtaaaggcttgatccgcggggacaaattgtgaacgtcccggcgcgtcgaataatccggcaaaaacggaagtgctgcaaagtagcaggatcagcgtaaagatgcgttgagccatgagaggtaatctgtgtctccgtgtgtaacaggtaaaaccagaagttccggggtttgatatggatgatgagacttcaggcattccagcagtgcctgctggtgagatacggtagtttttaaaatcatctgcacttcgtattcttgctccagcttaccttcccagtaatagagagaggtagcgccggggatcaaggtcgcgcaggccgccagtttttccgccagcactttggcggctaaatcctgggctgtcgcttcatccggtgcggtacatagcaccacgacagacgcggtattcgaacttttttcatcaagcataaacacctcgcaagaacagatggaaccgcaagagagaggtcactatacaacggacgggggaaggatgttagtcggcgggaaagaaagcggggcgtgaacgccccgcgattggtcattacagcatgaagctacccagcaagaagccgaagcaaacggccagggcaacacccagagtacccgggatgaagaacggatggttgaagacgaatttaccgatacgggtagtacccgtgtcatccatctgtaccgcagcaaccagcgtcgggtaggtcggcagaatgaacagaccagacaccgcagcgaaagaagcaacagcggtcagcggtgaaacgttcagtgccagagccatcggcattagtgcttttgcggttgcagcctgagagtacagcaaagcagaagcaaagaagaagatgacggccagcagccacggatgaccctgaatcacttcaccagcggtatctttgatccagtcgatgttgttggaaacgaaagtatcgcccagccacgcaacacccaggatacaaatacaggcgctcatacctgctttgaaggtgctggagttgaggatgttgtcggtatcgactttacagataacggtggtcagagttgcaacgctgagcatgatgatcaggattgcgttggtggtgttcatcagcggtttttcaaccagacccatgcttgggctgttgatgattgcatagataaccacgccaactacgcccagcaggaacagccagacggacgtttttgcaccggatttgatttcaatctgcttttcaccgcgcagttcaaccaggccctcttccagacgcttgcgataaatcggatcgtcagagagtttggagttgaacagcatagtgaccagaaaggacatcaccagaaccgccagcagggtggacgggatgaccacggagagcagatggaggtagctgatgccatgaccttccatcacggaagacatgtaaaccactgccgctgagattggcgatgcggtgatcgcaatctgcgcggataccactgcagtagacagcggacggcaaggtttgacgccttgttccttcgcaacttcagcgataactggcagtgtcgccagagatatgttgccagtaccagcaaagatagtcaggaaataggtcacgatcggtgcgaggatcgtgatgtatttcgggttacggcgcagcagcttttctgtctgatgaaccagatagtccagaccgccagcaacctgcatggcagaaatagcggcgataaccgccatgataatggaaatgacatcgaacgggatgttaccgggtttaacgccaatagcggcaagaaccagcacccccaatccgcctgcaaaaccaatacctattccccccaatctggcgcccaagaagatcgccagcaaaactatgatgagttctacaactagcatattagccttccttgttttttaacaagttgatattaggttgttatttttaagttactgctcacaagaaaaaaggcacgtcatctgacgtgccttctttatttgtactaccctgtacgattactgttcgctttcatcagtatagcgttttgctttgtaagccgggtgcatcagattctgtacggagaaaatatcgtcaagttccgcttcagtcaacagaccgcgttccagaacgacttcacgtacactcttaccggtttcggcacagattttacccacgatgtcaccgttgtggtgaccgatgaacgggttcaggtaagtaacgataccgatagagttgtaaacgtaaccttcgcacacttctttgttagcagtgatgccgttaatgcatttttccagcaggttgtagcaagcgttggtcagaatgtgaacggattcgaacatggcctggccaatgaccggctccataacgttcaactgcagctgacctgcttctgctgccatggtaacagtggtgtcgttaccgatgactttgaagcatacctggttaaccacttccggaacaaccgggtttactttagctggcatgatggaagagcccgcctgcagttccggcaggttgatctcgttcaggccggcacgtggaccagaagagagcaagcgcaggtcgttacagattttggacatcttcacagccaggcgtttcagcgcgccgtgaaccataacataagcgccgcagtcagaggtcgcttcgatcaggtcttcagccggtacgcatgggaagccagtgacttcagccagttttttcactgccagcggagagtactctttcggcgtgttcagaccagtaccgattgctgttgcgccaaggttaacttccagcagcagttcagcggtacgttggatatttttcacttcttctttcagcaggatgctgaaagcgcggaattcctgaccgagggtcatcggtactgcgtcctgcagctgggtacgacccattttcaggatgtcctggaattcgacagctttacgttcaaagccttcacgcagttggttaatcgcatctaccagcttaatcagggaagagtaaactgcgatacggaaaccggtcgggtaggcgtcgttagtggactgacatttgttaacatggtcgttcgggttcaggtactgatattcacctttctggtgacccatcagttccagaccgatattggccagcacttcgttggtgttcatgtttacggaagtacctgcgccgccctggtagacgtctaccgggaactgatccatgcattttccgttgttcaggacttcatcacatgcggcaatgatggcattcgctacacttttaggaatggtttgcagctctttgtttgccatagctgcggcttttttaaccattaccataccgcgaacaaattcaggaatatcactgattttgttgttgctgatatagaagttttcaatcgctctcagagtgtgaacaccatagtaggcatcagctggaacttccctggtacccaacagatcttcttcgatacgaatgttgtttgacatgtgaaccttctttttcaagctgccaatgatttgctttaaacacacagaatatatgtggtttcgaatgtttttcgaccgacgattatcccctgcatcgaccgaatacccgagatcatatgctgcttgaggatttctaccgtaatctggatcactttaagtgtcggtttttaccccttaattattaatttgtgaaatagatcaccgctttgggattactaccaaaaatagttgcgcaaacatcttgaaattttgctaatgaccacaatataagctgaacgcgattcgcaacccattcaggtagccgggttttaccggctgctattacaggagaaacctttgcgctggttaccttttattgccattttcctttatgtctatattgagatttcaatctttattcaggttgcccatgtattgggggtattgctgaccctcgtgctggttatattcacgtcagttatcgggatgtcactggtacgtaaccagggctttaagaatttcgtgctgatgcagcaaaaaatggcggcgggtgaaaacccagcggcggagatgattaaaagtgtttcgctgatcattgccggtttgctgcttttattaccgggctttttcaccgacttcctcggtcttctgcttttattaccgccggtgcaaaagcatctgacagtgaagttgatgccgcatttgcgcttttctcgtatgccaggcggcggttttagcgccgggaccggtggcggtaatacttttgatggtgagtaccagcgaaaggatgatgagcgcgaccgccttgatcataaagacgatcgccaggattaatgtcgaaacgccggattatgtggttatgccattttccggcgtttttcgttttggcagcaacagccataaccccgccagcatgatcagcgcatagagacttttccagccgaccattgccagtaacagaacgcataacagcccgccaaccaccgccagtagtcgataacgtccttgcaataatttacagcctgccagcatgcataacagataaatcataataaagatgccattggcataaataataagagcgtccagattgatctctaaagcatgaatcaccaacgtgctcaccacacagcagccgagcaccgcattgagggcattattcgggatatggcgagaagagaggcgtgccaggtagtggtcaggattatgttgcgcctgcgaccagaccaggcgggcgaagctctgtatataaatgttgagactggcaaagcaggccagatagccaatcacgcaggcaatccataacgctcctacaccgaacaactgcactacaatttttggaagcgatgctgccgccgccattttttcaccataggcgtcgaagtgtaagacgactaccgtacagccccagtagactaatcctgccagcagcagaccaatcatcaatgcgcgaggaaaatcacgctctggatttttaaattccgaggcaagatgggcaaatgcttccagaccgacaaaacaccagaacatcactgataacgcagcaaataacccggtaagttcgatattaccaggtgccgggaaggggatattcgcaggtttgatatcgcccgcccaccagatagcgacaatcagcgcgacgataagtccggcaataacggtttgtagattagcactggaactggcaccgcgagtaccgatataccacaccagcgccagcgtaccgagttctgccaacaacagttgccagctatgccagccaaacattgcctggccgaacccggcggcaatttgtagcgcggcaggcaaacccacgggaatgaccgataaaaacaaccagccggtgactcgctcaagtcgcgaaccaaacgccataccgacgaagtgcgcgacaccgcctgcgctgggatagtggcgacccagaatcgcaaacacaatcgcaatcgggaacactaagataatcaaaacgggccacgcccacaggctgttattgcccgctaccagcgcagctaacgcaggaacggcaaacacgccagtgcctaataatgacgtcgatagcaggccaatgccctgggccagccccagttcttgtttgagtccactcatgggttgatatccgattgcgcccaaattttgggcaactgcgtagattttcgatggtagcacaatcagattcgcttatgacggcgatgaagaaattgcgatgaaatgtgaggtgaatcagggttttcacccgattttgtgctgatcagaattttttttctttttcccccttgaaggggcgaatcctcatccccatttctctggtcaccagccgggaaaccacgtaagctccggcgtcacccataacagatacggactttctcaaaggagagttatcaatgaatattcgtccattgcatgatcgcgtgatcgtcaagcgtaaagaagttgaaactaaatctgctggcggcatcgttctgaccggctctgcagcggctaaatccacccgcggcgaagtgctggctgtcggcaatggccgtatccttgaaaatggcgaagtgaagccgctggatgtgaaagttggcgacatcgttattttcaacgatggctacggtgtgaaatctgagaagatcgacaatgaagaagtgttgatcatgtccgaaagcgacattctggcaattgttgaagcgtaatcctcgcacgacactgaacatacgaatttaaggaataaagataatggcagctaaagacgtaaaattcggtaacgacgctcgtgtgaaaatgctgcgcggcgtaaacgtactggcagatgcagtgaaagttaccctcggtccgaaaggccgtaacgtagttctggataaatctttcggtgcaccgaccatcaccaaagatggtgtttccgttgctcgtgaaatcgaactggaagacaagttcgaaaatatgggtgcgcagatggtgaaagaagttgcctctaaagcgaacgacgctgcaggcgacggtaccaccactgcaactgtactggctcaggctatcatcactgagggtctgaaagctgttgctgcgggcatgaacccgatggacctgaaacgtggtatcgacaaagccgttaccgctgcagttgaagaactgaaagcgctgtccgtaccgtgctctgactctaaagcgattgctcaggttggtaccatctccgctaactccgacgaaaccgtaggtaaactgatcgctgaagcgatggacaaagtcggtaaagaaggcgttatcaccgttgaagacggtaccggtctgcaggacgaactggacgtggttgaaggtatgcagttcgaccgtggctacctgtctccttacttcatcaacaagccggaaactggcgcagtagaactggaaagcccgttcatcctgctggctgacaagaaaatctctaacatccgcgaaatgctgccggttctggaagctgttgccaaagcaggcaaaccgctgctgatcatcgctgaagatgttgaaggcgaagcgctggcaactctggttgttaacaccatgcgtggcatcgtgaaagttgctgcggttaaagctccgggcttcggcgatcgtcgtaaagctatgctgcaggatatcgcaaccctgactggcggtaccgtaatctctgaagagatcggtatggagctggaaaaagcaaccctggaagacctgggtcaggctaaacgtgttgtgatcaacaaagacaccaccactatcatcgatggcgtgggtgaagaagctgcaatccagggccgtgttgctcagatccgtcagcagattgaagaagcaacttctgactacgaccgtgaaaaactgcaggaacgcgtagcgaaactggcaggcggcgttgcagttatcaaagtaggtgctgctaccgaagttgaaatgaaagagaaaaaagcacgcgttgaagacgccctgcacgcgacccgtgctgcggtagaagaaggcgtggttgctggtggtggtgttgcgctgatccgcgtagcgtctaaactggctgacctgcgtggtcagaacgaagaccagaacgtgggtatcaaagttgcactgcgtgcaatggaagctccgctgcgtcagatcgtcctgaactgcggcgaagaaccgtctgttgttgctaacaccgttaaaggcggcgacggcaactacggttacaacgcagcaaccgaagaatacggcaacatgatcgacatgggtatcctggaccctaccaaagtaacccgttctgctctgcagtacgcggcttctgtggctggcctgatgatcaccaccgagtgcatggttaccgacctgccgaaaaatgatgcagctgacttaggcgctgctggcggtatgggcggcatgggtggcatgggcggcatgatgtaattgccctgcacctcgcagaaataaacaaacccccgggcagaaatgtctgggggtttttcttttggtcatctttctagtataagattcagacacggacgacgcgagtggcgtccagctcattgattatggggaataacatgcacgtaaaatacttagcagggattgtcggtgccgcgctactgatggcgggttgtagctccagcaacgaattgagtgctgccggtcagagtgtacgcattgtggacgagcagccaggcgcagagtgccagctgattggtactgcgacaggtaagcaaagcaactggctttccgggcaacacggagaagagggcggttctatgcgcggcgcagcaaacgatctgcgcaaccaggcggctgcaatgggcggtaacgtgatttatggcatcagcagcccgtcgcagggaatgttgtccagttttgtcccgacggatagccagattatcggtcaggtttataagtgcccgaactgatgtgatccagaggctgggtgacaaacgtatcattgcctgatgcgcttcgcttatcaggcctacagcaggcattgcaactgattgaatgcttgagaatttgtaggccggataaggcgtttacgccgcatccggcatgaccaacgatcacgttatcagtcatttcaggctggatggctccagcctcgcattagcaaagatgagattatttcgcctgtggtgcagttttgctggtggattgaacacgtaagtgatgcagcgcgcgtaagcattgatcctgggttagcggttgggcgttattcgccgctacggtgcgaacatagacctgacatggcacacccgcgagttttttcagtcgttggctgaaatcaagcattcggcgagtgatcgcctctatttctttacccggcgttgcttcacgcgttttcaccactgcgccgctaaattgttctttgccactttcatctttaaagcggtaaagcaccgccagataatggtcgaacaggttatgtttccattccggttgggaataggtgtcatattccagattgccattttcctggcagtcaacgtcatataacggcaggaaatctaacagtgaggtaatacgtaatgccagttcacgcatttccgcattattaattgcatgaatgattgctcgcgccagcatttcaatctgcaactcattgacgactaactcacatttgctaccgtcatgtagcgttaatacgaaggtaagattttcgccttgattatcggtaagttccagcgtgttaacccgacgattaatatcggcatttttaagctcatcaaccagaatttctgggatgttttctgccattttcttaatgactttatcgcgagcttgctcatactgaaggcgtgcagcagcatccagtttatgcttttgatgcatacgactttccagcgcaatcagcaggtcgcgcagttccatgacagacataaagaacaacgattctttattgcgaggttctttaattttcagcgccagtgcaatgaaattattactcttgcgaataacaccggtattaacacccttgatgcttatggccatgtaggttctccctaaccatttctcaattaaataattaattttaatttataagccagataaatgggcttggtagtaatagttgttaaaataacataaatagccgtactcactctatataaacagaaaagaaaggttaattattggtgttggctatataaagagtaacaacagcaatgtatatgaataattaaaggttatgcaacgggcaaagattaaatttcccagtttaatgacaggttgctgtacttgcgtttgttgctcttgccggatgcggcgtaaacgccttatccggcctacagttcattgcaaatccattcaatttcaatgcacaatgtaggcctgataagcgtagcgcatcaggctaatgtttaacttccctgtttaatcagttactgctggcgtagctggagatccagcggcgttttgctgggttcgccgccgatttctcgcgccagtttcggcaccagataacccgacaccagtgtcagcaactcacgcataatctgccgtgcttcgtcatcactcaccataaaatgcgccgcgccctgtactttatctagcacatgcaggtaatacggcatcacgccggcatcgaacaacgcattactcaggtttgccaacgtttgtgcgttatcgttcacaccacgtaacagaacgctctggttaagcagggtgacaccgacacggcgcaatttagccatcgcctgacggaacgtttcatctacctcattggcatgattgatgtgattcaccagcaagatttgcagcgtagaacgggcaaagcgttcaaccagcgcctcggtgatacgtgccgggatcacaatcggcagacggctgtgaatccgcagacgtttgatatgcgggatggcttccagttgtgtgagcaaccagtccagctcgtgatctttcgccatcagcggatcgccgccggagaaaatcatctcgtccagttccggatgcgcagcaacatactcaagagcagtctgccagttacgcttgttgccctgattttcggcataggggaagtggcgacggaagcaatagcggcaatttaccgcgcagccgcctttgaccagcaaaagcgcccggttgtggtatttatgcaacaaaccaggcactacgctgtgctgttcttccagcgggtcggtggagaatccggaagcgacgacaaactcatcttgcgaggtaagtacctgacgcaaaagaggatcgtccggattgcctttctccatgcgatcgataaatgagcggggcacacgcagggcaaacagctttttggcgctgcgtccggccaacagtttttcgtccgcgtctatattcaaaagacgcagaagttcatcaggatcggtcacaacatcggcaagttgcgttaaccaatcttctctggatggggtatttagggttacaatatgcgccattttgtggcttagctaccaattaacaaatttcagagggccttatggcaacgtactatagcaacgattttcgtgctggtcttaaaatcatgttagacggcgaaccttacgcggttgaagcgagtgaattcgtaaaaccgggtaaaggccaggcatttgctcgcgttaaactgcgtcgtctgctgaccggtactcgcgtagaaaaaaccttcaaatctactgattccgctgaaggcgctgatgttgtcgatatgaacctgacttacctgtacaacgacggtgagttctggcacttcatgaacaacgaaactttcgagcagctgtctgctgatgcaaaagcaattggcgacaacgctaaatggctgctggatcaggcagagtgtatcgtaactctgtggaatggtcagccgatctccgttactccgccgaacttcgttgaactggaaatcgttgataccgatccgggcctgaaaggtgataccgcaggtactggcggcaaaccggctaccctgtctactggcgctgtggttaaagttccgctgttcgtacaaatcggcgaagtcatcaaagtggatacccgctctggtgaatacgtctctcgcgtgaagtaatgcggttgtggtgcggcctgcaggctgcaccatcacttattcaggtcagagatgatgaaacgccttatcgttcttgttttgcttgccagcacgctgctcacgggctgtaacaccgctcgcggtttcggcgaagacatcaaacatctcggcaactccatctctcgcgctgccagctaatttttcttctcttccgaaaaatcatcagatttccatcatttttggcgatgttgtctattattaatttgctataggcaaacataaataacattacctaaaaggaagacgttatggtgaagaagacaattgcagcgatcttttctgttctggtgctttcaacagtattaactgcctgcaacaccacgcgtggcgttggtgaagacatttctgatggcggtaacgcgatttctggtgcagcaacgaaagcgcagcaataagcaataacggtacgacagttatgtcgtgccgtttgtttttttgcgatagtcacaaaggtaatagttgaaattcccctgccacctggcaaaatatccgttcaaccatcagctttgcaggacgacctgcaaacgcctcttttcaccggggacggccccaattctccggagcctgatatgtcctggattatcttagttattgctggtctgctggaagtggtatgggccgttggcctgaaatatacccacggctttagtcgtttgacgccaagtgttattactgtgacggcgatgatagtcagtatggcgctacttgcctgggcgatgaaatcgttaccggtagggacggcttatgccgtgtggacgggtattggcgcagtcggcgcggccatcaccggcattgtgctgctcggtgagtccgctaacccgatgcgcctggcgagtctggcgttaatcgtattggggattattggtctgaaactcagcactcactaactaccgggctgctgtacccaaataaacttactgacatcaaacccttcccgggtcgcgactgccagcatctcctgtttcacttcgtcagaaatggttggcgtgcgggagagtatccacaggtagtcgcggtccgggccgcaaaccagcgcatggcggtattcccgatcgagtgcaataacgttataaccgccatagaaaggaccaaagaatgacactttcagcgcagcgcgagttggtgcgccggtaaagtacgctttcccttcactctgctgccacattcctctgtcagggttatagcctttattaatgacattcaggccgccgtcatcacgcaggctgtatgttgcggtgactttttccagtccacgttcaaaacggtgatcaaaacgggcaatctcataccaggtaccgagataacgtttggcgtcgaaattattcactactgttacgccacgcggcggcgtaggagaactgcaggcaacgaccagaaatgcagctgtcgctgcggcaacgagagggagcaggcgcataaatgtttccttactggtttttttctaagtgtagatgacagcaaggaaaagcgcagaaaaggtccgaaaattcggacccgatgaaattttactgtagagcgttgagaatctgccaggcggcggcgactctcgctggattgggatagtttttgttagccagcatcacgatacccagctctttttctggaataaacgcgacatagctaccaaatccgccggtcgcccccgttttatgcacccatgatgcgcgtactgcaggagttgggggcgtaatcgcttttacggggcgtgctgccagtgcaattttattgtcactgccgttaacgatgatgtcaggatttaccggccagtccagcatttcccagcccagaccctgatacatatcgccggtttgccagtagcgagattgtgccagttgtatcccttgttgaagtgttttgtcgttgatatcacggggattcatattgcttcgtacccagcaggccatatcttcaatggtcgacttcacaccataagtttcagcatctaacgcccctggcgaaacatgaactgccttgccttcgcgatatccccaggcgtaattcttttcttctgcgggcggtacattaatccacgtatggttgagtttgagtggctggaagacacgtgtttgcatcgcctgctcaaaactcaaaccagacggcttcacagccagtgcgccgaacaaaccgatactggagttggcatacagacgttgtgttcctggcgcccatgcaggctgccagttttgatagaagcgcagcaagtcgcttgaggatttcacctcatccggcacctgcaatggcaggccgccagcagtgtaggttgcgagatgtaatagtgtgatcccattccactgtttagcggtaagttcaggccagtattttgttgtgggatcgcttaacttgatttcccctcgagcaatagcctcgccaccaagcacgcccgtaaatgttttgctgaccgaacctaactcaaacaacgtttgctgtgtgacgggctgctttttggcgatgtccgcatagccccaggtaaagtaataaggtttaccctgataaattaccgccaccgccataccggggatcttttgttgctctataagcggggtaattgtgcgatgcacaatatcgttgatttgttgaggggcagcaaatgtggagcaagaggcggtaattaataaggcgcagagcgtcgttttgaacataaggtctggtttccatacaaaacggcccgccataggcgggccggatttacattggcgatacgttagattgtaacgataccaatcagcgtgacaactgtcaggatagcagccagaccgtagaaaacccatttgcccgcaggcacgtgaattttcagatcgtgcatcgcgtggtgcatacggtgtaaaccacaccacagcggcagaacgatcatcaggaacaggaatacgcgaccaatgaagctctgcgcgaacgccagaacgcgctcgtagctcagcgcatcacccggaaacagccccagtggcagcagaatacccaccagcaggatcatcaccggcgcaataattgcgctccacataccaccggccccgaagaggccccagaataccggttcgtcagaacgctttggatttggattaatcatctcaggctccttaccagtacagggcaacaaacaggattacgatggtggcaaccacagttaccgcccagagacttttgataattggctctggtcccattttttcgtcttttacaatgatattggccgctttcggtgccagttcaaaccaggttttggtatgcagcagagctgccgccagagtgatcaggttaatgatcacgataaccgggttttgtaaaaagtcgacgaatcccgcccaggcttccgggccatttttcagggcaaacagcccgaaaatcagttcaatgctgaaccacacagccggaaccgccgtgccttcgcgcagcatgtaaaagcgataaaacggcaattttttccaccaggtggacgtcattggccgtacatacggtttacgtttagtcgtcatgttgcactccttagcgtggtttcagggtcgcgataagaaagtctttcgaactttctactttgccctgctgaatggccgcagccggatcgacgtgtttcgggcagacttcggagcaatagcccacgaaagtacagctccatacgccgttctggctgttcaactgcgccatacgctccttcttaccgtggtcgcggctatcttcgttataacgatgcgccagcgtaatggcagccggaccgatgaactctgggttcaggccaaactgcgggcacgcggcgtagcacagaccacagttgatgcaaccggagaactggtgatactttgccatctgcgccggggtctggatgttagtaccctgatccgcggtgcgggagttgccgatgatgtacggtttgatcgcttccagactttcgatgaagtgggtcatatcgaccaccagatcgcgttcaatcgggaagttagctaacgcttcaaccttcataccgtcggtgtaatcacgcaggaaggttttacatgccagttttggcacgttgttaaccatcatgccgcaggaaccacaaatcgccatacggcaggaccagcggtaactcaggtccggtgccaggttgtctttgatgtagcccagcgcatccagtaatgaggtagttgcgtcataaggcacttcatagaatgcgctatgcggtgcggtatcgacttccgggttatagcgcaccacctcaattttcaggttttcatctcagccattcgccttctccttcttattggctgcttccgccttatcggctgcatccgcttcgccaccgtaaacgcgtttagctggcggcagcgtagtaatcttcacgtcgctgtactccaggcgagtcgtgccatcagcatcgcggaaggcgagggtgtgtttgaggaagttgacgtcgtcacgctcggtgcaaccttcgtccagacgctggtgtgcgccgcgggactctttacgtgccattgcggagtgcgccatacattcagcaacgttcagaccgtggcccagttcaatggtgtagagcaggtcggtgttgaacacgctggaggtgtcggtgatgcgcacgcgcttgaagcgttcctgcagctctgccagcttgtcgatggttttctgcatcagttccggcgtacggtagataccgcaaccttcttccattgccaggcccatttcgtcgcggatcttcgcccagttttcgccgccatcctggttaaccagatctttcagacgttgttcaacgccagctgcctgcgcttcaattgccgcttcgttgccattaccggcagttgctgcacgctctgtcgcttgttcaccggccagacggccgaagaccaccagttccgccagggagttggagcccagacggtttgcaccgtgcagaccaacagaggaacattcacccacggcgaacagacctttaatgcgggtttcacagttctgatcggtttcgataccgcccatggtgtagtgtgcggtcggacgtaccggaatcggttctttaaccggatcgacgccaacgtacgctttcgccagttcgcagatgaacggcagacgttcatgcagttttttctcgccgaggtgacgcaggtcgagataaaccacatcgccacgcggcgtggagatggtgttgcctttacgccattcgtgccagaaggcctgagaaactttgtcgcgtggacccagttccatatatttgtttttcggctcgcccagcggagtttccgggcccatgccgtaatcttgcagataacggtagccattttgttgaccagaataccgccttcaccgcggcagccttcggtcatcaggataccggaacctggcagaccggttgggtgatactgaacgaattccatgtcacgcagcggaacgccgtggcttagcgccatacccataccgtcaccggtaacgatgccgccgttggtgttgtaacgataaacgcgacccgcaccgccagtagccataacgaccgcgttagcacggatctgcaccagcgtgccttccatcatgttcattgctaccaggccgcgaacatgaccatcatcaaccagaatatccagcacgaaatgttcgtcaaaacgctggatctgcgggaattgcagagaggtctggaacagcgtgtgcagcatatggaagccggtcttatcggcggcgaaccaggtgcgctcgattttcatgccgccgaagcgacgtacgttgacgctaccatccgggcgacggctccatgggcacccccacagttccagttgggtcatttcggttgggcagtggtggacgaaataatccacgacatcctgctcacacaaccagtcgccacccgctactgtatcgtgaaagtgatattcgaagctgtcatgatcctgcgcgacagcggcggagcccccttctgcagcaacggtatggctacgcatcgggtatacttttgagattagtgcgatttttgcatttggatttgcctgcgcggcagcaattgcagcacgtaatcccgcgccaccggcgcctacaatggcaagatcggcttgaaaggtttgcacgacattcctccagattgtttttatcccacagccccgtacttcagggtaagtgcctgaaagttacggtctgcgaacgctattccactgctcctttataggtacaacagtatagtctgatggataagtctgaaatttgacgagatcgatttttttagtgcgcaagagggctaaattatcactgaagatgattaatttaattactaaaccatcagatcgtgctttttttagtcactgcccaccgctgtttgattcctgcgtaaaatttgtctcgccgtcgcgttgcgagtagacttcgtgcccttgtcaaaaactggagatttaactatgagcgaaacggcatcctggcagccgagcgcatccattcctaacttattaaaacgcgcggcgattatggcggagatccgtcgtttctttgccgatcgtggagtgctggaggtggagacgccttgtatgagccaggcgacggtaaccgatattcatttggtcccgtttgagacacgtttcgttggccccgggcattcgcaggggatgaatctctggttaatgaccagcccggaataccatatgaaacgcctgctggttgccggttgtgggccggtattccagctgtgccgcagcttccgtaatgaagagatggggcgttatcacaaccctgagttcactatgctggagtggtatcgaccgcactatgatatgtaccggttgatgaacgaggtggacgatctcttacaacaggtgctggactgcccggcagcagaaagcctttcttatcaacaagctttcttgcgttatctggaaattgacccgctctctgccgacaaaacgcaactgcgggaagtcgcagcgaaactggatttgagcaatgttgctgataccgaagaagaccgcgacacgctgctacaattgctgtttacctttggcgtagagccaaatattggcaaagaaaaaccgacctttgtgtaccactttccagccagccaggcatcactggcgcaaatcagtaccgaagatcatcgggtcgctgaacgctttgaggtttattataaaggtattgagctggcgaatggtttccatgaattgacggatgcccgtgagcagcaacaacgctttgaacaagataaccgtaagcgcgcggcgcgcggtttgccgcagcaccccattgaccagaatctgattgaagccttgaaagtcggtatgcctgactgttccggcgtggcattaggtgttgatcgtctggtgatgttggcgctgggcgcggagacactggctgaagtcatcgcctttagcgttgaccgggcataattctgaaaaattactgaattaacagcgaagaatggcgtgataagcgccattctgtagcatatgttttcatttttccgttaaaggccacaatttaagactggatatttgatatcatccaggtatcaattctgtattggtttttacgctgcctgctcaatgttgcgcagtgcagttcagtgggcacgtgttatacacgcgctgaaatgaaggatggtttcatgcctcacacgataaaaaagatgagtctgataggactcatattgatgatctttacttccgtatttggatttgccaatagcccatcggcttattacttaatgggttatagtgcgattcccttttatatattttctgcattgttattctttattccattcgccttaatgatggctgaaatgggagctgcttatcgcaaagaagaaggcggtatctattcctggatgaataatagtgtcggaccacgttttgccttcattggtacgtttatgtggttttcctcttatatcatctggatggtgagtacctccgcgaaagtttgggtaccgttctcaacattcctctatggtagcgacatgacccagcactggcgtattgctggactggagcctacgcaggtggttggtctgctggcagtggcatggatgattctggtcaccgtcgttgcttcaaaggggattaataaaattgcccgcattactgcggtgggcggtattgcagtaatgtgtctgaatttagtattgctgttagtaagcattactattttgttattaaatggtgggcatttcgcgcaggatattaatttccttgcatcaccgaacccaggttatcagtccggtctggcaatgctatcgtttgtggtatttgctatttttgcctatggcggaattgaagcggttggtggtctggtcgataaaacggaaaatccagaaaagaactttgccaaaggtattgtttttgccgctattgttatttcaatcggttattcgctggcaatatttttatggggtgtcagcacaaactggcagcaggtattaagtaatggttccgttaaccttggcaatattacctatgtgctgatgaagagcctcggggtgacgctgggtaacgcactgcatttgtcacctgaagcgtcattgtcgctgggcgtatggtttgcgcgtattaccggactttcgatgttcctcgcttataccggtgcgttctttacgctttgctattcaccgctgaaagccatcatccaggggacgccgaaagcgttgtggccggaaccgatgacgcgcctgaatgcgatggggatgccgtctatcgccatgtggatgcagtgcgggttggttactgtcttcatcctgctggtttcgtttggtggcggtaccgcatccgcgttctttaacaagctgacgctgatggcgaacgtgtctatgacgcttccttacctgttcctcgcgctggctttcccattttttaaagcacgtcaggatctcgacagaccatttgtgattttcaaaacgcatatgtcggcaatgattgcaacagtggttgtcgtactggtggtgacatttgcgaacgtcttcaccattattcagcctgtggttgaagccggagactgggacagcacattgtggatgattggcggccctgtcttcttctcgctgttagcgatggcgatttaccagaactattgcagcagagtggcaaaaaacccgcagtgggcggtggaataacccgatgccctatcgtctgcctgacgatagggcgtaaagacaggaaatgttatggatgacaccagccgggacccggcaataaccgaagatgaaatcagggcgctgcaattttctgccggggatgtagcggaaatagagcagacgattctctcttttgtcgatgcctgccacacccgtaaagtggcgatggtggtgggtagcaccattaacaccctcaaagatcgcgatggtaaacggtggggaaacctgccggatatttattgcgcttatcttatccgatgtctggtttttcgcggggaattagtgggatacggcgatttgtttcgtatgcgctatagcgaaattaagcgaccggttaccttatgagtgcgcgcatgtttgtcttgtgctgcatctggtttattgtggcgttcctctggataaccatcacttccgcgctggacaaagagtggatgattgatggacgcgggattaacaacgtctgcgatgtgttgatgtatctcgaagaagacgatacccgtgatgttggtgtgataatgacgttaccgctctttttcccttttctctggttcgctttgtggcgaaaaaaacgcggctggtttatgtacgccaccgcgctggctattttcggctactggctgtggcagttttttctgcgctatcagttttgtttgtgagccggattggttcatccggcacacaaacttacaaacttcccgcctgacgacctttgcccgcagacgtcagcgttctccccgtttgtttaccgttgaggctttccagacgcatctggaagggcgggaatggcatatcgataccgtgggcgtggaagcctgccagaatcagctggtggatctcatggcgtagcggcatacggtgacccatctcagcggcgtaaatacgcagctcgaaaatctgaatcccctgttgcagatccaccaggaagacttccggtgccgggttgtcgatcaccagcgagcagcgacgcgctgcggtgagcaggatttccgtcacttcttcgctattggcatcggcaggggccggtatcgtcaacaccacgcgcgtgaccgagtcagagagcgaccagttgataaactgctcggtaataaacgccttgttcggcacgattatctctttacggtcccagtcgctgatggtggtggcgcgggtgttaattttcgtcacgctaccggtaagatcgcggatcgttaccgtatcgccaatgcgaatcggtttttcgaacaggataatcaggccagagataaagttggcgaaaatctcctgcaaaccaaaaccgagaccaacaccgagcgcggcaaccagccactgcaatttcgaccactcaataccaatcatcgagaagccgaccagcccgccaatcagcatcagcagatatttggtgatggtggtgatggcgtagcccgtacccggcgttaaatccaggtgctgcaaaatcgccagttccagcagcgcgggcaggttgcgcaccagctgcgtggtgatgataaacaccagaatggcaatcagcaccgcaccgagggtaattggctccagactttctacgccctgtaccgtggaggtgacatcccacagcgaaatattttcgaggaagccgaaagcggaatggatttctgaccacagcacaatgacagaaagcagggcgatcaacatcaaaattgagcgcaccagccgcaaggattgcgcactgatggcatcgagatcgacttcgctttcatcgacttcaattgccccttccgggctactgtgatgatgcgcttcctcttcgccacgcgcgcgttgcgctaacatctctgcccggcgatgcttcgcccggtcaaacgccagcctgcgacgctggatcagcatccagcggcggataacgtgataaaccaccagtagcaggaaccagatggcaaccgaggtttcaagcctcgctaacagtgcctgcgccgttgccagataacccaccgctgacgccagaatggcaaccagtggtgcgccaatcatcatgttccacagcatatggttggtaatgttgtcgccgctgccctctttgttgaggtacagcgggatcccggcctttttcaggctgagggtgaccaccgccagcgcaccgcaaatgaggataaagcaaagccgtcccagcgaaccggagaattcacggtcgtcgaggttatcgaacatcatcagcgccataatcagcggcacaataagcccgatgctcatcaggtagtagcgcatcccacgggaaacacgttcgcgcggccagccaaaatgagcgataaacaagccgttcgggcgggcaaaggtggcgcaaatcatcactacccacagcagcggcacggtggccgttacgccatcgccaatcgcgaccgccagcggataaggccacgcctcgcgcaagccgtaacccagcgtcatccacagcaccggcagcggtgacgcgacgagaatcgaccagaaaagagtgcgcaacgtcagccagaagtgatcctgagtcactttgccgactttcgccgccgaacgttcaagaaaacgggtgaaatagcggcgcgagtaaatactgcaaccgaccagaatcaacgcgccaaacagcggcaaaatcgtctctttgctggtcagcatcatcacactggctttgcccaactgactgaaggtgtccagcgaaatgagacgacgcagatcctgggcgatttccagcggccaggcgatggtcatcgggcgcacgtcagaggtccagaacagatagcggtgcgttgcttcgttcacctctttcagcgcatcctccagttgcccgttggagactttcagcttggtcagttccagtagtagcgtgtcgccaccctgcaacaatgagttcagcaactcacgctgagtgcgcagttgtgcttccagaatacggttttgctcggcggtcagcggctgaccgtcggcctgatggatttgccgtagcagcggctgtttattaagcagatcctcataacgtaaccgttgcacacgcaactgcgccatttcggtatcaagctgttgtggttttggcatttctggtagccgtgccacctgcgcccgcagcgcttcaccgagcaggttggacgatcccagccattgcgactgttcacgcagcgtattcaacgcctgccggacctgtaacgtctggctggcagcctgacgctgttgcgaggcaacgagatccatccgctgcgcctgttgattcagtgccgccgatagttcgcggttaattttgaattgcgcgacgatatctttcggcaaatcggcactgttttctgccagtaattcggtactttccagcgcccgctccgcctcaagctgacgttggctattcaactgattacgtaaggcctgcaaatacgcatccagttgctggctctctttttccgccagctctgagcgcaagcgcgctaattcctgacggttattggcagacagctgcgccagttccagttcatcaacgagcgctttcaggcgtgcggagtcagactgcaacgcgaaattttgtgcctgattgagcggagtattgccggtaagcgttcccaggcggcgctcgatctcatttaactgacggcgggcatcggtttgctgttgcggcagttgattcagtgaatcggcaatctcgcgggcgcgctcctgctcttgctgggcctgacggctcttatccagcaactgactgctgacctggagaatttcctgattcagcgcatcggtagacattcccggcgacacgctgcgcggctcgtcacgcatgttgtttaattgtgcgcgcagagtagcggagagtttcgggtaattatcgataacttgctgatattgtttgatgcgctcaagggaaccttttcgttcctcaagcgcatttaaggcagactggagtgcctctatgacttccggctgcgcgggtttcgccgcttttgcctgctccagttcctgggtgatttgtttgctatcggggccgtcgcggcgtacgccccccaactgaggcaccaggccatcagaaaagtgataatcaggcgcacgtcagcgtttcctttgatggattagacctggtcttttttgtcgtcaaccaatgggctggcgtcgtgttctgcttcgatctcttcagcaggaagcggggcaggttcagcgtctggcgtaacaaaggtttcggtagatactgccagcggctggccaattttcgtgacagacaggctttccagttgctcaaccagattcactttacccggtgcaaacaggttgataacggtggaaccgagtttaaagcgacccatttcctggcctttaagcagtgccacagaaccgtcgttttccccggcaggccaggtccagcgcttgatgataccttcgcgcggcggcgtaatggtgcccgcccagaccgtctcaatgctgccaacaatcgtcgctccgaccagaatctgcgccattgggccaaattcggtatcgaaaaggcaaatcacgcgttcgttacgggcaaacagattcggcacgttctgagcggtgagatggttaacggagaagagatcgcccggcacgtagatcatctcacgcagaataccgttgcacggcatgtgtacgcggtggtagtcacgcggggagaggtaagtggtcacaaacgtaccgttgcggaacaggttcgccatcagatagttgcctgccagcaaggcttcgaggctgtagttgtggcctttggcttgcaggattttatcttcttcgattttacccaactggctgataacgccatcggcaggcatgaccaggacattcggatcggtatcgattgggcgtacttcgtcacgcagcggacggacaaagaattcgttaaaggtgcggtagctggcggtgtccggcttttgcgcctctttcatgtcgaccttgtagtatttaacgaacagatcgataaccagttttgtcagccatcctgcccgcttgcttgcgccccaacccgccaggcgagtaagccatagtttcggcagaatgtactgtagcgaaagtttaaatgaatttaacaaggtagcctccaggccattgttttgtcgttcctgatccggccaacatgccggatcctgaaaaaaaggggatgattctaacgacggttagcttaattgtcagtcatccgtatcagaaaagtttttacgcgtttttacctgcgccatgctttccagaatacggtgatagttttcgaaacgggtttccgcgatttttccttcctcaaccgcttcccggatagcgcagcccggatcggtatcgtgtttgcaatcgcgatatttacacagacctaaatagtcatggaattcgacaaagccctgagtgatttgttccggctccaggtgccagaggccgaactcacgcacaccaggggaatcaatcacatcaccgccgtgcgggaagtgatacagtcgtgcggcggtcgtggtgtgctgaccgagacccgagttgtcagagacatcgttggtcaggatctctttttgcagccccagcaacgcgttcagcaggctggatttgccgacgccagactggccggcaaaaatgctgatgcgcccggtcaacgcctcttccagcggttttagcccatcctgagtatggctggaaaccatcaatacgcgataaccaatgttgcggtagatatccatctgctcgttgacgaacgccatgccttcgtcgtccagcaggtctatcttattgagcacaataatcggctcaatctgcaaggtttcgcaggccaccaggtaacggtcgataatattgagcgacagctccggcaaaatggcggagacaatgacaatctggtcgatgttggcggcaataggtttcacgccgtcgtagaaatccggacgcgtcaacactgaggtgcgctcatgcaccgcttccacgatccctttgacatttacgccttccgccgccggtttacccggacgccagactacgcggtcgccggtcaccagcgaacggatggtacggcgaatattgcagcggtgaacgtcgccatcggcggattccacatcagcgtgcataccaaagcggctgatgacgataccttcatcaggctcgccaaacagattgtcgtcgtagtcgggcttctccttagacgttttaagacgacgctggtgattggcgttcacgcggcgctgctggcctttggagagtttatttttactcaatcgtacagactcctggtcgcccctgatgggcaaaacatctatgatacacgcaattgtggatcaatatagtcactgtgaatgggtggaaaatagcatgagtgccaatgaaaacaacctgatttggatcgatcttgagatgaccggtctggatcccgagcgcgatcgcattattgagattgccacgctggtgaccgatgccaacctgaatattctggcagaagggccgaccattgcagtacatcagtccgatgaacagctggcgctgatggatgactggaacgtgcgcacccataccgccagcgggctggtagagcgcgtgaaagcgagcacgatgggcgatcgggaagctgaactggcaacgctcgaattcttaaaacagtgggtgcctgcgggaaaatcgccgatttgcggtaacagcatcggacaggaccgtcgtttcctgtttaaatacatgccggagctggaagcctacttccactaccgttatctcgatgtcagcaccctgaaagagctggcgcgccgctggaagccggaaattctggatggttttaccaagcaggggacgcatcaggcgatggatgatatccgtgaatcggtggcggaactggcttactaccgcgagcattttatcaagctgtaaaatttttcctggtcacgtaagcgccggaatccacttgcggcggcgtgattttgacgctaaattgaacgtcttgctgataatttcagcacttgagataaaaacgcaaaaaaaacttttttggggggttgcagagggaaagatttctcgtataatgcgcctcccgtaacgacgcagaaatgcgaaaattacgaaagcaaaattaagtagtacgcgggaatagctcagttggtagagcacgaccttgccaaggtcggggtcgcgagttcgagtctcgtttcccgctccaaaatttgaaaagtgctgcaaagcacagaccacccaagcgggaatagctcagttggtagagcacgaccttgccaaggtcggggtcgcgagttcgagtctcgtttcccgctccaaaatttgaaagtgctgtaaggcacagaccacccaagcgggaatagctcagttggtagagcacgaccttgccaaggtcggggtcgcgagttcgagtctcgtttcccgctccaaattcttctctcaataaaatatccacagcgatgcgatgcgttattgctggttttcgttgtctctgacaaactcttgtaaacagagttatccacagcctcaggctgtaatcttaatttcaaagaaacttcgcacggtgaatagtatttttttaacatattgatagataagttaaaaattaagattccgttttgtcgagtcgatcacttgacgattttattcgtcttgaattgcaatgcgtttttatttttattcacaagctgtggatgaatcaggcgtcacgcggtaaccctttttcaatcacccgaaccagacgctgttttttcggcaattgcacttcgactatgcacgcatttcgtctctctatttgctgcgcaatcgcccacgctatgtgctcatcgagaagtgggtgctcacctttacgactttccagcgctgtcaaaatcgtttcatcccaaggggcattgcctaatgctacggcgatattacgcagccaacgcaggtgaccaatacgacgaatcgccgatccttccgtgacttttaaaaacttctcttcgctccaggcgaataactcaatgagttccggtgcgtgtagcggcttacgcgggctgaaatcctcttctgtggtgagttgtgaatagcgattccacgggcagataagctggcagtcatcgcaaccgtaaatacggtttcccattaacggtcgcaactcttccgggatcgccccttcaagttcgatggtgagataagagatacagcggcgagcatcgacggtatatggctcgacgatggcaccggtcgggcaaatcgtcatacaggccacgcatttaccgcatccttcctcgactggttgatccacgggcagcggaatatcgaccagcaattcgcctaaaaagaagaaagaaccggcctcgcgattgaggataagtgagtgcttacctgtccagccgagcccagctttttcagctaacgggcgctcgagaataggcgcagaatcgacaaacggtctaaaattcagcgaaacacaatgttgctgaatcatctcgcccagctttttgagtcggttgcgcagaagtttgtgatagtcacggcccagcgcataacggctaacatagccgagtttggggtttttcagcgtgctggcaaatgcggcgttagcaggaaggtaattcatccgcacgctgatcacgcgcagcgtaccgggcaataattcatgggggcgagcgcgcagcataccgtgacgtgccatccagtccatttcgccgtggtattgtttgtccagccatgcttgcagtttgggctcggactcgctgagatcggtatcggtaatacctacctgctgaaagcccagttccagcccccactgtttaattttttgcgctaactgattgagatcgaggggctctgacatgacggaccatacaatgaagaaaaaccccgtaagtataccacacaccgtctggcacgccgacgatatccgccgcggagaacgtgaggcggcagatgcgctggggcttacactctatgagctgatgcttcgcgctggcgaagccgcattccaggtgtgtcgttcggcgtatcctgacgcccgccattggctggtgctgtgcggtcatggtaataacggcggcgatggctacgtggtcgcgcggctggccacagcggtcggcattgaggtcacgctgctggcccaggagagcgacaaaccgttgccggaagaggccgcgctggcacgcgaagcatggttaaacgcgggaggcgagatccatgcttcgaatattgtctggcccgaatcggtagatctgattgttgatgcgctgctcggtaccggcttgcagcaagcgccccgcgaatccattagccagttaatcgaccacgctaattcccatcctgcgccgattgcggcggttgatatcccttccggcctgctggctgaaaccggcgctacgccaggcgcagtgatcaacgccgatcacaccatcacttttattgcgctgaaaccaggcttgctcactggaaaagcgcgggatgttaccggacaactgcattttgactcactggggctggatagttggctggcaggtcaggagacgaaaattcagcggttttcggcagaacaactttctcactggctaaaaccgcgtcgcccgacttcgcataaaggcgatcacgggcggctggtaattatcggtggcgatcacggcacggcgggggctattcgtatgacgggggaagcggcgctacgtgctggtgctggtttagtccgagtactgacccgcagtgaaaacattgcgccgctgctgactgcacgaccggaattgatggtgcatgaactgacgatggactctcttaccgaaagcctggaatgggccgatgtggtggtgattggtcccggtctgggccagcaagagtgggggaaaaaagcactgcaaaaagttgagaattttcgcaaaccgatgttgtgggatgccgatgcattgaacctgctggcaatcaatcccgataagcgtcacaatcgcgtgatcacgccgcatcctggcgaggccgcacggttgttaggctgttccgtcgctgaaattgaaagtgaccgcttacattgcgccaaacgtctggtacaacgttatggcggcgtagcggtgctgaaaggtgccggaaccgtggtcgccgcccatcctgacgctttaggcattattgatgccggaaatgcaggcatggcgagcggcggcatgggcgatgtgctctctggtattattggcgcattgcttgggcaaaaactgtcgccgtatgatgccgcctgtgcgggctgtgtcgcgcacggtgctgcagctgacgtactggcggcgcgttttggaacgcgcgggatgctggcaaccgatctcttttccacgctacagcgtattgttaacccggaagtgactgataaaaaccatgatgaatcgagtaattccgctccctgatgagcaggcaacattagacctgggcgagcgggtagcgaaagcctgcgatggcgcaaccgtaatctatctgtatggcgatttaggcgcaggtaaaaccacctttagccggggctttttacaagctctgggtcatcagggtaatgtcaaaagccccacttatacgctggtcgaaccctatacgctcgacaatttaatggtttatcactttgatttgtaccgccttgccgatcccgaggagctggagtttatggggattcgcgattattttgccaacgatgccatctgcctggtggagtggccacaacaaggtactggtgttcttcctgacccggatgtcgaaatacacattgattatcaggcacaaggccgtgaggcgcgcgtgagtgcggtttcctctgcgggtgaattgttgctggcgcgtttagccggttaacctttgaaaggtggcgggatgatgtatcgcatcagaaattggttggtagcgacgctgctgctgctgtgcacgccggtgggtgccgcgacgctctctgatattcaggtttctaacggtaatcaacaggcgcggataacgttgagttttattggcgatcctgattatgcgtttagccatcaaagcaaacgcaccgtggcgctcgatatcaaacaaacgggcgtgattcagggactgccgttgttgttcagcggcaataatctggtgaaggcgattcgctctggaacgcctaaagatgcacaaacgctacggctggtggtcgatcttaccgaaaacggtaaaaccgaagcggtgaagcggcagaatggcagcaattacactgtcgtctttacgattaacgccgatgcgccgccacctcctcctccgccgcccgtggttgcgaaacgcgttgaaacgcctgcggttgtcgcaccgcgcgtcagcgaaccggcgcgcaatccgtttaaaacggaaagtaaccgcactacgggtgttatcagcagtaatacggtaacgcgtccggcagcgcgcgcgacggctaacactggcgataaaattatcatcgctattgatgccggacacggcggtcaggaccctggcgctatcggccccggtggtacgcgggagaaaaatgtcaccatcgccatcgcgcgtaaattgcgtactttgctcaatgacgatccgatgtttaagggcgttttaacccgtgacggggattactttatctcggtgatggggcgcagtgatgtggcacgtaagcaaaacgccaatttcctcgtgtcgattcacgctgatgccgcaccgaaccgcagtgcgactggcgcttccgtatgggtgctctctaaccgtcgcgccaacagcgaaatggccagctggctggagcagcacgagaaacagtcggagctgctgggtggggcgggtgatgtgctggcgaacagtcagtctgacccctatttaagccaggctgtgctggatttacagttcggtcattcccaacgggtagggtatgatgtagcgaccagtatgatcagtcagttgcaacgcattggcgaaatacataaacgccgaccagaacacgcgagtctcggcgttctgcgttcgccggatatcccgtcagtactggtcgaaaccggttttatcagcaacaacagcgaagaacgtttgctggcgagcgacgattaccaacaacagctggcagaagccatttacaaaggcctgcgcaattatttccttgcgcatccgatgcaatctgcgccgcagggggcaacggcacaaactgccagtacggtgacgacgccagatcgcacgctgccaaactaaggacgattgatgccaattcaggtcttaccgccacaactggcgaaccagattgccgcaggtgaggtggtcgagcgacctgcgtcggtagtcaaagaactggtggaaaacagcctcgatgcaggtgcgacgcgtatcgatattgatatcgaacgcggtggggcgaaacttatccgcattcgtgataacggctgcggtatcaaaaaagatgagctggcgctggcgctggctcgtcatgccaccagtaaaatcgcctctcaggacgatctcgaagccattatcagcctgggctttcgcggtgaggcgctggcgagtatcagttcggtttcccgcctgacgctcacttcacgcaccgcagaacagcaggaagcctggcaggcctatgccgaagggcgcgatatgaacgtgacggtaaaaccggcggcgcatcctgtggggacgacgctggaggtgctggatctgttctacaacaccccggcgcggcgcaaattcctgcgcaccgagaaaaccgaatttaaccacattgatgagatcatccgccgcattgcgctggcgcgtttcgacgtcacgatcaacctgtcgcataacggtaaaattgtgcgtcagtaccgcgcagtgccggaaggcgggcaaaaagaacggcgcttaggcgcgatttgcggcaccgcttttcttgaacaagcgctggcgattgaatggcaacacggcgatctcacgctacgcggctgggtggccgatccaaatcacaccacgcccgcactggcagaaattcagtattgctacgtgaacggtcgcatgatgcgcgatcgcctgatcaatcacgcgatccgccaggcctgcgaagacaaactgggggccgatcagcaaccggcatttgtgctgtatctggagatcgatccgcatcaggtggacgtcaacgtgcaccccgccaaacacgaagtgcgtttccatcagtcgcgtctggtgcatgattttatctatcagggcgtgctgagcgtgctacaacagcaactggaaacgccgctaccgctggacgatgaaccccaacctgcaccgcgttccattccggaaaaccgcgtggcggcggggcgcaatcactttgcagaaccggcagctcgtgagccggtagctccgcgctacactcctgcgccagcatcaggcagtcgtccggctgccccctggccgaatgcgcagccaggctaccagaaacagcaaggtgaagtgtatcgccagcttttgcaaacgcccgcgccgatgcaaaaaccaaaagcgccggaaccgcaggaacctgcacttgcggcgaacagtcagagttttggtcgggtactgactatcgtccattccgactgtgcgttgctggagcgcgatggcaacatttcacttttatccttgccagtggcagaacgttggctacgtcaggcacaattgacgccgggtgaagcgcccgtttgcgcccagccgctgctgattccgttgcggctaaaagtttctgccgaagaaaaatcggcattagaaaaagcgcagtctgccctggcggaattgggtattgatttccagtcagatgcacagcatgtgaccatcagggccgtgcctttacccttacgccaacaaaatttacaaatcttgattcctgaactgataggctacctggcgaagcagtccgtattcgaacctggcaatattgcgcagtggattgcacgaaatctgatgagcgaacatgcgcagtggtcaatggcacaggccataaccctgctggcggacgtggaacggttatgtccgcaacttgtgaaaacgccgccgggtggtctgttacaatctgttgatttacatccggcgataaaagccctgaaagatgagtgatatcagtaaggcgagcctgcctaaggcgatttttttgatggggccgacggcctccggtaaaacggcgttagccattgagctgcgtaaaattttaccagtagagttgataagcgttgattctgcccttatttacaaagggatggatatcgggacggcgaagccgaacgctgaagagttactcgccgcgccgcaccgattgctggatattcgcgatccgtcgcaggcttactcggctgctgattttcgccgcgatgcgctggcggaaatggccgatatcaccgcggcggggcggatcccactgttagtgggcggtacgatgttgtatttcaaggcattgctggaagggttgtcgccgctaccgtcggcagacccggaagtgcgggccagaattgagcaacaggcggcagagcaaggttgggagtcattgcatcgtcaacttcaggaggtagatccggttgcggcagcaaggattcatccaaatgatccacaaaggctttcccgggcactggaagtttttttcatttcgggtaaaactttaacggaactgacgcaaacgtcaggagacgctctaccgtatcaggtgcatcagttcgccatcgccccggcgagccgtgaactgctccatcaacgcattgagcagcgttttcatcagatgttggcttcaggttttgaagcagaagtccgggcgctttttgcccgaggagatttgcatacggacttgccttccattcgttgcgtgggttatcgccagatgtggtcttaccttgaaggcgaaatctcatacgatgaaatggtttatcgaggtgtttgcgccacgagacagttggcgaagcggcagataacctggctgcgtggttgggaaggggttcactggcttgacagtgaaaaaccagaacaggcgcgtgacgaagtattacaggttgttggtgctatcgcaggctgaatgtgtacaattgagacgtatcgtgcgcaattttttcagaatcgaaaggttcaaagtacaaataagcatataaggaaaagagagaatggctaaggggcaatctttacaagatccgttcctgaacgcactgcgtcgggaacgtgttccagtttctatttatttggtgaatggtattaagctgcaagggcaaatcgagtcttttgatcagttcgtgatcctgttgaaaaacacggtcagccagatggtttacaagcacgcgatttctactgttgtcccgtctcgcccggtttctcatcacagtaacaacgccggtggcggtaccagcagtaactaccatcatggtagcagcgcgcagaatacttccgcgcaacaggacagcgaagaaaccgaataaggtttcgggctgttttttttacacggggagccagcgatcctgcgttccccgctgatctatttagagggttatacgcttgtttgaccgttatgatgctggtgagcaggcggtactggtacacatctattttacgcaagacaaagatatggaagacctccaggagtttgaatctctggtctcttccgccggtgtcgaagcattgcaggtgattaccggtagccgtaaagcgccgcacccaaagtattttgtaggtgaaggtaaagcagttgaaattgcggaagctgtcaaagcgacgggtgcttcggtcgttctttttgaccatgccctgagcccggcgcaagagcgtaacctggagcgtttgtgcgagtgtcgtgttatcgaccgcaccggccttattttagatattttcgcccaacgtgcgcgtacccatgagggtaagttgcaggttgagctggcgcagctgcgccatctggctacgcgcctggtgcgtggctggacccaccttgaaagacagaaaggcgggataggtttgcgtggtccgggtgaaacccagctcgaaaccgaccgtcgtttgttgcgtaatcgcatcgtgcagatacagtcacgcctggaaagagttgaaaagcagcgtgagcaggggcggcaatcgcgtatcaaagccgacgttcctactgtttcgctggtgggatataccaacgccggtaaatctacccttttcaatcgcatcaccgaagcgcgggtctacgcggcagaccagttgtttgccaccctcgacccgacgttgcggcgtattgacgttgcagatgtcggtgaaaccgtacttgcagataccgtagggtttattcgccacctgccgcacgatctggtggcggcatttaaagccacgttacaagagacgcggcaagccacattactgctgcacgtcattgatgcggcggatgtgcgtgtacaagaaaacatcgaagcggtgaatacggttcttgaagagatcgacgctcacgagatcccaaccctgctggtgatgaacaagatcgatatgctggaagatttcgaaccgcgtattgatcgggacgaagagaacaaaccgatccgtgtctggctttccgcacagaccggagcggggataccacagctttttcaggctttgacggagcggctttccggcgaggtggcgcagcatacattgcgtttgccgccgcaggaagggcgtctgagaagtcgtttttatcagcttcaggcaatagaaaaagagtggatggaggaggacggcagcgtaagtctgcaagttcgtatgccgatcgttgactggcgtcgcctctgtaaacaagaaccggcgttgatcgattacctgatctaacggcgtagcgtctgaagcgtggagtcatatcctctggcgtcgaaagacaacagggatcaccgcataacaaatatggagcacaaacatggcgtggaatcagcccggtaataacggacaagaccgcgacccgtggggaagcagcaaacctggcggcaactctgagggaaatggaaacaaaggcggtcgcgatcaagggccacctgatttagatgatatcttccgcaaactgagcaaaaagctcggtggtctgggcggcggtaaaggcaccggatctggcggtggcagttcatcgcaaggcccgcgcccgcagcttggcggtcgtgtcgttaccatcgcagcggcagcgattgtcattatctgggcggccagtggtttctataccattaaagaagccgaacgcggcgtggtaacacgctttggtaaattcagccatctggttgagccgggtctgaactggaaaccgacgtttatcgacgaagtcaaaccggtgaacgtggaagccgtgcgtgaactggccgcttctggtgtgatgctgacgtcggacgagaacgtagtgcgcgttgagatgaacgtgcagtaccgcgtcaccaatccggaaaaatatctgtatagcgtgaccagcccggatgacagcctgcgtcaggctaccgacagcgccctgcgcggggttatcggtaaatacaccatggaccgcattctgacggaaggtcgtaccgtgattcgtagcgatactcagcgcgaactggaagagactatccgtccgtatgacatgggtatcacgctgctggacgtcaacttccaggctgctcgtccgccggaagaagtaaaagcggcgtttgacgatgcgattgccgcgcgtgaaaacgaacagcaatacattcgtgaagcagaagcgtataccaacgaagttcagccgcgtgcgaacggtcaggcgcaacgtatcctcgaagaggcgcgtgcgtacaaggcccagaccatcctggaagctcagggtgaagtggcgcgctttgctaaacttctgccggaatataaagccgcgccggaaattactcgcgagcgtctgtatatcgagacgatggaaaaagtgttgggtaacacccgcaaagtgctggttaacgataaaggtggcaacctgatggttctgccgttagaccagatgctgaaaggcggtaacgcccctgcggcgaagagcgataacggtaccagcaatctgctgcgtctgccgccagcctcttcctccacaaccagtggagcaagcaacacgtcgtccaccagtcagggcgatattatggaccaacgccgcgccaacgcgcagcgtaacgactaccagcgtcagggggaataacgatgcgtaagtcagttatcgcgattatcatcatcgtgctggtagtgctttacatgtctgtctttgtcgtcaaagaaggtgagcgcggtattacgctgcgttttggtaaggtactgcgtgacgatgacaacaaacctctggtttatgagccgggtctgcatttcaagataccgttcattgaaacggtgaaaatgctcgacgcacgtattcagaccatggacaaccaggccgaccgctttgtgaccaaagagaagaaagacctgatcgtcgactcttacatcaaatggcgcatcagcgatttcagccgttactacctggcaacgggtggtggcgacatttcgcaagcggaagtgctgttgaaacgtaagttctctgaccgtctgcgttctgaaattggtcgcctggacgtgaaagatatcgtcaccgattcccgtggtcgtctgaccctcgaagtacgtgacgcgctgaactccggttctgcgggtacagaagatgaagttactaccccggcggcagataacgccattgccgaagcggcagagcgcgtaacggctgagacgaagggcaaagttccggtcatcaacccgaacagtatggcggcgctgggtattgaggttgtcgatgtgcgaattaagcagatcaacctgccgaccgaagtgtctgaagcgatctacaaccgtatgcgcgccgagcgtgaagcggtagcgcgtcgtcaccgttcacaaggtcaggaagaagcggaaaaactgcgcgcgactgccgactatgaagtgaccagaacgctggcagaagctgagcgtcagggccgcatcatgcgtggtgaaggcgatgccgaagcagccaaactgtttgctgatgcattcagtaaagatccggacttctacgcattcatccgtagcctgcgtgcttatgagaacagcttctctggcaatcaggacgtgatggtcatgagcccggatagcgatttcttccgctacatgaagacgccgacttccgcaacgcgttaatataacgactgcggtacaggtcaataaagccaccgcatcctcagggatgtcggtggttttctttttctataaggataatgaatgaattcgacaatctggctggcgcttgccctggttttggtactggaaggtttagggccgatgctttacccgaaggcatggaagaagatgatctctgcgatgaccaatttgcccgataatattttacgtcgttttggcggtggacttgtggttgcgggcgttgtggtctactacatgttgaggaaaacgattggctgaacaaaaaacagactgatcgaggtcatttttgagtgcaaaaagtgctgtaactctgaaaaagcgatggtagaatccatttttaagcaaacggtgattttgaaaaatgggtaacaacgtcgtcgtactgggcacccaatggggtgacgaaggtaaaggtaagatcgtcgatcttctgactgaacgggctaaatatgttgtacgctaccagggcggtcacaacgcaggccatactctcgtaatcaacggtgaaaaaaccgttctccatcttattccatcaggtattctccgcgagaatgtaaccagcatcatcggtaacggtgttgtgctgtctccggccgcgctgatgaaagagatgaaagaactggaagaccgtggcatccccgttcgtgagcgtctgctgctgtctgaagcatgtccgctgatccttgattatcacgttgcgctggataacgcgcgtgagaaagcgcgtggcgcgaaagcgatcggcaccaccggtcgtggtatcgggcctgcttatgaagataaagtagcacgtcgcggtctgcgtgttggcgaccttttcgacaaagaaaccttcgctgaaaaactgaaagaagtgatggaatatcacaacttccagttggttaactactacaaagctgaagcggttgattaccagaaagttctggatgatacgatggctgttgccgacatcctgacttctatggtggttgacgtttctgacctgctcgaccaggcgcgtcagcgtggcgatttcgtcatgtttgaaggtgcgcagggtacgctgctggatatcgaccacggtacttatccgtacgtaacttcttccaacaccactgctggtggcgtggcgaccggttccggcctgggcccgcgttatgttgattatgttctgggtatcctcaaagcttactcaactcgtgtaggtgcaggtccgttcccgaccgaactgtttgatgaaactggcgagttcctctgcaagcagggtaacgaattcggcgcaactacggggcgtcgtcgtcgtaccggctggctggacaccgttgccgttcgtcgtgcggtacagctgaactccctgtctggcttctgcctgactaaactggacgttctggatggcctgaaagaggtgaaactctgtgtggcttaccgtatgccggatggtcgtgaagtgacgaccactccgctggcagctgacgactggaaaggtgtagagccgatttacgaaaccatgccgggctggtctgaatccaccttcggcgtgaaagatcgtagcggtctgccgcaggcggcgctgaactacatcaagcgtattgaagagctgactggtgtgccgatcgatatcatctctaccggtccggatcgtactgaaaccatgattctgcgcgatccgttcgacgcgtaattctggtacgcctggcagatattttgcctgccgggctaacagtgtgatacattgctgtgtcggttaagctattacgctatccgacacagtgttaaatcctcgcttttttccttccccgaactgaaataaattagcgacacagcttgtggctggtttatcatcaatataaatgtattttttcccgatttcccttttgaggttgatgtgcagttaacgagtttcactgattacggattacgtgcgctgatctacatggcgtcattgccagaagggcggatgaccagtatttctgaagtgactgacgtctacggcgtctcccgtaatcatatggtcaaaataatcaatcaacttagtcgtgccggctacgtgactgctgttcgtggaaaaaatggcggcattcgcctgggtaaaccggcgagtgcgatacgtattggtgatgtggtgcgcgagctggagcccttatcgctggtgaattgcagcagtgagttttgccacattacacctgcctgtcggttgaaacaggcgctttctaaggccgtgcaaagttttcttacggaactggataactacacgcttgccgatttggttgaagagaatcaaccgctttataaattattgctggtggagtgacgaaaatcttcatcagagatgacaacggaggaaccgagatgtcacaagatcctttccaggaacgcgaagctgaaaaatacgcgaatcccatccctagtcgggaatttatcctcgaacatttaaccaaacgtgaaaaaccggccagccgtgatgagctggcggtagaactgcacattgaaggcgaagagcagcttgaaggcctgcgtcgccgcctgcgcgcgatggagcgcgatggtcaactggtcttcactcgtcgtcagtgctatgcgctgccggaacgcctcgacctggtgaaaggtaccgttattggccaccgtgatggctacggctttctgcgggttgaagggcgtaaagatgatttgtatctctccagcgagcagatgaaaacctgcattcatggcgatcaggtgctggctcagccgctgggcgctgaccgtaaaggtcgtcgtgaagcgcgtattgtccgtgtactggtgccaaaaaccagccaaattgttggtcgctactttaccgaagcgggcgtcggctttgtggttcctgacgatagccgtctgagcttcgatatcttaatcccgcccgatcagatcatgggcgcgcggatgggctttgtggtggttgttgaactgacccaacgcccgactcgccgtaccaaagcggtgggtaaaatcgtcgaagtgctgggcgacaatatgggcaccggcatggcggttgatatcgctctgcgtacccatgaaattccgtacatctggccgcaggctgttgagcaacaggttgccgggctgaaagaagaagtgccggaagaagcaaaagcgggccgtgtcgatttgcgcgatttaccgctggtcaccattgatggcgaagacgcccgtgactttgacgatgcggtttactgcgagaaaaaacgcggcggcggctggcgtttatgggtcgcgattgccgacgtcagctactatgtgcgcccgccaacgccgctggacagagaagcgcgtaaccgtggtacgtcggtgtacttcccttcgcaggttatcccgatgctgccggaagtgctctctaacggcctgtgctcgctcaacccgcaggtagaccgcctgtgtatggtgtgcgagatgacggtttcgtcgaaaggccgcctgactggctacaaattctacgaagcggtgatgagctctcacgcgcgtctgacctacaccaaagtctggcatattctgcagggcgatcaggatctgcgcgagcagtacgcaccgctggttaagcatctcgaagagttgcataacctctacaaagtgctggataaagcccgtgaagaacgtggcgggatctcatttgagagcgaagaagcgaagtttattttcaacgctgaacgccgtattgagcgtatcgaacagactcagcgtaacgacgcacacaagttaattgaagagtgcatgattctggcgaatatctcggcggcgcgtttcgttgagaaagccaaagaaccagcattgttccgtattcacgacaagccgagcaccgaagcgattacctctttccgttcagtactggcggagctggggctggaactgccgggcggtaacaagccggaaccgcgtgactacgcggagctgctggagtcggttgccgatcgtcctgatgcagaaatgctgcaaaccatgctgctgcgctcgatgaaacaggcgatttacgatccagaaaaccgtggtcacttcggtctggcattgcagtcctatgcgcactttacttcgccgattcgtcgttatcctgacctgacgctgcaccgcgccattaaatatctgctggcgaaagagcaggggcatcagggcaacaccacggaaaccggcggctaccattattcgatggaagagatgctgcaactgggtcagcactgttcgatggcggaacgtcgtgccgacgaagcaacgcgcgatgtggctgactggctgaagtgtgacttcatgctcgaccaggtaggtaacgtctttaaaggcgtaatttccagcgtcactggctttggcttcttcgtccgtctggacgacttgttcattgatggtctggtccatgtctcttcgctggacaatgactactatcgctttgaccaggtagggcaacgcctgatgggtgaatccagcggccagacttatcgcctgggcgatcgcgtggaagttcgcgtcgaagcggttaatatggacgagcgcaaaatcgactttagcctgatctccagcgaacgcgcaccgcgcaacgtcggtaaaacggcgcgcgagaaagcgaaaaaaggcgatgcaggtaaaaaaggcggcaagcgtcgtcaggtcggtaaaaaggtaaactttgagccagacagcgccttccgcggtgagaaaaaaacgaagccgaaagcggcgaagaaagacgcgagaaaagcgaaaaagccatcggcgaaaacgcagaaaatagccgcagcgaccaaagcgaagcgtgcggcgaagaaaaaagtggcagagtgatcaataccctctttaaaagaagagggttagattgctgacaaaatgcgctttgttcatgccggatgcggcgtgaacgccttatccggcctacataatcacgcaaattcaatatattgcagagatcatgtaggccggataaacgtagtgcatcaggcaaaacgtaaacaacgagtacattaatgagcgaaatgatttacggcatccacgcagtgcaggccctgctggagcgcgcccctgaacgttttcaggaagtctttattttaaaaggccgtgaagataaacgtctgttaccgctgattcacgcccttgagtctcagggcgtggttatccagttggcaaaccgccaatatctcgacgagaaaagcgacggtgccgtgcatcagggcattatcgcccgcgtgaagccaggacgtcagtatcaggaaaacgatctgccggatctgatcgcttcgctcgatcaaccgttcctgctgatcctcgacggtgtaaccgatccgcacaacctcggcgcgtgcctgcgtagcgcggacgctgctggcgttcacgcggtgattgtgccgaaagatcgctccgcacagctcaacgctacggcgaaaaaagtagcctgcggcgcggcagaaagcgttccactgattcgggtgactaaccttgcgcgcaccatgcgtatgttgcaggaagagaatatctggatcgtcggtacggcaggcgaggcggatcatacactctatcagagcaaaatgaccggacgcctggcgctggtgatgggcgcggaaggtgaaggtatgcgtcgcctgacccgtgaacattgcgatgagttgatcagcatcccaatggcaggaagtgtttcttccctgaacgtttcggttgcaaccggaatttgcttatttgaagcggttcgtcagcgcagctagttcgtctgaattatgaaaagccatccagatttggatggttttttttgtctatagctggtaagataattacgtactgcaaatattcattttattaatatttaaactaaatctatatggaataatatatgacatggaatccgttggcgctggcgacggcgctgcaaactgtacctgaacaaaatattgatgtgacaaatagcgagagcgcattaattattaaaatgaatgattatggcgatttgcaaatcaatattctttttacttcccgccaaatgattatcgaaacctttatttgtccggtaagtagtatcagcaatccagatgaatttaataccttcttattaagaaatcagaagatgatgccgttgtcatcggtaggaatctccagcgtgcaacaggaagagtattacattgttttcggggcgttatcgcttaaatcttctcttgaagatatcctgcttgagataacctcgctggtagataacgcattggatctggctgaaattacagaagaatattcacactaattacaaggacgggtatttatgggaattttaaaaagtttatttacgctggggaaatcgtttatctcccaggcggaagaatccattgaagaaacccagggcgtgcgcatgctggaacagcatattcgtgacgctaaagctgaactcgataaagccggaaaatctcgcgttgatctgctggcgcgggtgaaattaagtcacgataagctgaaagatttacgtgagcgcaaagccagtctggaagcccgtgcgctggaagcgttaagcaagaacgttaatccgtcgttgattaacgaagttgctgaagaaatcgcgcgccttgagaatctcattaccgctgaagagcaagtgttgtcgaatctggaagtctcccgtgatggcgtggaaaaagcagttacagcgacagcgcagcgtatcgctcagtttgagcagcaaatggaagtcgttaaagccactgaagccatgcagcgtgcacaacaggctgtaacaacctctaccgttggcgcatcttccagcgtttcgacagcggcagaatccttaaaacgcctgcaaacgcgtcaggccgaacgtcaggctcgcctggatgctgctgcacagttggaaaaagtcgcagacggtcgcgatcttgatgaaaagctggcggaagccggaattggcggtagcaataaaagtagcgcccaggatgtattagcaagactgcaacgccaacagggcgagtaatttttttgccagcctcgctaaaaggctggcaactattttaaggataaaatatgtctggttttttccagcgtctgtttggcaaggataataagcctgctatcgctcgcggtccgctgggacttcatctcaatagtggctttacgctcgacacgttagcgtttcgtttgctggaagatgaattgctgattgcgctgccgggtgaggaatttacggtagccgctgtcagccacatcgatctgggcggcggtagtcagattttccgctactacacttcaggcgatgaatttctgcaaatcaataccaccggcggcgaagatattgatgacattgatgatatcaagctctttgtctatgaagagagctacggtatcagtaaagagagtcactggcgcgaggcgatcaacgccaaagtgatgggggcaatgatcttaaactggcaggaaaaacgctggcagcgattttttaacagcgaagaaccgggaaatatcgaacccgtctacatgctggaaaaagtagaaaatcaaaaccatgccaaatgggaggtccataattttaccatgggctaccaacgccaagtaaccgaagatacttacgaatatttgctgttaaatggtgaggaatcttttaacgatctcggcgagccagagtggttattttcgcgcgcgttgggtgtcgatatcccgctgacatcacttcatattattggttaattacaaggacgtttacaatgcatatactggattcacttcttgcctttagtgcctatttttttattggcgtggctatggtgattatttttctgtttatctactccaaaattacaccgcacaacgaatgacaattaatcaaaaacaataataccgcggcgtcactggcattcagcggtacattgttgggttacgtgatccccttatccagtgcggcaatcaatgcggtgagtattccagactatttcgcctggggcgggattgcactggtgattcagttactcgtttttgctggtgtcagactttatatgcccgcattaagcgaaaaaattattaatcacaataccgcagcaggaatgtttatgggaaccgccgcactggctggtggtatttttaacgcagcttgtatgacatggtaatggacgatcatggccagaaaacgcaaatcaagaaataacagtaaatttggtcacggagcgatcagtcgcattggaagaccgcataatccttttgagccgcgccgcaatcgctacgcacaaaaatacttaacgttggtgctaatgggcggtgccgtttttttaatagtcaaaggatggagtgaaagtggcgatgtcgataacgacggcgacggaacgttttattcgacagtgcaggattgtattgatgacggtaataatgccgacatttgcgcgcgtggctggaacaacgccaaagcggcattttatgccgatgttccgaagaatatgactcagcagaattgtcagtctaagtacgaaaattgctactacgacaatgttgaacagagttggatcccggtcgtttctggatttttgttaagccgagttattcgtaaagatcgcgatgagccgttcgtctataacagcggcggatcctcatttgcttcccgccccgtctggcgcaacacttccggtgattactcctggcgctccggttctggcaaaaaagagtcttactcttcaggcggctttaccaccaaaaaagcgtcaaccgtttcgcgcggcggctatggtcgttcttccagcgcccgtgggcattggggaggctaatcatgctgagacacaacgttcctgtgcgacgggatctggaccagatcgccgctaacaacggtttcgactttcatatcatcgacaatgaaatctattgggacgagagtggggcttaccgttttactctgcgccagattgaagagcagatcgaaaaaccgactgcggaactgcatcagatgtgccttgaggtggtggatcgcgcggttaaagacgaagagatcctgacgcaactggcgatcccgccgttgtactgggatgtgatcgccgaaagctggcgcgcacgcgatccttcgctgtatggccggatggattttgcctggtgtggcaatgcgccggtgaagctgctggagtacaacgccgatacgccgacctcgttgtatgagtcggcttatttccagtggttgtggctggaggatgcccggcgcagcggcattattccgcgtgatgccgatcagtacaatgccattcaggaacgcctgatttcacgctttagcgagctttatagccgggagccgttttatttctgctgctgtcaggacaccgatgaagacaggactaccgtgctgtacttgcaggactgcgctcagcaggcagggcaggagtcgcggtttatctacattgaagatctcggtttgggcgtcggcggtgtactgaccgatcttgatgataatgtcatccagcgtgcatttaagctgtatccgctggagtggatgatgcgtgacgataacggtccgctgctgtgcaagcgtcgcgagcaatgggtggagccgttatggaaaagtatcttgagtaataaagggctaatgccgctgctttggcgcttcttccctggtcatcctaaccttcttgcatcctggtttgagggtgaaaaatcgcagattgccgctggcgaaagctatgtgcgtaaaccgatctactcgcgcgaaggcggaaacgtcaccattttcgacggtcagaataacgtcgttgaccacgctgatggtgattacgccgatgaaccgatgatctaccaggcgtttcaacctctgccgcgatttggcgatagctacacactcatcggtagctggattgtcgatgatgaagcgtgcggaatggggatccgtgaagataacacgctgatcaccaaagacacctctcgtttcgttccgcattacattgctggctaagaatgttttagcaatctctttctgtcaggaatccatggcagtgaccatactaatggtgactgccattgatggagggagacacagtgcactggcaaactcacaccgtttttaatcaacctataccattaaataacagcaacttatacctgtctgatggcgcgctctgcgaagcggtaacgcgtgaaggtgccggctgggatagcgattttctagccagtattggtcagcagttaggaacggctgaatcccttgaactggggcggctggcgaatgtgaatccgcctgaattattgcgctacgatgcgcaaggacgccgtctggacgatgtgcgttttcaccccgcctggcacctgctgatgcaggcgctatgtaccaatcgggtgcacaatcttgcctgggaagaagacgctcgctccggcgcatttgtggcgcgcgcggcgcgttttatgttgcacgcacaggttgaggcagggtcgttatgtccgataaccatgacctttgccgccacgccattgctgttacagatgttacccgcgccgtttcaggactggaccacgccgctgctgagcgatcgctacgattctcacttattgccaggtgggcaaaaacgcggtttgttgattggcatgggaatgacggaaaagcagggcggttccgatgtcatgagcaacaccacccgcgcagagcgcctggaagatggctcttatcggctggtggggcataaatggtttttctcggtgccgcaaagcgatgcgcatctggtgctggcgcagactacgggcggtttgtcctgcttttttgtgccgcgctttttgcctgacgggcaacgcaacgcgattcgcctcgagcggctgaaagataagctgggtaatcgctctaacgccagctgcgaagtggagtttcaggatgccattggctggttgttggggcaggaaggggaaggaattcgtctgatcctgaaaatgggtgggatgacgcgttttgattgcgccctgggtagccatgccatgatgcgccgtgcattttcgctggcgatttatcatgcacatcaacgccatgtttttggtaatccattgatccaacagccccttatgcgtcatgtcttaagtcgcatggcacttcagcttgaagggcaaacggcgttgctgtttcgtcttgcgcgagcgtgggaccggcgtgccgatgccaaagaagccctgtgggcgcgtttatttacgcctgcggcaaaatttgtgatctgcaaaagaggtatgccgtttgtggccgaagcgatggaggtgctgggcggcattggttattgcgaggagagcgagctgccgcggctttaccgggagatgccggtaaacagtatttgggaaggttccggcaatattatgtgcctggatgtgctgcgcgttctcaataagcaagcgggcgtatacgacttattgtcggaagcgtttgtggaagtgaaagggcaggatcgctattttgatcgcgcggttcgtcgtttacagcagcagctgcgtaagccagctgaagaactgaggcgagagattactcatcagctattcctgctgggctgcggtgcgcaaatgttgaaatatgcttctccgccaatggcgcaggcgtggtgtcaggtgatgttagatacgcgcggcggcgtacggttgtcagagcagatccagaatgatttattgctgcgggcgacggggggagtgtgtgtgtaagcgtatacgactgatgcgacgctggtttcgattaactaaatgaaatatgtgaaaattgtaggccggacaaggcgctcgcgccgcatccggcattgttcatttgctgtagatgacactcatgcatacagtatcgcctgtacgcgccagttatcaggctgctggtcttcgtacatggtaataatgcggtaccatgacgcaccttgttcatcggcctttaacgccacgatacgttccacgtcctgcggatcccctgaaatattgctaactgagatctgacctatttcattcaggcccgtcacgcagtcagcactggcgaattctgcagactgtgccgtggcgctcgcaggataagtcactaattgcagcgagggtgaggcaagtaattgtttcatcgtcagctccatttttcgtttccccacatgttgcagggcattccatcgcggtaataaacgcccaggcttccagccggtaatttattgtgcacagataaacgcatagggacgcaaagcaatgtaaagctgactatgtaagttgtctgatttatttacggtacaaaatggcttgtgaataccactgtcctgtcacgatggtttcgtccaccatgacgacaacgtaataatcagcttttgcagcgacagctttcgctctgatttctgctaatgcgtcatccggagaaccccgaaccatcgtgcttacgctgcctattcgctgtaacccttgcgtctggtcgcggcgaatctcttgcggatggtccgttactggcggtgctggctgtggcgtaccttgcagtgcgctacaggcacttaacatcaacaccaataataaactggcaaaccggtaaataacgctattacgtttcctgctaaccatagtgtagtgccttattaatttaactttgggggaatgttcccgaattgttacctggtacgcgattttcgaatgaaaacgtgacgaaagcgtaacccacatctcaacattatgaactaataccgccagcagaaacttgtgctaaggatttcttcatgtcataccagacaaaaaggagagacagatgattgaaatagaatcacgcgagctggcagatattcccgttcttcatgcttatcctgtcgggcaaaaagataccccgttaccgtgcgtaattttttatcacggctttacttcatccagtctggtgtatagctattttgccgttgcgctggcgcaggctggtttgcgagtgatcatgccggatgcgcccgatcacggtagccgttttagtggtgacgcagcgcggcggttaaatcaattctggcaaatcttgctacaaagtatgcaggaattcactactttacgtgcggcaatagccgaagaaaactggctgcttgatgaccgtctggcagtcggtggtgcgtcgatgggcgcgatgacggcactggggattaccgctcgccaccccacggtgagatgtaccgccagcatgatgggatcgggctattttacatcactcgcccgttcactgtttccaccgctgatacctgaaacgacagcacagcagaatgaattcaataacattgtcgcgccgctggcagagtgggaagcgacaaaccacctggaacaacttagtgacagacctctactgctgtggcatggcctcgacgatgacgttgtgcctgccgacgaatcactacgtttgcagcaggccttaagcgagacgggacgggataaactgctaacctgttcatggcagccaggcgtgcgtcaccgcattacgcctgaggcgttagatgctgcagtgacatttttccgccagcatctttaaacacgcagaatgctgaccccttgcgcttccagttgttgcaggatttccgggttagcatttttgccggtgatcagcatatcaatttgatcggcacggctaaaaagcattcccgcgcgttcgccaatcttactgctatcaaccagtaccaccagtttccctaccacgctcagcatcttctgctctgccattgccgtcagcatatcggttttatacaacccttctgctgtcagtcctttgccgctggtaaacatccagtgcccggcatagagactgttttcgctgccctgcgggcttaaagtgatggactgacttttgttgtactgtccgcccataatgatcacgctgtcatgttcttgatcgatcaggtaatttgccagcggtagataattagtgatgatttgcactggcttgccacacatttcccgcccaagcagaaacgcggtggagccgcagttgatgactacgctttcgcccggattaaccagctgcgaggccgctttagcgatacgtactttttcatcgtgattctgcgcctgatgcagattcatcggcgtccagcgcgggcgctgttgggtaatagcttctgcgccattgcgcacttttttcagtttgccgctttcgtcaagtttattgatatcgcgtcgcgcagtggcaggcgaaattcccagacgctcaacgactttctcaacggtcacaaagcccaattgtgcgagcatttccaggaggatttgatgtctttgtgcttcagtcatgagctattccgataaaatttgatttttttagatgatatttgaaatagccaggaaatactacgccggatagcgcgaacttctccacgctatccggtataaacgacagattacaggaatgacttgaacggcagatccggttcaatagtgaagcaatcatcgaaaccgcgcggatagtggtactcgaagttgtctttatccagcggccaggtaaatttgccgccaacctgccagataaacggcttgaagccatacttcagacgatcttttttcatctcccacagcacgcggatctcttgcggatcggcctggaagtttgaccagatgtcgtggtggaacgggataaccactttcgcattcagggcttcacccatacgcagcatatcggcgctggtcattttgtcggtaataccgcgcgggttctcaccatacgatcctaacgccacatcgatctgatgttcgttaccgtgcttcgcataatagttggagtagtgggaatcgccactgtgatatagggaaccgccaggggttttgaacaggtagtttactgcgcgatcgtccatgccatctggcagtacgccagccgctttttgatcggcaggcagggtgatcagtgcagtacggtcgaaagcgtcaagcgcatgaatttcaatgtctttcacttttactacatcgcccggtttgaccacgatgcaacgctctttcggtacgccccagccaatccacaaatccacacaggttttcggtccaatgaacggtacgtcatcagcacagttctgcatcacggcagcagcaacgttaacgtcgatatgatcgttgtgatcgtgagtcgccagtaccgcgtcgatctggcgaatcgcaaacggatcaagaacaaacggggtggtgcgcaggtttggctgcagttttttcacgccagccatgcgctgcatctggtgaccctgtttcattaacgggttaccgtgactttgtttgccagtgccgcaccagaaatcaacgcaaacgttggtgccaccttccgatttcaaccagatcccggtgcagccaagccaccacatcgcaaatgtgcctggagcgacctgttcttgttcaatttcttcattcaaccagctaccccactccgggaaagtgctcaggatccaggattcacgggtgatacttttcactttactcatcgccatttaccttcatgattgttcaattcgaatcaatgtgtgattggttttgattaatcctgacactattttttcaggaaggcaatgaccattttttgactttttgccagggaagtggttgttgattttgagtgtggaaagatttaatggaatgtgtaattcaattaactaaatgaatttaaatgaatagttgtttcgttgtgtgaatcccattctatccatgtggaattatttgcgggtcgcgtcacatttaatcataaataatcttgttgtgattacttttgaaaattagagtgagtgcacaacattccgggtgtgtggaatacccggttacctcttcttcaggagatcgttatggagatcctctacaacatctttaccgtgttttttaaccaggtcatgaccaatgccccgttgttgctgggtattgtgacctgtctgggctacatcctactgcgcaaaagtgtcagcgttattattaaaggcacgattaaaaccataattggtttcatgttgttgcaggcagggtccggcatcctcaccagcaccttcaaaccggtggtggcgaaaatgtccgaagtctacggcattaacggcgcaatttccgatacttacgcgtcgatgatggcaaccatcgaccgcatgggcgatgcctatagctgggtaggttacgcggtgttgttagcgctggcgctgaacatctgttacgtgctgctgcgtcgcattaccggtattcgtaccatcatgctgactggtcatatcatgttccagcaggcggggctgattgccgttacgttgtttattttcggctactccatgtggacaaccattatctgcacggcgattctggtttcgctctactggggcattacctccaacatgatgtacaagccgactcaggaagtgacggacggctgcggtttctccatcggtcaccagcaacagtttgcatcatggattgcctataaagttgcgccgttcctcggcaaaaaagaggaaagcgttgaagacctcaaactgccaggctggctgaatattttccacgacaacatcgtctccacggcgattgtgatgaccatcttctttggtgccattctgctctccttcggtatcgacaccgtgcaggcgatggcaggcaaagtgaactggacggtgtacatcctgcaaactggtttctccttcgcggtggcgatcttcatcatcactcagggcgtgcgcatgtttgtggcggaactctctgaagcatttaacggtatctcccagcgcctgatccctggtgcggttctggcgattgactgtgcggctatctatagcttcgcgccgaacgccgtggtttggggctttatgtggggcaccatcggtcagctgattgcggttggcatcctgggtcgcctgcggttcctcgatcctgattattcccggctttatcccgatgttcttctccaacgccaccatcggcgtgttcgctaaccacttcggcggctggcgtgcggcgctgaagatatgtctggtgatggggatgattgaaatctttggctgcgtctgggcggtgaaactcaccggtatgagcgcctggatgggcatggcggactggtcgattctggcaccgccgatgatgcagggcttcttctccatcggtatcgcctttatggccgtcatcattgtaattgcactggcttatatgttcttcgctggccgcgcactgcgcgcagaagaagatgcagaaaaacaactggcagaacagtctgcttaatatggagttttgattatgaccgtacgtattctggctgtgtgtggtaacggacaaggcagttccatgatcatgaaaatgaaagtggaccagtttttaacccagtcgaacatcgaccacacggtaaacagctgcgcggttggtgaatacaaaagcgagttgagcggcgcggatatcatcatcgcttctacgcacatcgcgggcgaaatcaccgtgaccggcaacaaatatgtcgttggcgtgcgcaacatgctctctcctgctgactttggcccgaaactgctggaagtgatcaaagaacatttcccgcaggacgtgaagtaagggcgcgctatgaaattacgtgattcgctggcggagaataaatctatccgtctgcaggctgaagctgagacatggcaggacgcagtgaaaatcggcgttgacctgctggtggcggcagatgtggtagagccgcgttactaccaggcgattctggatgcggttgaacaacacggcccgtactttgtgctcgcacctggcctggcaatgccgcatggtcgcccggaagagggcgttaagaaaaccggttttgcactggtgacgctgaaaaagccgctggagttcaaccacgaagataacgacccggtggatatcctcatcacgatggcggcggtcgatgccaacacgcatcaggaagtgggcatcatgcagatcgtcaacctgtttgaagatgaggaaaatttcgaccgtttacgtgcctgccgtaccgagcaggaagtactggatctcattgaccgcaccaacgcggcagcttaagaaggaattgaagatgtcattaccgatgttgcaagtcgcgctggacaaccagactatggatagcgcctacgaaaccactcgcctgattgccgaagaagtcgacattatcgaagtgggtaccattctgtgcgtgggcgaaggcgtgcgtgcggttcgcgatctgaaagcgctctacccgcacaaaatcgtgctggcagacgccaaaattgccgatgcgggcaaaattctttctcgtatgtgcttcgaagccaacgctgactgggtgaccgtgatttgttgtgcggatatcaacaccgccaaaggtgcgctggacgtagcaaaagagtttaacggcgacgtgcagatcgaactgaccggttactggacctgggaacaggcgcaacagtggcgcgacgcaggtattcagcaggtggtttatcaccgcagccgtgacgcgcaggccgctggcgtggcgtggggtgaagccgatatcactgcgatcaaacgtctttccgatatgggcttcaaagtcaccgttaccggtggcctggcgctggaagatctgccgctgttcaaaggcattccaattcatgtgtttatcgccggtcgcagcatccgtgatgccgcttctccggttgaagccgcgcgtcagttcaaacgttccatcgccgaactgtggggctaaggagcggatatgttgtccaaacaaatcccgcttggcatctatgaaaaagcgctccccgccggggagtgctggctggaacgcctgcgactggcaaaaacgttgggcttcgattttgtcgagatgtcggtagatgaaactgacgagcgcctgtcgcgcctcgactggagccgcgagcagcgtctggcgctggtgaatgcgattgttgaaaccggcgtgcgtgtgccgtccatgtgcctttctgcccatcgtcgtttcccgttgggcagcgaagatgacgcggtgcgggcgcaggggctggagattatgcgtaaagccatccagttcgcccaggacgttggcattcgcgtgatccagctggcgggctatgacgtttactatcaggaagccaataacgaaacgcgtcgtcgtttccgtgacggcctgaaagagagcgttgagatggcgagccgcgcgcaggtgacgctggcgatggagatcatggattatccgttgatgaactccatcagcaaggcgctgggttacgcgcactatctcaacaacccgtggttccagctctacccggatatcggcaacctgtcggcgtgggacaacgatgtgcagatggagttgcaggccggaatcgggcatatcgtcgcggtgcatgtgaaagacaccaaaccgggcgtcttcaaaaacgtgccatttggcgaaggtgtggtggatttcgaacgttgcttcgaaacgctcaaacagagtggctattgcgggccgtacctgattgagatgtggagcgaaacggcggaagacccggcggcagaagtggcgaaagcgcgtgattgggtgaaagcgcgcatggcgaaagcgggcatggtggaggcggcataatgcaaaagctaaaacagcaggtatttgaagccaacatggatctgccgcgctatgggctggtgacctttacctggggcaacgtcagcgctatcgaccgcgaacgcgggctggtggtgatcaagcccagcggcgtcgcctacgaaaccatgaaagcagacgatatggtggtggtcgatatgagcggtaaggtggtggaaggggagtatcgcccatcttccgacaccgcgacgcatcttgaactctaccgtcgttatccgtcgcttggcggcattgtccatacccactccactcatgctaccgcatgggcgcaggcggggctggcgatcccggcgttaggcaccacgcacgctgactacttctttggtgacatcccgtgtacgcgtggattaagcgaagaagaggtgcagggtgagtatgaactgaacactggcaaagtgattatcgaaacgctgggcaacgccgagccgctgcatacgccgggaattgtggtgtatcagcacggaccgttcgcctgggggaaagatgcccacgacgcggtgcataacgcggtagtgatggaagaagtggcgaaaatggcgtggattgcgcgcagtattaatccacaactcaatcacatcgacagcttcctcatgaataaacacttcatgcgtaagcacggtcctaacgcctattacgggcagaagtaagcagtgcgccccggaattattacctcctgcgggatgtaattggtctgattccggggccgcttcagttaaaaaatcgtataaacaacaggtgtttttatggctatcaatggattgtttgtcagaacggatccgcaacgtcgccgctatggcgttgcgttacttgtgggtgtactttcaggaattatttcagcatttgttaaatggggagcggaagtccccttgccaccgcgcacattttccggtggtcgcgatgaatttaacccgccgtatatctttctacgagattatttaggtatcgacccaacccaaactgtgtacacattctcggaacatattatcaacccggtgatggtgacgcatatcatcttctcactggtttttgcgatagggtattgtgttgtcgcggaaatttttccgaaagtgaaattatggcaggggatattagcagggcttattgtgacagtggcagtccacggtatattttgcccggcgctgaatttaacgccgccgctcactcaattgccttttgacgaatatgcgtctgaaatcctggggcatattttctggttttggataatagagattatgcgccgcgacttacgtaatcgcattactcatgagccagatccggaagtcgcaattcggtgaataaccgtataaaaaagcccctgcgaagggggcaaagcaaactatggcaatgtttcgttggttatacctggtgctagcgataaatatccgcgctggcgtgcatattgccgttactccccggttcccgcatcagaattacgtggtagtacgttgcgccctgcgcatctgtctcttcatttaatgcctgacgtgcttcgctttcagtggcgaaattatgattgatataaatcacgcctaagctctgtacgtcgtccatatttctggcctggtggttattaatttcaatggctgcccatgtatttgcacttagcaaaagcacagccagaagggctaaaactcgactgaacatagatacctcctcgacggctgactttgtgtgctctcctctgtgatgatcttctgatttaattttaatcaatgataaagaagttgatggtgaccatttctgatgcagttgttcaaaaaaacaccatgatgaagtgtgatgaactccaaatcagcggtttagaggttaattgcgaaaggggagatttatttcggctctgcccttgagtttagcggggcatacaagtactataacgcgtcatttttcagccgacctttaacacgttccttgcctccccgggattcggctgacccagacaggaggctgaataatccgtaaggagcaattcgatgcgtcattacgaaatcgtttttatggtccatcctgaccagagcgaacaggttccgggcatgatcgagcgctacactgctgccatcactggtgcagaaggcaagatccaccgtctggaagactggggccgccgtcagctggcttacccgatcaacaaactgcacaaagcacactacgttctgatgaacgttgaagctccgcaggaagtgatcgatgagctggaaactaccttccgcttcaacgatgccgttatccgcagcatggttatgcgtaccaagcacgctgttaccgaagcatctccgatggttaaagcgaaagacgagcgccgtgagcgtcgcgatgatttcgcaaacgaaaccgctgatgatgctgaagctggggattctgaagagtaatttctgatgaccaaccgtctggtgttgtccggcaccgtgtgcaggactccccttcgaaaggtcagtccatcaggaattcctcactgccagttcgtgcttgagcatcgttctgtgcaggaggaagccggttttcaccggcaggcgtggtgccaaatgcccgttattgttagcggacacgaaaaccaggccattactcacagtataacggtcggcagtcgcataaccgttcaggggttcatttcatgccacaaggcaaagaacggactgagcaaaatggttttgcatgccgagcagattgaattgatagattctggagactagccatatggcacgttatttccgtcgtcgcaagttctgccgtttcaccgcggaaggcgttcaagagatcgactataaagatatcgctacgctgaaaaactacatcaccgaaagcggtaagattgtcccaagccgtatcaccggtacccgtgcaaaataccagcgtcagctggctcgcgctatcaaacgcgctcgctacctgtccctgctgccgtacactgatcgccatcagtaatcggtcacggtccattaatacgactttgagaggataaggtaatgcaagttattctgcttgataaagtagcaaacctgggtagcctgggtgatcaggtaaacgttaaagcgggctatgctcgtaacttcctggtaccgcagggtaaagctgttccagctaccaagaaaaacattgaattcttcgaagcacgtcgcgctgaactggaagctaaactggctgaagttctggcagctgctaatgctcgcgctgagaaaatcaatgcactggaaactgttaccatcgcgtctaaagctggcgacgaaggtaaactgttcggttccatcggtactcgcgacatcgctgacgctgtaactgcagctggcgttgaagtggctaagagcgaagttcgtctgccgaacggcgttctgcgtaccactggcgaacacgaagtgagcttccaggttcacagcgaagtattcgcgaaagtgatcgtaaacgtagtagctgaataattcgttattcaacgagacgtaaaaacgccgaccattggtcggcgttttgctttctatttttcgtcaggtattagtttcgcaagtagatccattcaccattctcttgtgtccataagtcaggatggtttgctggcgttagatgcatacgatcactccttatgtctcggtcctgcggcactcgctcgaaacctaaacccgagtagattgctgctgaatttgataaggaacgtagaccaattttcaaatcatggggtaaatcagaatacgcgtttagcaatgcagcaatgatgaatccgagggcattagaaacgcctgtaacagtgcgaagttggtcgatataaagatcgattgttggtagttcagatgaccagcaattaggcatttgggcaggaagggttacaacgtatcctatcgtttggccggtatagtctggagtactataaccaggtcccaaaacaacctcgtgtattgtgtatttactgttgggttcgaaggattcgacatcttgcaataaatatttcagttctgcggttaacctcgcacccgcgtaagctttattgtatttctgggcgtgaatattatctaatgtagcttcatggttccatccaaaagaattatcaccattcattgttactccatcgtaagcattacacttcgttgctaacttattgaatgcttgccagtcagagagatctagtttgtggatctcaacagtacgtctgccatcgcaattatgatctcttccacgatttggcagtaatgtagcacgtgcatattgatgaaattttaattttactggtttgtcggtggacgaaaaatggggtgaatatgcaggaaatgaataaatagtcgttggtaatgtcattgtaatgttacctgtttaatgtttttataaatatcgcagctgatgttcacagaaaaagaatcgatattaataaaaataagtttgttttctgaagtagtgaaaatagcggatggtgaaagatattaatatcaaaaatcgctcattatggatataacgatgcccccggggagaaaatgacttccacgccttccaccatacattcttgttgtgcggtatgtaattattctacgctgttggtatcggtgcgtttgttaatcatctggttaaccagccacaaaaagccattgagaaaattattgattttacatgggattattatattgctaacccttggtttttaaaaattgtgcatagtgaaaatcaaagtaaaggtgtgcattatgcaaaatcacagcgtctcttagaaattaaccatgcgcacttgcagttaatggaatccttattggatgaagggaagaaatacaatatttttaagccaggtatcgacccattgcaggtgaatattaatattgctgcgcttgggggatattatttgatcaaccagcatacgcttggcctggtttatctggtgcgccgtaaaaccccgtccttcagggcggggatatacggcgcggttttccacctaaccaggtgtttgctgttgttcaatgtattgacggatggcggatattggcgcacctccgcagctactggcaaaatagccaggactccacaaaacgcctttgtagtaatacctgactgcaatatctggtcgatctcgtcgcagtaacctacccgatacgcctttgaggctgtttaccagactggatatcgccagtttgggaggatagttaattaacaaatggacgtgatctggttcgccatccatttcaaccagttcagcttcaaaatcagcacatacctttgaaaagtaagtgcgtagtttttctgtcgcgtcatggtcaaaaatctggcgtcggtatttggtgacaaagaccaggtgaacatgcatcaggaaaacacaatgccttccacgccggatatcggtttcttttttcacagaccaaagtatcatttggcctgtgaaacgactacaggcatttaaattccagttaagaccaggtggtcaacaggagcgtgaaatgaggcgcttcgcaggcgcatgtcgtttcgttttcaatcgtgctctggcgcttcagaatgagaatcatgaggccggtaataaatacatcccttacgggaaaatggcttcctggctggttgagtggaaaaatgccactgaaacgcaatggcttaaagatgccccgtcacagccattgcaacagtcactgaaagaccttgagcgggcttacaaaaacttcttccagaagcgggctgcttttccccgattcaaaaagcggggacagaatgatgcattccgctacccgcagggcgttaagctcgatcaggaaaacagccgtatttttctgccgaaacttggctggatgcgctaccggaatagccgtcaggtcgcgggtgttgtgaaaaatgtcactgtcagccagtcctgcggtaagtggtacatcagtgttcagactgaaagtgaagtatccactccggttcacccttcagcatcaatggtcgggctggatgctggcgtggctaaactcgccacgctgtcagatggtacagtctttgagcctgtaaacagttttcagaaaaaccagaagaagctggcgagacttcagcgacagttaagccgcaaggtcaaattcagcaacaactggcagaagcagaaacgcaaaatacagcgactgcattcctgtatcgcaaaaatccgcagggactaccttcacaaagtcacaacgaccgtcagcaaaaaccacgcaatgatagtcattgaggatttgaaggtcagcaacatgtcaaagtcagcagcgggtacggtcagccagccggggcgtaatgtccgggcaaaatcaggtttaaaccgtacgatactggatcagggctggtatgaaatgcgccgccagcttgagtacaagcagctctggcgtggcggtcaggtgcttgctgttccgccagcgtacacaagccagcgttgcgcgtgctgtggtcatacagcgaaagaaaatcgcctgtcacaaagtaaattcagatgccaggtatgtggatatacagcgaacgccgatgtaaacggcgctcgtaacattttagcggcggggcacgccgttcttgcctgtggagagatggtgcagtcaggccgctcgttgaagcaggaacccaccgaaatgattcaggcgacagcctgaacgaagcagggatccacgtccttcagggcgtggaggatgtcaacatatcagtatggtttccccccaggcactggaagccagacgtaaggtcatcaaagagacaatccttagctggcttttggttgacccttcatctaccgcgcacgaataaaactgccatccggctggcgggtaaacaggacctgttgattattccccgtatcaatggttaagcccgtcaccacgccgctggcgttctggcggattttcaccatttgcccgttttgcaaattactcagcggcttacccgcgccttctacctgcgccattgcatagacatcggtagcgggcagtccgtggtcgcggaacagctgcgccatcgttttaccgggttcgacacggtaagagcgccattgattatcaattccgctatctggctggaatggttgcgtttgggtagtttgcggctgctcttctggctggccttcctgtataggttctggagcgaccggagccacctgatcaggatcattttgtggggtgactaattgcgcccgcagctgttcttctgtcggcggttgtgattgcgactgaatatctaactgcgcttcacgcgtcaccaccggcgcgttgggcgtatcatcagatggaagcagaaatccgaccaccaatacaatggcggcaataatgatcccccgacgatgcatcggcggcagcgggtccatgaagcgaaaattgtccggcgcgtgccagactttctccagggttggttttagttcaaagcgcccgggcatggtttcctcctgctccgcgtcttgttcctcaatcatagcctatgaataagctaacgctatgatgtccgtggtaaacccgcctttattatattcatacgggatattgctattgtttctttttccccgggatttgtcatcattcctgcgacaaagttttacccaaagaagtgtggctgatatgctgcccgctacttttataccctaagaaaggaaatacgatgaccaccccaacttttgacaccatcgaagcgcaagcaagctacggcattggtttgcaggtagggcaacaactgagtgaatctggcctggaagggctgctgccagaagcactggttgcaggtattgccgatgcgctggaaggcaaacatccggctgttccggttgatgtggtgcatcgcgcgctgcgtgaaatccacgagcgcgccgatgccgttcgtcgtcagcgtttccaggcgatggctgctgaaggtgtgaaatacctggaagaaaacgccaaaaaagaaggtgtgaatagcaccgaatctggcctgcaattccgcgtgatcaaccagggtgaaggcgcaattccggcacgtaccgaccgcgttcgtgttcattacaccggtaaactgatcgacggcaccgtgtttgacagctccgttgctcgtggtgaacccgctgaatttccggttaatggcgtgatccctggctggattgaagcactgactctgatgccggtaggttctaaatgggaactgactatcccgcaggaactggcatatggcgagcgcggcgcaggcgcatccatccctccgttcagcaccctggtgtttgaagtcgaactgctggaaatcctctaagcagcgcattctgttcccctcgaaccagaggggagcaggcattcagcaataaacccttcagtttgccaaacggcgctattttgtgttgcaaagaccccgtaagcgtgtatttttgtgagctgtttcgcgttatcaccgtgatatgacactcactttaaacataaaattaacattagatctaaatcttagtattcatcccgcgtattgttacctaatatcgatgagtcccgatacagattcgtcgtatcatagactgactaaaggccgtagagcctgaacaacacagacaggtacaggaagaaaaaaacatggtagatcaggtaaaagtcgttgccgatgatcaggctccggctgaacagtcgctacggcgtaatctcacaaaccgacatattcagcttattgccattggcggtgccattggtacggggttgtttatggggtctggcaaaacgattagccttgccgggccgtcgatcattttcgtttatatgatcatcggttttatgctctttttcgtgatgcgggcaatgggggaattgctgctttcgaatctggaatacaaatcttttagtgacttcgcttccgatttactcgggccgtgggcaggatatttcaccggctggacttactggttctgctgggttgtaaccggtatggcagacgtggtggcgatcactgcttatgctcagttctggttccccgatctctccgactgggtcgcctcgctggcggtgatagtgctgctgctgacgctcaatctcgccaccgtgaaaatgttcggtgagatggagttctggtttgcgatgatcaaaatcgtcgccattgtgtcgctgattgtcgtcggcctggttatggtggcgatgcactttcagtcaccgactggtgtggaagcgtcattcgcgcatttgtggaatgatggcggctggttcccgaaaggtttaagtggcttctttgccggattccagatagcggttttcgctttcgtagggattgagctggtaggtacaaccgctgcggaaaccaaagatccggagaaatcactgccgcgtgcaattaactctattccgatccgtatcattatgttctacgtcttcgcgctgattgtaattatgtccgtgacgccgtggagttcggtagtcccggagaaaagcccgtttgttgaactgttcgtgttggtagggctgcctgctgccgcaagcgtgatcaactttgtggtgctgacctctgcggcgtcttccgctaacagcggcgtcttctctaccagccgtatgctgtttggtctggcgcaggaaggtgtagcaccgaaagcgttcgctaaactttctaagcgcgcagtacccgcgaaagggttgaccttctcgtgtatctgtctgctcggcggcgtggtgatgttgtatgtgaatcctagcgtgattggcgcgttcacgatgattacaaccgtttccgcgattctgtttatgttcgtctggacaattatcctttgctcgtacctggtttaccgcaaacagcgtcctcatctgcatgagaagtcgatctacaagatgccgctcggcaagctgatgtgctgggtatgtatggcgttctttgtgttcgtggtcgtgttgctgacactggaagatgacactcgccaggcgctgttggtcaccccgctgtggtttatcgcactggggctgggctggttgtttattggtaagaagcgggctgctgaactgcggaaataaccgcattatcatgctggatggcgcaatgccatccagcttttagattactcacccgccagcgcgcgtgggaacagtacattgttttccaggctgatgtgatccatcaggtcatcaatcagttcattaataccgttatacatcgctttccaggtggtgcaggcttccggcggcggtgtgacgttattggtggtgtgtttaatcacttccagcagttcgcccgcttcatcgtgctcgctttccatcacgctgattggtcccattgcctggctgcccatgccttgtttgatcatcgggaagaggatctgctcttctttcatcatgtggctggaaagctcttcatgcagcatagtcaggtattttgtcagcccttttggcacgctcggtttgtcggcgtgaacgcgctcgactttagtcgcttgcaggatcagctccggcagctgctcgcggtgacgatcgtggtagcgcacgatgatatggtcaatgatttctgccagcggggcgctacgccagtctttctcaatcggttgttcagcaagctttgccagttcagcttcaatgacctcaacatccagttctttacgtgccgccgcgcgcgccagcgtctgcttaccgccacagcagtaatccatatcatatttacgaaacagagccgaagcgcgagggatagagagcgccagttcacctaaaggttggtcgcgataagccatagctgatacctcattcttaataatataagatgtattttaaatgcatctttaaggcaaaagctataacccttacgtagcagaggcttatttaactcactgccagcgtgtcaactttctgagacagattcagttaaaggtttttctggttttgctctgaccgcaatgaccacgccaatcactaacagcgcgataccgctcagcgtcattagcggcggcatttgctggcggagtaaaaaggtgtacagcaaacctgccagcgtttcgaaaacaatcagcggcccgagaatcactgtcggtaatcgctggctggcgacgttccagcagagtgcgccaacccatgagcaaagcacggctatcgcaaccatcagactaataaacaccagcggacgggggccaaaaggtaaggagaagtccggcgtttgtatattcagccagtaacaggcgacgagatagccgatgagagaaaccggcagcgtgaccagcgcctgcgccgtcgcccacatcatcggatgtttgtcgggattttcccgcagccagcgggcgttgcgcagggcataccatgcccagcagaccacggaaactaacgctagcacgatgccagaggtataacgtgcccagtcaaaatcggggagtccgtggtttaactcagcaatattcacactcgccaggccgatgccaatacaaatcagtgccggggcgagttttccccacgcgagtttgccgtcgcgctggctataaagcagattggcaaagacaggaatgaccaccggcagggtgccgataatcatcgtggaaacaggcgcgccagtacgttgaatggcactggcaaggcagaagtaataaatgaggttgcccatcatagtgagcatcaaggcggtaagccagtcccgacgcgccaactgacgcagacgcacgcgtcccagccaggcaatgggcagcgcaattaaccctaacgccagataacgccccatcgactgcaacatcgccgggtattccggtacgatcaacggcccgacaaaaataagcccccacatcaaccctgctaacagggcgtacagcacgccgctaatcattactggcatccattggtctgtcagaagaaagttcaggaagcagacatgattgctcccggcatcccgtcattattagagaggatgcgggaggatgccactttaattaactagttattaacattaaaaagatggcttacgctttcggctaacgttgtcgttgggcggccaatcaatttgctaagcgttttgctgttatcaaacagaccacctttcgatgcgccaacgtcagaatccgccagcatatccgccagtccgtcgggcagtccgacgcttttcagtgccgcggcgaaatcggcttcgctcagattttgataggtaacggattttccgctctgtttggtcagctctgccgctaactgtgtcaacgtccaggcactatcgcccgccagttcgtaaaccttgccttcgtgaccggcttcgctaatcacgcgtgccgcagctgccgcataatctgcccgcgttgctgaggcgattttgccatcgcccgccgcaccgataaatacgccgtgttccagtgctgccggggcgctggcgaggtagttttcggtgtaccagccgttgcgcagcagggtgtaaacgatgccagaatcagccagcattttctccgtctcgatgtgctcatcggcgaggccgagcggggaggtatctgcatgtagcaggctggtataagcgataaatttcacgccagccgcctttgcggcattaataacattacgatgctgcggggcacgttgacccacttcgctggaagagatcagcagtagtttttccactccctgaagtgcagatgtcagtgcggcttcatcgccgtagtcagcctgacgcacggtaatgccttgtgctgccagggcctgggcttttgccggattacgaacgatagccactatttggctggcaggaaccgttttcatcaaggattcaataacatagtgaccaagttggccagtggcaccagtaatagcgatcatgggaagtctccatcgttttgtcttgtgtttaaatacgctaacacctaaacttacttttagtaagtacgtacaaaaaggtaagtatgaaatgagtcaggttagcctgtcgcaacaactgaaagagggtaatctctttgcggaacagtgcccgtcgcgcgaggtgttgaaacacgtcaccagccgttggggggtattgattctggtggcgctacgcgaaggtactcatcgctttagcgacctgcggcgcaaaatcggtggggtgagtgaaaagatgcttgcgcagtcgttacaggcgttagaacaggatggttttcttaaccgtatcgcgtatccggtggtgccgccgcatgtggaatacagcctcacgccgctgggcgagcaggtgagcgaaaaggttgctgcactggcggactggattgagttgaatttgcccgaggtgttggcggtgcgggatgaacgtgcggcataactgccggatgcgctgagcttatctggtctacggtgcatggcttgtagggcggataagatgcgccagcatcgcatccgccaataaatgccggatgcggttgatgatttataggccgaaaaagaagtgttttacttactcaaatccacctgataaatcgcaaacccgatatcatcggtcgcgactttattcatcggatattgccctttctctttaataaacgctgcggctttatctgacggggaagtttcgaaacggatatccagtttcttatcgccagcaatcggtgctaaacgccagttgttatctgccgccgggtgaatttcccccgcacgtttcgactcatcagcaatccacgctgccagcaccgagcggttctcatccggtgaagcaaaagcgatatggctgtcgcccgtaccggcaaatttgccgccgtaagcgcgatagttattggtggcaacgaggaacatggcgttcggatcaatcggcttgccattaaaggtcaggttcttaatcctttccgcattggcattaatcatctggcactcgccgtcataacgggcaggctgggtaacatcaatctgataattcacaccatcaatcacatcaaagttataggtgcggaaaccatcccagttgatgagtgattgcggtttcgtgctgttaggatcaatctggttaaactgtccggcggagcactccagccactctttcacctctttaccgctggctttcactacaatcagcgtattggggtagagataaagatcggcggcattacggaaggtcaactggcctttttccacctccacatagcttgccgggtcatttttgcgaccaccaactttaaacggtgcggcagctgaaagcaccggcagttttgccagatccggatcgccctgaatgtaatgttcgacatacgctttttgcgcgttgttcactacttgcacggtcggatcgtcctgcaccagcgccagatagctatacatattgtcggcagatttaccgattggcttgctgacgaactggcgtgtggcatcgtgatcggctttgagtgtttctaccagcttgctgtcttccgccgcgagggattttttattggcgatgtcgtaaatcggccgagcttccgctttcgcctgcgtcacctgccatttaccgctgtcattactgagttgtaagtcgaccacaccaagatgatcgccccacatgcctggcattaccgccggaacaccattcagcgtgcctttcgcgatatcagctccttcgatatcagcaaaatctttacttgggaaaacggcgtgagcatggccaaacataatggcgtcaacacccggaatttcactgagataataaactgagttttccgccatcactttatacggatcggcagacagcccggaatgcgccagaacgacaacgagatcggcacctttctcgcgcatttcaggcacgtatttgcgcacggtttcggtaatatcattcaccgtcactttcccggataaattagctttatcccagcccatgatttgcggcggtacgacgccaatatagccaatcttcagcgtctgtttttttccgtctttatcgaccacttcggtgtctttaattaaatacggtgtaaacattggctgtttggttctggcgtcaatgacgttggcatttacataagggaatttcgctcccgccagcgcatttttcaggtaatccagaccgtagttaaactcatggttgccaagcgtgccgacggtatagtccagcgtatttaatgccttatacactgggtgaatatcacctgcttttaatcctttcgccgacatgtaatctgccagcggactcccctgaatcaaatcgccgttatcgaccagtacgctgtttttcacttcattgcgggcatcgttaatcaggcttgccgtacgtaccagtccgaatttttccgtggcggtgtctttgtaataatcgaaatccatcatgttgctatgcagatcagtggtttccatgatacgcagatcgaccgtcgctgcattcacactggcggcaatcagcgtggccaggagcgttgcgctaaacttaatcatcagggacatccttttatcatcgggaatacgaaagaaaagggagaataaacgtcttacttatagaacagtgaagaatgccacaattttacgctttgaaaatgatgacactatcacagttggcgcattcattaacgatagggtataagtaaaacaataagttaacaccgctcacagagacgaggtggagaaatgttagatcaagtatgccagcttgcacggaatgcaggcgatgccattatgcaggtctacgacgggacgaaaccgatggacgtcgtcagcaaagcggacaattctccggtaacggcagcggatattgccgcacacaccgttatcatggacggtttacgtacgctgacaccggatattccggtcctttctgaagaagatcctcccggttgggaagtccgtcagcactggcagcgttactggctggtagacccgctggatggtactaaagagtttattaaacgcaatggcgaattcaccgttaacattgcgctcattgaccatggcaaaccgattttaggtgtggtgtatgcgccggtaatgaacgtaatgtacagcgcggcagaaggcaaggcctggaaagaagagtgcggtgtgcgcaagcagattcaggtccgcgatgcgcgcccgccgctggtggttatcagccgttcccatgcagatgcggagctgaaagagtatctgcaacagcttggcgaacatcagaccacgtccatcggctcttcgctgaaattctgcctggtggcggaaggacaggcgcagctgtacccgcgcttcggaccaacgaatatttgggacaccgccgctggacatgctgtggccgcagctgccggagcgcacgttcacgactggcagggtaaaccgctggattacactccgcgcgagtcgttcctgaatcctgggttcagagtgtctatttattaattaatttatgcagcaggtccatcacttgctgcacctcttcctgagtaagcgccccgtctttggcccattgcacgcgaccgtctttatccagcaccactacagcggaacttttttcatccagctgccaggcaccgcgtgcgacgccattgctatcaacaataaactgcgaccagggataaagctttttattactctccagactgctgcgcacaaacatgccggaacccggaattgcgtcgtcggtgttaacaatggtggtggtctggtaacgatcgtgcggtaacttcgctgatttaatcgcttcaatcagcgtcgcgtttttctcttttgcagaggtgcgaccagcaatatgttgcagtactcgcacttttcccactaactgcgcgctgttccaggttttgtagctaaactgatctttatcaagcaccaactcgccacgatcggtgatgccaatcggcggcactcgctgaccggtttcgaactgatgtgcggaagccatcatcggcaacagcaggcaggtgagtgccagaatcttgcgtagggtcatggtgtttccttcttatgatatgcaggtgatccgaccacttgggtctgagttttaatcatatgtgctatttatcgaatttcccgcaagtgtgatgccagtttgcggtcaagcgcacaaatcatatgaaaaatgaatgcttatactgaagaccgcgcttcggtaaaaagataattctgaataattgtaacctttaggtaaaaaaagttatacgcggtggaaacattgcccggatagtctatagtcactaggcattaaaatttgcgcctcataatagttgggccgattgtggcaccgcacaggcgtaatactcagcaggagataacaatgaaaattttccaacggtacaacccacttcaggtggcgaagtacgtaaagatcctgttccgtggacggttatacatcaaggacgttggcgcttttgaatttgataagggtaagattcttatcccaaaagtgaaggataagctgcatttgtcagtgatgtccgaagttaaccgtcaggttatgcgtctgcaaacagagatggcttaaccaaagtgctatgcagtaataagacggctcctgattcaggagccgttgatgtttctgggggttacgcgacgctttcttctttatctttagcgtcaggcagttttggcgaaagggcggtggccttgctgtcgatccgggtcaccagcagctggtcgatgcggtagttatcgatatccaccacttcaaatttgtagccggcgaatttcaccgaatcggtgcgtttcgggatcttacgcagcataaacatcataaagcctccgatggtttcgtagttgcccgactgcgggaactcgtcaatatccagcacgcgcatgacgtcgtcaattggggtgccgccgtcaatcagccatgagttctcatcacgggcgacaatctgctcttccagcccctgaccgaccagatcgcccatcagcgtggtcatcacgtcgttgagggtgatgatccccaccaccagcgcgtactcgttcatgatcaccgcgaagtcttcacctgcggttttaaaactttccaacgcctctgaaagggttaacgtatccggcacaatcagcgtgttgcgaatttgtacgccgctgttcagtgccaggctttggttagccagcacgcggttcagcaggtctttagaatcgacataaccgatgatgtggtcaatatcttcattacagacgaggaacttagagtgcggatgttccgccaccttattcttcaggctttgctcatcttcgtggagatcaaaccaaatcacgttttcacgcggtgtcattgaagacggaacggtacgggattccagctcaaagacgttttcaatcagctcgtgttcctgtttacgtaacacgcccgccagcgcaccggcttccactaccgcgtagatgtcatcagaagtgatgtcatctttacgtaccattggcagtttgaaaatacggaagatcatgttcgccaggccgttgaagaaccacaccagcggggtgcaaacgtacaggcagaagcgcatcgggttgatgatacgcaaagccaccgcttctggcgcaatcataccgatgcgtttcggggttaaatccgcaaacaggataaacatgccagtcactaacgagaaagagagaataaagctcagttgctcagagagttctgccgacatatagcgggagaacaggctgtgaaaagctggagaaaatgccgcatcaccgacgataccgccgagaatcgcaactgcgttcagaccgatttggaccaccgtaaagaacatgccgggattttcctgcatattcagaacgcgttgggcatttatattgccttcatcagccagcagtttaagtttgattttgcgtgaggcggcaagtgagatctcagacatcgagaagaacgcacttacagcgatcaagcagagtatgactaaaatactgtttaacatatcttatccgacctttcaggccagatcctcggaaggggaagttgattaatttgtgtgaaatacacattgaaagccgattcgaagaaagtgaaccggcattttcagtggctagtatagcgtaaggtactgtaaagtcgccagagggttaaaattcagactgctgataaatgcaatactgcctgatgcgctatgccgatcaggcctacgcagtccctgcaatatattgaatttggacgattttgtaggcctggtaaggcattcacgccgcatctggcataaataaagcgcactttatcaacaatctacatttgtacccgtaacgctatgcttccggtggcagacagacgccaattccgccaattccacagtaaccatacgggtttttatgcagatattgctggtggtcatcttcggcataataaaacggtgtggcgttagcgatttccgtggtgatgtgacgatcgtcatcggcggcaagcatcgccgcctgaaaacgttccagactggcgcgagctgcggcatcctgttctggggtcagcggataaatcgctgaacgatactgcgtgccgtggtcattgccctgacgcattccctgggcgggatcgtgattctcccaaaatacctgtagcaactgctcatagctgatgacggaaggatcgtaaacaatgcgtaccgcttcggcatgacccgtatcaccggagcacacttcccgataagtcggatttggcgtatagcctccggtatagcctgcggcggtgctgtaaacgccgggtaactgccagaacagacgctccactccccagaaacaacccatcgcaaaatggcaatctccattccgtcaggtacattggtcattgagtgaccgttgaccgcatgcagcgtggctacgggcatcggggtgttacgtccaggcagggcatcggcgggggaaaccagatgctttttatcaaataaactcatggtgtcgctctcccgaaaatcggtcattggggttaaggttgtaacaagaggcgtatttgcacacaataaccaccgtgaataggtctaaagtaaaacataagaaatatttggggtttagtctgctttttaatccatattactggatttttgttaagccgtttaacggcgttccaggggcaggaaaaaaggatattcaggagaaaatgtgcgctatatccgacagttatgctgtgtaagcttactctgcttaagcggatctgccgtcgccgcgaacgtccgtctacaggtcgaggggttatcgggacagctggaaaagaacgttcgtgcgcagctttctacgattgaaagtgatgaagtgacgccagaccgtcgctttcgcgcacgcgtcgatgatgccatccgcgaaggtctgaaagcgctgggttattaccagccgaccattgaatttgatctccgtccaccgccaaagaaagggcggcaggtattgatcgccaaagtcacgccaggtgtgccggtgttaattggcggcaccgatgtggtattgcgcggcggcgcgcggaccgataaagactatttgaaattgctcgatactcgcccggctattggcacggtgctgaaccagggcgattatgaaaatttcaaaaagtccttaaccagcattgcgttgcgtaaaggttatttcgatagcgaatttaccaaagcgcagctgggcattgcgctcggcctgcataaagccttctgggatattgattataacagtggcgaacgttaccgctttgggcatgtgacctttgaaggatcacaaatccgcgatgaatacctgcaaaatctggtgccgtttaaagagggcgatgagtacgaatcgaaagatctggcggaactgaaccgccgactttctgctaccggctggtttaactcggtggtggtggctccacaatttgataaagcgcgcgaaacgaaagtattacccttgacgggcgtggtttcgccgcgaactgaaaacaccatcgaaaccggggtcggttactctacggacgtgggaccgcgcgtgaaagcgacgtggaaaaagccgtggatgaactcttatggtcacagtctgaccaccagtaccagtatttccgcgccggaacagaccctcgacttcagctataaaatgccgctgctgaagaatccactggaacaatattatttggtgcagggcggttttaagcgcactgacctgaacgataccgaatctgactccactacgctggtggcttctcgctactgggatctctccagcggctggcagcgtgccattaacctgcgctggagcctcgaccactttacccagggtgaaattaccaacaccacgatgctgttttatcctggggtgatgattagccgcacgcgttctcgtggtggcctgatgccaacctggggcgactcgcaacgctactctatcgactactccaacacggcctggggttcagatgtcgatttctccgttttccaggcgcagaacgtctggatccgcacactgtacgatcgccatcgtttcgttacacgcggcacgctgggctggattgaaaccggtgatttcgacaaagtaccgccggatctgcgtttcttcgccgggggcgatcgcagtattcgcggctacaaatacaaatctatcgccccgaaatacgccaacggtgacctgaaaggggcctcgaagttgataaccggatcgctggaataccagtacaacgtgaccggaaaatggtggggcgcggtgtttgtcgatagtggcgaagcggtaagcgatattcgccgcagcgactttaaaaccggtaccggggtcggcgtgcgctgggaatcgccggtcgggccaatcaaactcgattttgccgtaccggtcgcggataaagacgaacacgggttacagttttacatcggtctggggccagaattatgagtttatggaaaaaatcagcctcggcgtggttatcgttatcttactgttgctgggatcggtggcgtttctggtgggcaccaccagcggcctgcatcttgtatttaaagcggcggatcgctgggtgccaggactggatattggcaaggtcaccggcggctggcgcgatctcaccttgtctgacgttcgttatgagcagccaggcgtggcggtaaaagcgggtaatctgcatctggcggtcggtcttgagtgcctgtggaacagtagcgtttgtattaatgacctggcgctgaaagacattcaggtcaacatcgacagtaaaaaaatgcctccttctgaacaggttgaagaagaggaagatagcggtccgctggatctctccacgccgtatcccatcaccctgacacgggtggcgctggacaacgtcaacatcaagattgatgacaccacggtgtcggtgatggacttcacctccggcctgaactggcaggagaaaaccctgaccctgaaaccgacgtcgctgaaaggcctgctgattgctctgccgaaagtggcggaagtggcgcaggaagaagtggtcgaaccgaaaattgaaaatccgcagccggaggaaaagccgctcggcgaaacgctgaaagatctcttttctcgcccggtattgccggaaatgaccgacgtgcatttgccgcttaacctgaacattgaagagtttaaaggcgagcagttacgcgtgacgggcgacacggacatcaccgtgcgcaccatgctgctgaaagtgagcagcattgacggcaatactaaactggacgccctggatatcgattccagtcaagggatcgtcaacgccagcggcacggcgcagctgtcagacaactggccggtggatatcaccctcaacagcacactaaacgtggagccgttgaaaggagaaaaactgaagctgaaagtgggcggtgcgctgcgcgaacagctggagattggcgttaacctttccggtccggtggatatggatttacgcgcccagacgcgactggcggaagccggattgccgctcaacgtggaagtgaacagcaaacagctttactggccgttcactggtgagaagcagtatcaggcggatgatctgaaactgaaacttaccggcaaaatgaccgattacacgctctctatgcgtacggcagtgaagggacaggagatcccgccagccaccattacccttgatgccaaaggtaatgaacagcaggtcaatctcgacaaactcaccgtcgcggcgctggaagggaaaactgaactcaaggcgttgctcgactggcagcaggccattagttggcgcggtgagctaacgcttaatggcattaacaccgccaaagagttcccggagtggccgtcgaaactcaatggcttgattaaaacccgcggtagcctgtacggcggcacctggcagatggaggtgccagaactgaagctgaccggtaacgtcaaacagaacaaagtgaacgttgacggcacgctgaaaggcaacagttatatgcagtggatgatccctgggcttcatctggaactcgggccaaacagtgccgaagtgaaaggcgagctgggggtaaaagatctcaatcttgatgccaccatcaacgcgccggggctggataacgcgctgccggggcttggcggtacagcgaaagggctggtgaaagtacgcggcacggtggaagcgccacaactactggcagatatcaccgcgcgcggcctgcgctggcaggaactttccgtggcgcaggttcgcgtggaaggcgacattaaatccaccgatcagatcgccgggaaactcgacgtacgcgttgagcaaatttcgcagccggatgtaaatatcaacctcgtcaccctaaatgccaaaggcagcgaaaagcagcacgagctacagttgcggattcagggagagcctgtctccgggcagcttaatctggcaggaagttttgatcgcaaagaagaacgctggaagggaactcttagcaatacccgcttccagacgccggtcggcccgtggtcgctgacccgcgatattgcgctggattaccgcaataaggagcaaaaaatcagcatcgggccacactgctggcttaacccgaatgcggaactgtgcgtgccgcaaactatcgatgcgggtgccgaagggcgtgcggtggtgaatctcaaccgcttcgacctcgccatgctgaaaccgtttatgccagaaaccactcaggccagcggtatcttcacgggtaaagcggatgttgcctgggacaccacgaaagaggggctgccgcagggcagtatcaccctttcggggcgtaacgtgcaggtaacgcaaaccgtcaacgatgcggcgctgccggtggcgtttcagacactgaatctgacggcggaattgcgtaacaaccgtgccgaattgggctggaccatccgcctgaccaataacggccagtttgatggacaggtgcaggtgaccgatccgcaaggccgccgtaatcttggtggcaacgtcaatatccgtaacttcaaccttgcgatgataaaccccatctttacccgtggggaaaaagcagcggggatggtgagtgccaacttgcgtctgggtggtgatgtgcaaagcccgcagttgtttggtcagcttcaggttacgggtgtggatatcgacggcaactttatgccgtttgatatgcagccgagccagcttgcggtcaactttaacggtatgcgctcgacgcttgccggtacagtacggacccagcagggtgaaatctacctgaacggtgatgccgactggagccaaattgaaaactggcgggcacgagtaacggcgaaaggcagtaaagtgcggatcaccgtgccgccgatggtacgaatggatgtatcgccagatgttgtattcgaggctacaccaaacctgtttaccctcgatggtcgcgtggatgtcccgtgggcgcgcatcgtggtgcacgatctgccggaaagcgcagtaggcgtctccagcgatgtggtgatgcttaacgataacctgcaaccggaagagccgaaaacggcgtcgattccgattaacagtaacctgattgtccacgttggcaacaatgtgcgcattgacgcctttggcctgaaagcgcggctgacgggcgatcttaacgtcgtacaggacaaacaagggctgggcctgaacgggcagatcaacatccctgaagggcgcttccatgcctatggtcaggatctgattgtgcgtaagggtgagttactgttctctggtccgccggatcaaccgtatcttaatattgaagctattcgtaacccggatgctacagaagacgacgtaatcgccggagttcgcgtcactggtctggcggacgaaccgaaagcggagatcttctctgacccggcgatgtcgcaacaagctgcattgtcttatttgctacgtggacaagggctggagagcgatcagagcgacagtgcggcaatgacctcgatgctgattggtctgggggttgcgcaaagtggccagattgtgggtaaaatcggcgagacgtttggcgtaagcaatttagcgctcgacacccagggagtaggcgactcctcccaggtagtggtcagcggctatgtattgccaggtctgcaagtgaaatatggcgtgggtatatttgactctatagcaacactcacgttacgttatcgcctgatgcctaagctatatctggaagccgtgtctggtgtagaccaggcactggatttgctctatcagttcgagttttagcaatgcgaatatttgtctacggcagtttacgccacaaacaaggcaacagtcactggatgaccaatgcccagttactgggcgatttcagtatcgataactaccagttgtatagcctgggccactatccaggcgcagttccggggaacggaacggtacacggtgaagtttatcgtattgacaacgccacgctggccgaacttgatgccttgcgcaccaggggcggtgaatacgcgcgccagttgattcagacgccgtacgggagtgcatggatgtacgtttatcaacgacccgtcgatggattaaagctaattgaaagcggcgactggttagacagggataagtaataataaaagcacgccaccttcgggtggcgttgttttttgcgagacgactcgcattctgttttgtaattccctcaccttttgcttttctctccgagccgctttccatatctgttaacgcataaaaaactctgctggcgttcacaaatgtgcaggggtaaaacgtttcctgtagcaccgtgagttatactttgtataacttaaggaggtgcagatgcgtattaccataaaaagatgggggaacagtgcaggtatggtcattcccaatatcgtaatgaaagaacttaacttacagccggggcagagcgtggaagcgcaggtgagcaacaaccaactgattctgacacccatctccaggcgctactcgcttgatgaactgctggcacagtgtgacatgaacgccgcggaacttagcgagcaggatgtctggggtaaatccacccctgcgggtgacgaaatatggtaaagaaaagtgaatttgaacggggagacattgtgctggttggctttgatccagcaagcggccatgaacagcaaggtgctggtcgacctgcgcttgtgctctccgttcaagcctttaatcaactgggaatgacgctggtggcccccattacgcagggcggaaattttgcccgttatgccggatttagcgttcctttacattgcgaagaaggcgatgtgcacggcgtggtgctggtgaatcaggtgcggatgatggatctacgcgcccggctggcaaagcgtattggtctggctgcggatgaggtggtggaagaggcgttattacgcttgcaggcggtggtggaataaggtgtgtttatttatcgcgggcataaaaaaacccttactaaccgaagcccggtgttcagggttattgcgccagaagaacttatttattctttgcgcgctcgaaggaggcaacgatttcagctttagcggcttctgcgttttcccaaccttcaactttcacccacttgcctttttcgaggtctttgtagtgctcgaagaagtgagcgatctgcgctttcagcagctctggcagatcgttaacgtctttaatgtgatcgtattctttgctcagcttggtgtgcggaacagcaatcagtttcgcatcttcaccggcttcgtcggtcattttcagaacgccaaccggacggcaacggatcacagaacccggctgcagcgggtacggagtcgggaccagtacgtcaaccgggtcaccgtccagagacagggtgtggttgatgtaaccgtagttgcacggatagaacatcgcggtggacatgaagcggtcaacgaacagtgcgccgctctctttgtcgatttcgtatttgatcggatctgcgttagccgggatctcaataaccacgtagatgtcttccggcagatctttacccgcagggacgttgagtaagctcatgtctgtttcctttaaaaatatgtggcaaacaagtgccgagtattatagccaactcgcgccgaatgtcttcgcttgttttcgtcttcattttcctttttcgccagttttaagacggtatgcagagcaggaaaatccataaccgtagccgcatttttcatagtgagatgaaagcgattacaaacttgtgattaacgttttatttacttttttgaagtgtgatgtaacgcaatccgttacataacgaattgtctatagttttttcgcgaacatcttttcaccaataataattaccccgacgaggacaaccctatgtggaaacgcttacttgtagtctctgcagtctcggcagccatgtcgtctatggcgttggccgctccattaaccgtaggattttcgcaggtcggatcggaatccggctggcgtgccgcagaaaccaatgtggcgaaaagtgaggccgaaaaacgcggaattacgttgaaaattgccgatggtcaacaaaagcaggaaaaccagattaaagcggtacgttccttcgttgcacaaggggtggatgcgatctttatcgctccagtggtagcgacgggttgggagccggtattaaaagaggcgaaagatgccgaaatcccggtcttcttgcttgaccgttccatcgatgtgaaagacaaatctctctatatgaccactgtcaccgccgacaacatcctcgaaggcaagttgattggtgactggctggtaaaagaagtgaatggcaaaccatgcaacgtggtggagctgcagggcaccgttggggccagcgtcgccattgaccgtaagaaaggctttgccgaagccattaagaatgcgccaaatatcaaaattatccgctcgcagtcaggtgacttcacccgcagtaaaggcaaagaagtcatggagagctttatcaaagcggaaaacaacggcaaaaacatctgcatggtttacgcccataacgatgacatggtgattggtgcaattcaggcaattaaagaagcgggcctgaagccgggtaaagatatcctcacgggttccattgatggcgtaccggatatctacaaagcgatgattgatggcgaagcgaacgccagtgttgaactgacgccgaatatggcaggtcccgccttcgacgcgctggagaaatacaaaaaagacggcaccatgcctgaaaagctaacgctgaccaaatccaccctttatctgcctgataccgcaaaagaagagttagagaagaagaaaaatatggggtattgagggtatcaatgcctgatgccgattcgtaggccggataaggcgctcgcgccgcatccggcggtggtgcgctgaagcctgatgcgacgcttaccgcgtcttatcatgcctacgagttcggtgctctgtgtaggccggataaggcgttcacgccgcatccggcagtggtgcaacaccggacttaacaccgtgcacaatctgtcccctcgccccttcggggagagggttagggtgagggggacaaacggcgcagctcttaacatcaggcacgatctattcccagacttttagagcgtggctaagggggaaaccatgacgaccgaccaacaccaggaaatcctccgcaccgaaggattaagtaaatttttccccggcgtcaaagcgttagacaacgttgatttcagcctgcgccgtggcgaaatcatggcgctgctcggtgaaaacggggcgggaaaatcgacgctaatcaaagcattaaccggtgtataccacgccgatcgcggcaccatctggctggaaggccaggctatctcaccgaaaaataccgcccatgcacaacaactcggcatcggaaccgtttatcaggaagtcaacctgctacccaatatgtcggtcgctgataatctattcataggtcgcgaacccaaacgtttcggctttctacgccgcaaagagatggaaaagcgtgccaccgaactgatgacatcttacggtttctccctcgacgtgcgtgaaccgcttaaccgtttttcggtggcgatgcagcaaatcgtcgccatttgccgggctatcgatctctccgccaaagtgctgatcctcgatgaacccaccgccagcctcgacacccaggaagtagagttactgtttggcctgatgcgtcagttgcgcgatcgcggcgtcagcctgatctttgtcactcactttctcgatcaggtctatcaggtcagcgatcggatcaccgtcttacgcaacggcagtttcgtaggctgtcgggaaacgcgcgagctaccgcagatcgaactggtaaaaatgatgctggggcgcgagctggatacccacgcgctacagcgtgccgggcgaacattgttgagcgacaaacccgttgccgcgttcaaaaattacggcaaaaaaggaacgatcgcaccgtttgatctcgaagtacgccccggcgagatcgtcggcctggcaggcttgctgggatccggacgtaccgaaaccgccgaagtgatcttcggtatcaaacctgctgacagcggcacggcgttgatcaaaggcaaacagcaaaacctgcgatcgccacatcaggcttcggtactgggcatcggcttctgcccggaagacaggaaaaccgatggcatcatcgccgccgcctcggtacgggaaaatatcatcctcgctctccaggcccagcgcggctggctacgacccatttcccgcaaagagcagcaagagattgccgaacgctttatccgccagcttggcattcgcacaccttcaactgaacaaccgattgaatttctctctggcggcaatcagcaaaaagtgttgctttcacgttggctactgacccgaccgcaatttctgatcctcgacgagccaacccgcggcattgatgttggtgcccacgccgagatcatccgcctgattgaaacgctgtgtgctgacggtctggcgctgttggtgatctcctccgaactggaagagctggtgggctatgccgatcgggtgattatcatgcgcgatcgcaaacaggtggcggagatcccgctggcagagctttccgttccggcgatcatgaacgccattgcggcgtaaggagaacagtgtgatgcctcaatctctcccggacactacgccgccgaaaaggcgctttcgctggccaacgggaatgccgcagctggcggcgctattgctggtgctgctggtcgatagcctggtagccccgcatttctggcaggtggtgcttcaggatgggcgtttgttcggtagccctatcgacattcttaaccgtgcagctcccgttgcgttactggcgattggtatgacgctggtgatcgccaccggtgggattgatctctccgtaggggcggtgatggctatcgccggagccacaacggctgcgatgacggtcgcgggattcagcctgccgattgttttgttaagcgccctgggcaccggcatcctggcgggattgtggaacggcatactggtagcgatcctcaaaattcagccgtttgtcgccaccctgatcctgatggtcgccgggcgcggcgtggcgcaactgatcaccgccgggcagatcgtcacgtttaactcgccggatctctcatggtttggcagcggatcgctgttgttcctgccaacgccggtcattatcgcggtgctgacgcttctcctgttctggctgttgacccgcaaaacggcgctggggatgtttatcgaagccgttggtatcaacattcgggcggcaaaaaatgccggggtaaacacgcgaatcatcgtcatgctcacctacgtgttgagcgggctatgtgcggcgattgcgggcattatcgtggcggcggatattcgcggtgccgatgccaacaacgccggattatggctggagctggacgccattctcgcggtggtgattggcggcggatcgctgatgggcgggcgctttaacctgctgctctcggtagtgggggcgctgattattcaggggatgaacaccggaattttgctttcgggctttccaccggagatgaaccaggtggtgaaagcggtggtggtgctttgcgtgctgattgtccagtcgcaacgctttatcagtctgattaaaggagtacgtagccgtgataaaacgtaatttgccactgatgatcaccatcggcgtctttgtgctgggctatttctactgcctgacgcagtttcccggttttgcttccacaagagtgatctgcaatatcctgaccgataacgcttttctggggattattgccgttggtatgacctttgtgatcctctctggcggtatcgatctctccgtcggttcggtgatcgctttttaccggcgtgtttctggcaaaagtgattggcgacttcggcctctcgccgttgctggcatttccgctggtgctggtaatgggctgtgcctttggcgcatttatggggcttctgatcgacgccctgaagatcccggcatttatcattacgcttgcggggatgttctttttgcgcggcgtcagctatctcgtttcggaagagtcgattccgataaaccatcccatttatgacacgctctcaagccttgcgtggaaaatccctggcggcggtcgcttaagtgcgatggggctgctgatgctggcggtggtggttatcggcatattcctcgcgcatcgtacccgttttggtaatcaggtatacgccattggcggcaacgcaacgtcggcaaacctgatggggatttctacccgcagcaccactattcgcatttatatgctctccaccggactggcaacgctggcggggattgtcttctcgatttatacccaggccggatatgcgctggcgggcgtaggtgtggaactggatgctatcgcctcagtggtaattggcggtacgcttttgagcggtggcgttggaacggtattagggacgctttttggcgtggcgattcagggactgattcagacttacataaactttgatggcacgctgagttcctggtggacgaaaatcgccatcggtattttgttgtttatttttatagcattacagcgtggattaacggtgctgtgggagaatcgtcagagttcgccagtgacaagagtcaacattgcgcagcaataaaaacgcctctccgtgtggagaggcgcaggagattacgcgtccgggaactcacggataaagcgttcgacatcttcaaccatatggtcgttgccgacaaagaacgaacggcgctggtgcagagtttccgggatgatatccagaatacgctctttgccatcgctcgctttaccgcccgcttgttccgccaggaatgccatcgggttgcactcataaagcaaacgcagtttgccgtccgggtggctggcggtgcttgggtagagataaataccgcctttcagcaggttacggtggaaatccgcaaccagtgaaccgatataacgtgaggtatacgggcggttggtggatttatcttcttcctggcagaatttaatgtacttcttcaccccgttcggaaacttaatgtagtttccttcgttgatggagtaggttttgcctttctccgggaagcgcatccgttcctggcacaggcagaaaacgcccagcgaaggatcgtaagtaaaggcgtgaacaccgcatccggtggtgtaaaccagcatggtagaggagccgtataccacgtaacctgccgcaacctgtttgttaccaggctggaggaaatcttcttccgttaccggcgtgccgacgggcgtaactcggcggtagatggagaaaatggtaccgacagagacgttaacatcgatgttggacgagccatccagtgggtccatcagcaccacgtattttgcatgttcacagccttcaaagacaacaatctcatcttcttcttcagaggcaatgcctgcaacgatatcgcgtgctttcagtgcggctttcagtttttcattagcgaacaagtcgagtttttgctgaacctcgccctgcacgttctcagcaccgctggcacccaggatatcaaccagtcctgctttgttgatatcgcgatggataatcttggcgcccagttttattgccgacagcaaagcagtgagctcaccggtagcatgagaaaactcgtgctgcttttcgacaataaattcacctaacgttttcataaaactttccctgcaatgtttatggagtaaagcgaccgcaacaatcttaacaaataatctcaatgttgcgctcaggtgaatcgcgccagcaaattacggattatcctgaaatgcgtttctcacttgcccgacatatgcgtaaaatgagcggcagattaaaaaaggatagtgacgtatgcgcattcatattttaggaatttgtggcacgtttatgggcggtctggcgatgctggcgcgccagttaggccatgaagtaacgggttcggacgccaatgtgtatccgccgatgagcaccttacttgagaagcaaggcattgagctgattcagggttacgatgccagccagctcgagccgcagccggatctggtgattattggcaacgccatgacccgtggaaatccgtgtgtggaagcggtactggaaaaaaacatcccttatatgtcaggtccacagtggctgcacgattttgtgctgcgtgaccgctgggtgctggccgttgccggtacacatggcaaaaccaccaccgcgggaatggcgacctggattctggaacagtgcggttacaaaccgggatttgtgatcggcggtgtgccggggaactttgaggtttcggcgcgtctgggcgaaagcgacttctttgttatcgaagcggatgagtatgactgcgccttcttcgacaaacgctctaaatttgtccattactgcccgcgtacgctgatcctcaacaaccttgagttcgatcacgccgatatctttgacgacctgaaagcgatccagaaacagttccaccatctggtgcgtatcgttccggggcagggccgtattatctggccggaaaatgacatcaacctgaaacagaccatggcgatgggctgctggagcgagcaggagctggtgggtgagcaggggcactggcaggcgaaaaagctgaccaccgatgcttccgaatgggaagtcttgctggatggcgaaaaagtgggcgaagtgaaatggtcgctggtaggcgaacataatatgcacaatggcctgatggcgattgcagcggctcgccatgttggtgtagcgccggcagatgccgctaatgcgctgggttcgtttattaacgctcgtcgccgtctggaactgcgtggtgaagcgaatggcgtcacggtatatgatgatttcgcccatcacccaacggcgattctggcaacgctggcggcgctgcgtggcaaagttggcggtacggcgcgcattattgctgtgctggaaccgcgctcgaataccatgaaaatggggatctgcaaagacgatctggcaccttcattaggccgtgccgatgaagtcttcctgctgcaaccgacgcatattccgtggcaggtggcagaagtggcagaagcctgcgttcagcctgcacactggagtggcgatgtggatacgctggcagatatggtggtgaaaaccgctcagcctggcgaccatattctggtcatgagcaacggcggttttggtgggatccatcagaaactgctggatggtctggcgaagaaggcggaagctgcgcagtaattcggcctcagcctgagatagcattgccggataaggcgtttacgccgcatccggcatttgagcatagtgcctgatgcgacgcttgatgcgtcttatccggcctacaggtgcaccgcatccggcaaaccatactcacatcaacaacgaaaattacccttcattctccgccagttcgcgcagatactggaaaatctggcgtgcggatttcggcggcttattcccttctttctctttcttcgcgttacggatcagagtacgcagctgctgacgatcggcatcgggccacagattcaatacttcagcgatggcgtcatcaccttgatcgatcagacgatcgcgcaggttttccagtttatggaacagcaccacctgctggttgtgacggtttttcagcttatccagcgcctgacgaataggctctacgtcgcgctggcgcagcatcttaccgatgagctgcaactggcggcggcgaccttccatcttaatacgctgggcgagctcaatagccgcgcgcagatccgcatctaacgggatcttatccagcgcgtttttccccagatcaacaatttccgcgccaaggcgttttagctcctcggcatcacgtttaatttcacttttactgacccagataatttcatcgtcttcgtcttcgatgtcatcaccgggaacgtcgtcgagccagtcttcgggctgcttagtcatctcaggctccttaaaaaaagaggctaatgttaccagttaagatgcgcactgaaaaacggttctctgttagacttcagagaaactctctacattatggcacttgcaatgaaagtaatctctcaagttgaagcgcagcgcaagattctggaagaagcagtttccactgcgctggagttggcctcaggcaaatcggacggtgcggaagttgccgtcagcaagaccaccggcattagcgtaagcacgcgttatggtgaagtggagaatgttgaattcaatagcgatggcgcgctggggatcactgtttatcaccagaaccgcaaaggtagcgcatcatccaccgatttaagcccgcaggccattgcccgcaccgtacaggcggcgctggatattgcccgttatacctcgccagatccctgtgccggcgtggcagacaaagagctgctggcctttgacgcaccagatctcgacttgttccaccctgcggaagtttccccggatgaagccattgaactggcggcccgcgcagaacaggcggcattgcaggcggacaaacgcattaccaataccgaaggcggcagttttaacagccactacggtgtcaaagtttttggcaacagccacggcatgttgcagggttactgctctacgcgtcattcactctccagctgtgtaattgccgaagaaaatggcgatatggagcgtgattacgcctacaccattggtcgtgcgatgagcgatctgcaaacgccagagtgggttggggccgactgtgctcgccgtactttatcgcgcctgtcaccgcgtaaactctccaccatgaaagcgccagtcatttttgccaatgaagtggcaaccgggctttttggccatctggtgggggcgatagcgggtggctcggtttaccgtaaatctacctttctgctggattcgctgggtaaacaaattctgccggactggctgaccattgaagagcatccgcatctgctgaaagggctggcgtcgacgccattcgacagcgaaggtgtgcgcaccgagcgtcgcgatattattaaagatggcatcctgactcagtggctgctgaccagctactcggcgcggaaactggggctgaaaagcaccggacatgcgggcggtattcacaactggcggattgccggacaagggctaagcttcgaacaaatgctcaaagagatgggcaccgggctggtggtgacggagctgatgggccagggcgtgagtgccattaccggtgattattcccgtggtgcagcgggcttctgggtagagaatggcgaaattcagtatcccgttagtgaaatcaccatcgcaggtaatttaaaagatatgtggcgcaatattgtcaccgtcggtaacgatattgaaacacgcagtaatatacagtgtggttctgtgctgttgccggagatgaaaatcgccgggcagtaaaaaactggcgcgacctgccgcgctataaactaaaaaattacacaaaatcattcgcactgcatcgagacggaaagtgaatgagggccggggagcgtactcgcagtacgtgacccgggcgaatgagcgtagccgtcgatgaggcagtgtgaaggatgaagtgtaaataaaaaaggaagtgagcaatgcgtaaaagcctgttagctattcttgcagtctcctcgttggtattcagttctgcgtcgtttgccgctgatcttgaagacaatatggaaaccctcaacgacaatttaaaagtgatcgaaaaagcggataacgcggcgcaagtcaaagacgcgttaacgatgatgcgcgccgcagcgctggatgcgcaaaaagcaacgccgccgaagctcgaagataaatcaccggacagcccggaaatgaaagatttccgccacggtttcgacattctggtcggtcagattgacgacgcgctgaagctggcaagtgaaggtaaagtaaaagaagcgcaggctgctgcagagcaactgaaaacgacccgcaacgcctatcaccagaagtatcgttaattcctcatttccctgttgcctgcactcaggtaacagggaacttatcatcgcaaatgatgcaccacctgattgctgctgccgcgccagatcagggaagggtcttttaaatcctgcacaaatttgccgtcgaccagcacgttaatcaaatcaacaacctgcatttgcgcagcgttgagttcgtcgagtttatagcctgtccacacccagatgtctttacccggacactcggcgcggatgcgttttaccagtttcagaatatccggcacgttttgcggatgcagcggatcgccgccggagagggaaatcccctggcgtttgatacgagtgtcattcagatctttaatgatcttgtcttccattgctttggtaaatggctgaccagaatttacccgccatgtgcttttgttatagcaaccggggcattcatgaacacacccggagacaaacagggtgcagcgagtgccggggccgttgacgatgtcgacaggatagtactgatgataattcattatttcgcctggcttatcagtccgcgtgtaggctgcatccggtaatcaatgcctgatgcgacgctgtcgcgtcttatcaggcctacagccgttgccaaatgtaggccggataaggcgtttacgccgcatccggcatttgcttagcgcagagtgaagattaacctatctgcccattccccaaatgtttaacgcggcgcttaacttcttcctgcttaccagcgttaaacggacgtgcatccgggctacctaaatatccgcacacgcggcgagttaccgacacacgggaggcgtcatggttaccacatttcgggcaagtgaagcctttgctggtgcactcgaactcaccggtaaagccacactcgtagcactcatcaatcggtgtattggtgccgtaatacggtacatgctgatagctgtaatcccagacatcttccagcgctttcaggttgtgctgaatgtttggatactcgccgtagcaaatgaaaccaccgttcgccagcggcgggtaaggcgcttcaaagtcgatcttgtcgtacgggttcaccttcttctccacatcaaggtggaaactgttggtgtagtaacctttatcggtcacgcccggcaccacgccaaactcagcagtatcgagacggcagaagcggtcgcacaggttttcactcggcgtgctgtagagactgaaaccataacccgtttcttctttccactgatccactgcctggcgcagacgttcaacaatggcgatacctttcgcgcgaagctgctcgttgtcgtaaacatgctcgccgccgaacagcgcgttaatggtttcgtggatgccgatgtaacccagcgaaatagacgcacgaccgtttttgaagatttcagaaacatcatcgtcagcattcagacgtacgccacaagcaccttccatatagaggatcggggccacgcgcgctttcacgccttcgagacgagcgatacgggtcatcagcgccttacgtgccagcaccagacgttcatccagcagcttccagaaggtggcttcatcgccttttgcttccagagcaatacgcggcaggttcaggctgatcacgccgaggttgttacgaccatcgtggatctgctcgccgttttcattttcccacacgccgaggaagctgcggcagcccatcggggttttaaacgaaccggtgactttcactacctgatcgtagttcaggatatccggatacatgcgcttgcttgcgcactccagcgccagctgtttgatgtcgtagttcggatcgccttttttatggttcagaccatcgcgaatcgcaaacaccagtttcgggaacaccgcagttttacggtttttaccgaggcctgcgatacggttacgcaggatcgattcctgaatcaggcgcgattcccagctggtgcccagaccaaaaccaaaggttacaaacggcgtctgaccgttggcggtgtgcagggtgtttacttcgtactccagcgactggaaggcatcgtagcactctttgatggtacgagagtttgcgtagccttcggcgtccgggatgttccactcttctgcggtcttgcgatgtttgttgtagctggcggtaacaaacggcgccagcacttcatcgatacggttaatggtggtgccgccataaatatggctggcgacctgagcaataatctgcgcagttaccgcggttgccgtagagatcgacttcggcggttcaatctcggcgttccccattttaaagccctgggtcagcatgcctttcaggtcgatcaacatgcagttgaacatcgggaagaacggcgagtaatcgagatcgtgatagtgaatatcgccacgctcatgtgcctgcaccacgtcacgcggcagcaggtgctggcgtgcatagtgtttagccacgatcccggccagcaggtcgcgctgggttggaatcaccttgctgtctttgttggcgttttcgttgagtaacgaggagttggtctgctcgaccagaccacggatctcctggttcaggcgaccgcgtttttcacgttcaatgtcgcgatcgtgacggtactcgatgtaagcacgagccagttgtttgtatggacccgacatcagctggttttcaactgcggtctggatctcgttgatatccacctggttgcggccctgcatctgctcgctgacaaccgcggcaacagtggcgcaataatcggcatcatcgacttccgctgctttagctgcacgcagaatcgcttctttgatgcgctctgatttaaacggcactttgcagccgtctcgtttcatcacatgcggtgtcatgatcgctccatatttttaagaacaggttatccacagaaattgggaaaggcgttttccggttttttcgtttcgttttccggtgctttccgcaatcgccatccgcttatccacaacgccgcacctttttcgtggggagctgtagtagcaattatagtcgattaatacaacatattgggttggggcgcattttaaagtctatatatagtgctttgcatcaaggatgttttaacttttttgatgtagctcaaagtaaaaagcagagcgtacggatgacgggcgctacagcgttatgtaaattttttaatgaatttgctggttgaaaaatcaacaaaaacaacaaaaacaacatgctgacagacaaaaccccggaatgaccggcattaccggggcttagggaagatttacttctgtaaccaccagacagcctcaaaaggccgtaaattcatggcacagggttgtggtgaggcttcttcgtagttatgcatcacaagctgccagttgccgcgcatttgccctggctgccagggttggatctcacggctaaggttggcaatgaccagcaaggtttgccccttccattcacggcgatagcaccacaatacagggctgtttggcagcagatcctggtaattgccccatgtcaggatggcttcttgcttacgcagtgcgattaacttttggtaggtgtaaaacaccgaggactcatcggccagcgcggcttctacgttgatttgttgatagttatcgcccaggccaatccacggttcgccagccgtaaacccggcattatcgccgttgctccattgcatgggcgtgcggctgttgtcacgggatttactggcgaggattgccaataactcgtcggcatcacgaccatcgttgcgcagctcggcaaacatattgaggctctccacgtcgcgatagtcagtaatgcgcgtgaaatgcgggttggtcatgccaatctcttcgccctggtagatatacggcgttccctgcatgccatgcagcaccatcgccagcatttttgccgcaggcacgcggtattcaccttcatcaccaaagcgagaaataatgcgcggctgatcgtggttacaccagaacaaggcattccatgccacgttgtgcattccttgttgccagtggcggaacaatgttttcaacgccacaaagtcaggtttagccagcgtccatttttcaccaccgggataatcgaccttcaggtgatgaaaattaaaggtcatcgacaattcactgcctgtcagtgccgcgtatcgctggcaatgctcaaggctggtggaggacatttcacctacggtcattaacccgcgtggcgtaaacacatcgcggttcatctcgtgcaaaaactcgtgtgctcgtggcccgtcggtgtaaaagcgacgcccgtcgccatccaggtcttcagggaaacgcgggtctttggagatcagattcaccacatccaggcgcaacccgtcgaccccacgatcggcccagaattcacagacttttttcagctctgcgcgtaccgctggattctcccagttgagatccgcctgttctggtgcaaagagatgcaaatagtactgttcgctttccgcatgccagcgccacgcactaccgccaaattttgaacgccagttgttcggtggcgtttctggttcgccatcgcgccagatataaaactggcggtaagggctttctttgttcagcgcctcgcgaaaccaggcatgttgggtagaggtatggttaaacaccatatcgagaatgatacgaatcccgcgcgattttgcctgcgtcaccagttcgtcaaaatcgtccagcgtgccgtaggtgggatcaatcgccgtatagttcgctacatcgtaaccgttatcgacctggggagagacataaaagggggttagccagatggcatcaacgcccagtttatgcagatagtccaggcgttggataacgccacgtaaatcgccggtgccgctacccgtggtgtcctgaaaactctttggataaatctggtagataacgccgttttgccaccagtggggaagattagtcattacgttattcctgcaaatgcgagggggcgcaattgcgccccgaagaaaattaaacaatgtccagcgtgcccaggcggtatttccgctgatagataaacgaggtgagtacaatcgggatgatgatggcgatagccattgccagcgcaaatacctgccagtagctcggttgaatcgagagaattcccggcaggccccctacgccgataccattcgccataacgccgttcaggccgcatagtaatcctgccagaccagaaccaatcatcgcgcacagcatcgggaagcgatatttcaggttgatgccgtacattgcaggctcagtgaccccaagccaggcggagatagcggcaggcacggagatctcgcgttcattgtgcttgcggctggaaatgataatgcctatcacggcggagcctgagcgatattcgacagcgcaatcagcggccacactggcgtgccacccatgctttgaatcatctgcaaatcaatagcaagcgtggtctggtgtacaccggtgatcaccagcggggcgtacaggaagccaaacaatgctgcgccaatcggagcaaagctgccggtcatcaggtgacgtaccgcaaaggcaacgccatcgccaatcatgcgaccaaacggaccaatcagcgcatgggcgaggaacaccgcgaggatcagcgaacagacgggcaccaccaccagatagaggtaatccggcacgatgcgtttaaggcgagtttcaataacgcccagcgccagcccggctaacagtgccgggatcacctgcgcctgatagcctactttggcgatgctgaacatgccaaagtcccacacttccggcagctgctgcccgagcagataagcgttcatcagctggggagaaaccagtgtcacgccaagcacgataccaaggatcggcgtgccgcccatttttttcaccgctgaccagcaaataccgaccggcaggtagaagaagatcgcttcaccgatcaaccacagaaaatcgtagatcgtttgcagggaagggtacatttgcgccagcgtctgaccgttgctcatgggcaaatcgccgatcacattgcgaaaaccgaggatcaaaccgccgctaatcaacgcgggcagcagcgggaagaagatctccgcgaaatgagagatcaactgctcatgccatttcatattctgccgggcggctttttttacctgctctttatcaacctgcgcctgtccggttgacgcaatcagtgcttgatagtaatcacccacattggtgccaatcaccacctgaaattgcccggcattggtgaaacagcctttcaccatggggagttgctcaatttctttcggtctggcattggccggttggttgaggacaaagcgcaggcgagtaatacagtggctcaccgtcgcaatattgccgcgcccgccgaccagttcaatcaaccgatcgatatccgtttggtttattttgctcatcataaagccccatggcagatgacatttttggttgactgcagaatatattgcgcggaaaaatttaaaaacgggaacgttcccgaaacgcagcgaagatcacaatttatcgttcaggaaacgatcaggacagggtggcggggatgatgatttgttgcggttcgctgcgcccggttacctgtgcgatcaattggcaggccgcctggcgtccagcttcggcgtagccaggatctacggtgacgatctccggatgaaggaatttcattaacggcgtattaccgacgctcgccagttgcaaggtgtcgatgcgttgctcttgcaggtatttacttgcgccaagtgccagcgtgtcggttgcgcacagtaaggcggtagtttcaggcgtaatcacttttgccacgttctcatagccttgcttcatagcaagccctggcagagcggcaacgggatgcagtttatgcgctttgcagaacgccaggtaggcttcgtgacgtcgcttaccggttgtcacgtcactatgcggcacgccgagataactgatattacgatgcccctggtcatacagccgttgcatcaggatcttgattgccccttcgtcgtcataacagaccgaagcaaaaccttttgcgtcacgcgccagcagaaccagcgatgactgccagtgggctaacatttcttctgttatgccagtaaaaccgaacagcactacgccgtcgatattacgccgtttcagcacccccaaatgttcggcaactaattgcggggaaaactgactttccatcatgattgggtcgtaaccttgttcatagaacgctggcagcatggtttgaacggcgagattttctgacaacgaatccagacgggtaacaatgatggcgaccactttatcgctttgcccacgcatagcgcgcgcagagcgggaaggggaaaatccatgctgattcatcactgcttcaacacgctcgcgggtgcgctggctcacgccgctttcgttattcagcacccgggaaactgtagatttccccacgccgcttaagcgtgcgatgtctttgatggtcagccgattttgcatcctgttgtcctgtaacgtgttgtttaattatttgagcctaactttacccgtgcattcagcaatgggtaaagtctggtttatcgttggtttagttgccagcaggtattatatcgccatagatgctacgaatattattggattctccttattatttgcggcgcttttttcacttaccggaggttatatggaacctgatcccacgcctctccctcgacggagattaaaacttttccggtaagcccgtcttttcacggcgttaccggatgcgtaaggccgtgacgttttaacgtccctgctcagctttattaccttcaggtaaggcttcgccacgcctgaagacatttctgtactgtttcagacagtgcggagggactccttatgtttaaagaaatttttacccggctcactcgccatttaccttcccgtctggttcatcgtgatccattgcctggcgtgcagcagacagtgaatacggtggtcccgccgtccttaagtgcgcattgcctgaaaatggcggtgatgcccgaagaagaattgtggaaaacgttcgacacccatccggaagggttaaatcaggcggaagtggaatctgcccgcgaacaacatggtgaaaataaattacccgcacaacaaccgtcgccgtggtgggtacatttatgggtctgctatcgcaacccctttaatattttactcaccattctcggcgctatttcttacgccacggaagatttatttgccgcgggcgttatcgcgctaatggtcgctatttctacgttgctgaactttattcaggaagcacgttccactaaagcggcagatgccctgaaagcgatggtcagtaatacagcgacggtgctgcgcgtaattaacgacaaaggcgaaaatggctggctggagatcccgatcgaccagctggtgcccggcgatattataaaactggcggcgggagatatgatcccggcagatttacgtatcttgcaggcgcgggatctgttcgtcgctcaggcgtcgttaaccggtgagtctctgcccgtggaaaaagccgctaccactcgccagccggagcacagcaatccgctggagtgcgacacgctgtgttttatgggcaccaccgtggtgagcggcacggcacaagcaatggtgattgctacaggtgccaacacctggtttggtcaactggcggggcgtgttagtgagcaggaaagcgagccgaatgcctttcagcaggggatcagccgcgtcagtatgctgctgattcgctttatgctggtgatggctccggtggtgttgcttatcaacggttacaccaaaggcgactggtgggaagcggcactgtttgcgctttcggtcgcggtaggcttaacgccggaaatgttgccgatgattgttacctcgacgctggcgcgcggcgcagtaaagctgtcgaaacagaaagtgatcgtcaaacatctggatgccattcagaactttggcgcaatggatattctgtgcactgataaaaccggcaccctgacacaggataaaattgtgctggagaatcataccgatatctccggtaaaaccagcgaacgcgtgctgcatagtgcgtggttgaacagtcattatcagaccggacttaaaaatctgcttgatacagcggtgctcgaaggtacggatgaagagtcagcgcgctcgctggccagccgttggcaaaaaattgatgagattccgtttgatttcgagcgtcgtcggatgtcggtggtagtggcagaaaataccgaacaccatcagctggtttgcaaaggcgcattgcaggaaatcctcaatgtgtgttcgcaagtgcgtcacaatggcgagattgtaccgctcgatgacaccatgctgcgtaagattaagcgggttactgatacgctgaatcgtcaggggctgcgcgtggttgcggtggcgacgaaatacctgccagcgcgtgaaggagattaccagcgggcggatgaatccgacctgatcctcgaaggatatattgctttccttgatccgccaaaagagacaaccgctccggcactgaaggcattaaaagcgagtggaattaccgtaaaaatccttactggcgacagtgagttagttgcagcgaaagtgtgccatgaagtggggctggacgcgggagaggtggtcattggtagtgatattgaaacgctatctgacgacgaactggcaaatcttgcacagcgcaccacgctgtttgcccgcctgacgccgatgcataaagaacgcattgtgaccttactgaagcgcgaagggcatgtggttggctttatgggcgatggtattaatgatgcgcccgccttacgcgctgcggatatcggcatttctgtggacggcgcggtagatatcgcccgtgaagcggctgatatcatcctgctggaaaaaagcctgatggtgctggaagagggggttattgagggacgtcgcactttcgccaacatgctgaaatacatcaaaatgacggcgagctctaacttcggtaatgtgttcagcgtgctggtggcgagtgctttcttgcccttcctgccgatgttgccgttacacttgcttattcagaacttgctgtacgatgtgtcacaggtggcgatcccgtttgataacgtcgacgacgagcaaattcaaaagccgcaacgttggaatccggcggatctggggcgctttatgatcttcttcggaccgatcagctcgatcttcgatattctgacgttttgcctgatgtggtgggtattccatgccaacacgccggaaacgcaaacgctgttccagtcgggatggtttgtggtgggcttactgtcgcaaacgctgattgtgcatatgatccgtacccgccgtgtgccgtttattcagagctgtgcatcgtggccgttaatgatcatgaccgtgatcgtgatgattgtcgggatcgcattgccgttttcaccgctggccagttatctgcagctgcaggcgctgccgttaagctatttcccgtggctggttgcgattctggcagggtatatgacattaacccagttggtgaaaggattttatagccgtcgttacggctggcagtaaagaataaactgggcacgatagccccgattcagattgcagacaaagtaagctttgttcatgccggatgcggcgtaaatgccttatccggccaacaaattcaataaattgcaggaatcacgtagatactgttatggcctgcaagttttttcctggtccggtttcccggattgcaggcatgccagacacagcgccgtcaggcgctgtttttttcatcccttccgcgatttttacgccgctaccggattatgccgtgacgcatcgaacggcacgcctgacttcagcactccatacgccacctgtgccagcttgcgcatcatcgcgccgagaatcacctttcctttcttgccattagccgccagacggtcgcggaacgcccgtccccactcagtcttactggtggctaccattgcgggcatatacaacgccctgcgaagcgacacatgtccggccttactcatccggctcgcccctctcacactgctacctgattcataacgccgtggtgtcagacccgcaaagcggcgaactgtctggcatgggcgaagcggtccttcagaccgatataagccagcaataccgcagatgttttctctccgatacccgggatgctttccagcagtttcctgcggtgtttcatatccggatcatcgtctgtcaggtcttttatctgcttctcaagacgcttcagctctgcttcaagccacagaaggtgagcatcaatgctcggtctctggacttcccgcgccgtttcagtgcgattcagttcctgcgtgtgcatatctgtcagcgcctggtggcggactaccagggcacgcaacgcgcgttcaagcgggtgaggcgcttcccaggctgcagggcgcttctgacgacagaactctgccagcatgcgcgcatccacggtatcagtcttgttacgcagtccttcactctgagcgaaagctttacccagcgcaggattaatgactgacactatgtagccagcatcgtaaaggcactcagcgacaggttccatataggtgccggtcgcttcgatgcagatatgcgcatggtcaatcttgtgacctttcagccagctcaccagctcatcgtgccctttagtggtgttagcgaatttttggtgcgatgacgaccatcaggacgcaacacatcgacatccagtttctctttagcggtgtcgataccgatataatgaagttcatgttccatagtgaaaccaaccttgcaaatacggattaccgggaaaaccggtccatgatactgtccggtttatcactttgggagaaaggcagtccgctgcataaatctacgcaacaggttagaacccaaggcccgatacggcatgcggactgcaggcagagaaaactggccgattttctctgcactggagggataatacaaggcctgataagcgtagcgcatcaggcgattttgcgtttgtcatcagacttaatccgggcatgatagcccggatttccatcaagattagcgacgaacagcgatcgcttcgatctcaattttcacgtctttcggcagacgggcaacttcaacgcaagaacgtgccgggaaggtggcattgtgttcggtgaagaaggcttcgtaggtagcattaacggttgcgaagtcgttcagatctttcacaaacacggtggttttaacgatgtcgcccactttcaggcctgcggcttcgacgatcgcttttacgttatccagcgactgacgtgcctgtgcagcgacgtctgccggtacttcgcccgttttcggatttaccgggatctggccggaggtgatgatcatattgcccagatcaacgccctgtacgtaaggaccgatagctgccggtgcattttccgtcgcgatagttttgctcatgatttctcctttattacagcggtaaaaagtctggctcattatagggagccagacttttattaccaaccgcaattaattggccagcaccacattatgggaaaactctttttcacagtatttgcatttgagcgcgatgtcattggcgcgttttcgcacggcaaagctggaagaaaccggttcggcatggctgatacagttgctgttcgggcagaccagcacattgtcgatgcgctctggcagactggggcgcgatttacccaccacttcatagttgtcgatacggttaaccgtggcttgcggcgcatacaatgccagttgatctacctgatcttcactcaaaaaggtattttcgattttgatcagatctttgcggcccatctcgccagaaggcaagttcagaccgatggtgatgcgctgatccgtttcggtcagcttgaacagactcaacagcttaaaaccgatctgggcggggatatggtcaattaccgtgccgcgtttaatagcttcaacctgcaatttattatcgtgtgtcatctctatttccccttacagtaccagatcgcgattcagaaccagtgccagtaacgcctggcgagcgaaaatcccgttgcctgcctgctggaagtaccaggcgtgtggcgttttatcaacatccgtcgcaatctcatcaacacgcggcagcggatgcagcactttcatattggctttggcgttgtggagatcgctggcgcgaagaacaaactgcgctttcacgttggcgtactcggacgggtccagacgctctttttgcacgcgggtcatgtacaggatgtctacttccgctatcacttcttcaatagagctgtgcagactccatgcgatccctttttcatcgagcatatccagaatgtattgcggcattgccagcgcgtccggcgcgatgaagtaaaaacggttgccgtcgaacttcgctaacgcctgagtcagggagtgaacggtgcggccatatttcaggtcaccaaccattgcgacgtggagattgtccagacgcccctgggtttcctgaatagtgaataagtccagcaaggtttgcgtcggatgttggttggagccatcaccggcattcagtaccggtacattgccggaaaactcggtggccaggcgcgccgcaccttcctgcggatgacgcatcactatcgcatcgacgtaagtgctgataaccgaaatggtatcggccagcgtttcgccctttttacccagtgatgtattggcgctgtcggagaagcccaccacgctggcacccaggcggtgcatagatgtttcgaaagagaggcgggtacgggtagaggcttcgaagaaacagctggcaatgactttgtgcttcaacagctctggttgcgggtttgctttcagtttcgccgctgtcgccagcaccagattaaggtcatcgcgactaaggtcgtttatggaaatgatatgtttctgatatagcggattagccatcttttatctcctgacgcctgggcaaaaaaaagcccctcgattgaggggctgggaatgggtgatcaacgggaagaaaaacggcaggccagcgtcttttttcagacgcggtaagacaaaatgtcgaacacactgaaccatacatcctcccggcaaattgtccggcattatactcatcgtcagaagcggtgcaagcatttgatgcaatattttgtcagcgcaaacggtttatttgaattataagtcaaaatacatgcatttttatttgttgtgattctgcaggggaacggtcgttcggtatcaataattgcagacatttcctgcttttttctttttcactttcacgcaatcagatatgcattttattccattcatccgacttatagggcggagtgtgaaaacgaacggctaacactattgcttactgctcagggatgcgcgctatcactttaatttcaaaatcaaagcctgccagccatgtaacacctaccgccgtccagtttggataaggtggggcgctaaatatttcatttttcaccgtcatgatgtcttcaaattggttttctggatcggtatggaagctcgtaacatcaatgatatcgtcaaaagtgcatcccgcagcagccagggtcgcatgcaaattatcaaatgccagtctgacttgttgctgaaaatcgggttctggtgttccgtcctctcgacttcctacttgcccggaaacaaacagcaaatcgccggaacgaatagccgcagaataacgatgttcagcatacagtgaatgtcggcctgcagggaaaacagcggttctttctaccatttggttatcctcaagatttacgacatgaacagaagatttatatttaccaggagccgcttttagcggacgacgtgagtaaacaaaacccagacatcatgggaaatggctgggcttaattgagcgtagtcggttatgcgccaaacgcgccatcaatggtatgcatcgcgccggtaacaaaactggcttctggccctgctaaccatgcgaccataccagcgacctcttccggttgcccatgtcttttgatagccataaaactatgcaacatatcgcgcattggcccgttggcgggattagcgtcggtatcaattggccctggctggacgacgttaatggtgatcccacgcggtccgaaatcacgggccagcccgcgcgccatgccttgcagggcagatttactggcggcataagcagccatgcctgcaacaggcatacgatcgccattcacggagccgatgattaagatgcgcccgccttcgggcatctgccgggcggcttcaacagaggcatgataaggagcatgaatattgattttgaaaaggcgatcaatatcatcggcattcaattccagggcctcgccaaagacgccaatacctgcatttaccaccaggatatccaatgcgccgctcttacgaacgacatcaatgacagcgtctctgtcagcactatctgtgaatactgctgtcgctccagtctcttgtgccaggcgtttagcggcatctttcgaccccgcataggtgaatcgtacattggccccatcggtgacgaaacgacgtacgatagcggcaccgataccacgactgccaccgaggatgagaactgtcttacctgtaaaagcgcccataaggactccttgatttattatgtaacatgcattacaaaactgttttaactttctgtcaacaggttttgtaatggtcactaaaaaacaatctcgcgttccaggtcgtcccagacgtttcgctcctgagcaggcaatctctgcggcaaaagtgctttttcaccaaaaaggtttcgatgctgtcagtgttgctgaagttactgattatcttggtattaaccccccgagcctctacgcggcttttggcagtaaagctgggttatttagccgtgtactcaatgaatacgtcggtacggaagctattccgcttgccgatattcttcgtgatgatcgtccagtaggcgagtgcctggttgaggtattaaaagaagcggcgcgcagatatagccaaaacggcggctgcgctggctgtatggttcttgaaggtattcatagtcatgatccactagcgcgtgatattgccgttcaatattatcacgccgcagaaacgaccatttatgactatatcgccaggcggcatccacaaagcgcacaatgtgtgactgattttatgagtaccgtgatgtcagggctttctgcgaaggcacgggaggggcactcaatcgaacaactctgtgcaacagctgcactggcgggggaagcgataaaaactcttctcaaggagtgatgctggccttgatccgaaaggcgggaacgcgcctgccgataagttgtgataagacaataattcacgcgttaaggctagcggaattgatcaccttttcgtataacgatagaaatgaaacgttgttttaattaaggagtggaaaagatgatcatcggaaatattcataatcttcagccgtggctaccccaggagttacgccaggcgattgagcatatcaaagcacacgttacggcagaaacgccaaagggcaagcacgatatcgaaggcaatcgtctgttttatcttatctcggaagatatgaccgagccgtacgaagcccgccgtgcggagtaccatgcccgctatctcgacattcagattgtgttaaaaggtcaggaaggcatgaccttcagcacgcaacctgcaggcacgccggataccgactggttagctgataaagacatcgcatttttgccggaaggcgttgatgagaaaacagttatccttaatgaaggtgattttgttgtgttttatccgggggaagtgcataaaccgctgtgcgcagtgggcgcgccagcccaggttcgcaaagcagtagtgaagatgctgatggcgtgatgacttttcgccgtaaataactccaggtttacggcgagcttctgaaaagagcgttttttgatatttttttgtgagtagagtttgtaatgcttagacgttcttattaactcaaggagtccgtcatgagcaaaatatcagatttgaattattctcaacacattacatcagccgacaattttaaaccaaaaaatgaagtcttaaatacctggtatgtgggaatgaatgattttgcccgaattgccggagggcagaatagcagaagcaatattctttctcccagagcatttttggagtttttggctaagatatttaccctgggttatgtggattttagcaaacgctccaacgaagcgggtagaaatatgatggctcatattaagtcctcatcttatatcaaaaataatgatggtagtgagataatgaagtttgttatgaataatcctgaaggggagcgagcggatttatctaaggtggaaatagaaattacacttgcctcagcttttaataatgggattcgtgaaggacatacagtcattatatttacacaacctgatggttcgactaatcgttatgaagggaagtcctttgaaagaaaagatgagagttcattacacctgattactaacaagattctggcgtgttaccaacgcgaagctaacaaggaaatagctcgtctattaaatattccgcaggagttaaataattctcaggacttgaataactcgcaggtgagttgtaaagattcagttgattctacgattacggatttattagaaaaaccattgaataatgcattattagcaataaggaaagaacatctgctattaatgccttatgtatgtaatgaatcgatttcatacttgcttggtgaaaaagggatactgaaagaaatagatggccttaacgcagtaaataattatcttcttaataataagaaagctactgacaatgaaattaatgacatcaaagttaacctgtctcatattcttattgattccttagatgatgcaaaagttaaccttacaccggtcatcgattcgattctggagatttttttaaaattcccatatattaatgatgtaagaatactggattggtgttttaataaaagaatgcaatattttggtgattctgaaaagataaagtatgcatgctccgtgataaatcatattgattttagccgcgatcaatctaaagattttagctgcgatcaatctaaaattaaaatagctgagaccttatttttcaatctcgataaagaacactataaaaatagccgtaaattacaggaattgatttgggataagttggttgcatatgtcaatgattttaacttaagcaatcaagaaaaatcacgcttaatactaaggttatttgatgatgttaagttgctatttaatgaagtgcctgtcagcattttagtaaatgatattttttttgaaggattttttcatgaagcaacctgattttgctaagtggtatttctatcaattacttaaagattatgagggcgaacagctgtatcttaatgagttaggatatgtttatggtaatgaagaaaaaacaaatgaaattgtaaaaaacaatccgggttatgtcgttaagatttttaaagaaaagatggttaatgaattaaaaattagaacaagaatgatgaaaatcctccggaagatttacgtatagcaatagaaaaatatggatggaataattgaactattactgcataaaataatgtgatgccgggatgtttttgtatttcccggcatctttatagcgatatcaattatttactgagcgtcgcgaccatcaccgctttgatggtatgcatgcggttttccgcctgatcaaaaacaatgctggcggcagattcgaagacctcatcagtcacttccattccgccatgtaggccaaactcttccgccattttcttaccaagcgtcgtctggtcgtcatgaaacgcgggcaggcagtggaggaatttgacctccgggttaccggtcaactgcatcatcttgctgttcacctgataatcacgcagtaatgcaatccgttctgcccatttctcttttgcttcccccatcgacacccatacatcggtatagataaagtcagcaccttcaactcctttggctacatcttccgtcagcgtaatattcccgccattttgctgtgccagggcgcggcattccgtaaccagcgcagcttccggccagcatgcctgtggcgcgaccagacgcaaatccagaccggtaagcgccgcagcttcgagcatcgaattgcccatgttgttacgtgcgtcacctgcatagaccagcgtcatttcgttgaatgctttaccgggtaaatgctcctgcatggtgaggagatccgccagcaactgcgtggggtgaaactcattggtcaggccgttccataccggcacgccagcgtattccgccagtgtttcgacaatctcctgaccatagccgcgatactgaataccgtcatacatgcgacccagcacgcgggcagtgtctttaatcgactctttatgaccaatctgactgccgcttgggccgagataagtaacgcgagcaccctggtcatatgcggcaacttcgaaagagcatcgggtacgggtcgagtctttttcgaagatgagcgcgatgtttttaccagtgagtttggcttcttctttgccgcttttcttatcggctttcagcttcgcggctaactgcagcaggctgttgagttcagctggcgtgaaatcgagtaatttcaggaaatgcttatgataaaacccggacatagatccctcctgtggctaacgccttaatgaattaaaattcaatttatatggatgattatccatttgcaagtctaaagcataaatctttgtcacaaaggtggaggcaatgtcagtggtgtgtgacaataagagtatcggcaggacattaagaggaatgagccatggcaaacccggaacaactggaagaacagcgtgaagaaacacgtttgattattgaagaattactggaagatggcagcgatccggacgcgctgtacaccatcgaacaccatctttccgcagacgatctggaaaccctggaaaaagcagcagttgaagcgtttaaactcggttacgaagtgaccgatccagaagagctggaagttgaagatggtgatatcgtgatttgctgcgacatcctcagcgagtgcgcgttgaatgccgatctgatcgatgcccaggttgaacaactgatgacgctggcggagaaatttgacgttgagtacgacggttggggcacttactttgaagatcccaatggcgaagacggcgacgatgaagattttgtcgatgaagacgatgacggggttcgccactaattaattgattaaaatgcccgatagcacacactagcgggcatttttttagagttcgcgtagcatccgcacttcacaatctacatggcccgtgcagccaagtgcatagtcgatatgttgaaaacctaaatgttcatacaaaccaatcgcttctttcaaaaaagcggtcgtttccagatagcagcgtttgaagcccatctctcgtgcctgctccatcgccattaaggccagttttttcgccagccctttaccgcgaatagccggaagaaaatacatcttctgcagttcgcaaatgtccgactcactcccggttaatggcgcaatcccaccgccgccgaccacttcaccatcgtactcaaccacccaatatgcatgacccggctgactatacacttgatacaactcgtccaggttcggatcggcgacggtgtagcctttatcagcggtaagaccgtattcggcggatacctgacgaatgacgcgggcgatggcgggattatcctgctgcgtcaggcgacgcattacaggtgattgcggcgcaatgttattcatagtttaacccaataaaaataaagtaattatacatttgtttaataccactctcttcttacgtgcgcaagcgacttataaagtaataaagtttttgccagcctattactgataagagtattgtaacgtggcagaacattttactgtctgtatatataaattatatcaatgggttttttaattcagggaatttttatggctcaagttattaatgaaatggatgttccgtcccattcgtttgtttttcatggtacaggtgagagatattttcttatttgtgtggtgaatgtgttgttaacgattataacgctaggtatctatttgccatgggcattaatgaaatgtaagcgttatctctatgctaatatggaagttaacggacaacgattttcttatggaattactggtgggaatgtttttgttagttgtcttgtttttgttttttgctatttcgcaatcttaatgacagtgtcagcagatatgccacttgttggctgtgttttgactttgttactgttggttttgcttatatttatggcagcaaaaggactgcgttatcaggccttgatgaccagtctcaacggcgtaagatttagttttaattgctctatgaaagggttctggtgggtaacctttttcttgccgattttaatggccattgggatggggactgttttctttatctcgacaaagatgctacatgccaatagttcaagtagtgttattatatctgtggttctgatggcaatagttggtattgtttccattggtatttttaatggtactttatatagcctggtaatgagttttctctggagcaataccagtttcggtatacatcgtttcaaggtgaaattagatactacgtattgtataaaatatgccattctcgcatttttagctttattaccttttctcgctgttgctggttatattatcttcgatcaaatattaaatgcgtatgatagttctgtgtatgcaaatgatgatattgagaatttacagcaatttatggaaatgcaacgtaaaatgataatcgcgcagttaatctattattttgggattgctgttagcaccagttatttaacggtgtcgttgcgaaatcattttatgagcaacctgtcactgaatgatgggcgtattcgttttcgctcaactttaacgtaccacggtatgctttatcgcatgtgtgcgttggtggtgatatccgggattacgggcggtctggcttatccactgctgaaaatatggatgattgactggcaggcaaaaaatacgtatttgctgggcgatttggatgaccttcctttaatcaataaagaagaacaaccagataaaggcttcttagccaggatttcacggggaattatgccttctttaccatttctgtaagagataaaaaaggccggagcatgctccggccttcgttttcattactgtgttttgattacagcgcggcgataacagcctgctgttcaatcagcttcgctttcgcttctgcatagccttccagcttttcacgctctttcgcgatgaccgcttccggtgcgcgggcgacaaagccttcattcgccagcttgttctcgatacggctgatttcaccttcaatcttcgccacttctttcgccagacgcgccagctcatcttctttgttgatgaggccagccatcgggatcagcagctctgcaccgtcgatgatcttagtaacggaaaccggacctttgtcatcggcaggcagcacggtgatactttccagacgcgccagcgtttgcaggaagccacggttttcatttacgcgacgttctgcatccgcgctgcaaccacgcagtagcagctccagcggtttgcccggcgcgatgttcatttctgcacggatgttacgtaccgcaacgatcgcctgcttcagccactcggtgtcggccagtgcggcttcatcaacctgagatgcatcgtactgcgggaacggctgcagcatgatggtgtcggcagtgataccgcaaagtactttcacacgctgccagatggtttcggtgatgaacggaatgatcggatgcgcgaggcgcagcagaccttccagtacagtcaccagcgtatggcgagtaccgtgcagttctgcttcggtgccaccgttcattaccggcttggtcagctcgagataccagtcacagaactggttccaggtgaactcatacagaatgcctgcggcgatatcgaagcggaagctgtccagcgcttcgcggtacgctttgatggtctggttgaactccgccagaatccagcggtccgccagcgacagcgtcatttcgccgccgttgaagccgcaatcctgaccttctgtgttcatcagcacaaagcggctggcgttccacagcttgttacagaagttacggtaaccttccaggcgcttcatatcccagttgatgtcacgaccggtagacgccagtgccgccagggtgaagcgcagcgcgtcagtaccgtgcggttcaataccgttcgggaactgcttctcggtgcgcttacggattttgtccgccagctgtggctgcatcatattgccggtgcgtttttccagcagttctggcagcgaaataccgtcaaccatatccagtgggtcaataacgttacccttggatttggacatcttctggccttcgtcgtcacgaatcaggccggtcatgtaaacggtgtggaacggcacctgcggtttgccattttcatctttgatgaagtgcatggtcatcatgatcatgcgggcaatccagaagaagatgatgtcgaagccggataccatcacgctggttgggtggaactgacgcagggcgtcggtgttttccggccagcctagggtagagaaggtccacagtgcagaagagaaccaggtgtcgagaacgtcttcgtcctgacgcagggcaacgtcggcaccgaggttattttctttacgcacttcgtcttcgttgcggccaacataaacgttacccgcttcgtcataccatgccgggatacggtgaccccaccacaactgacgagagatacaccagtcctgaatatcgcgcatccaggagaagtacatgttttcgtactgcttcggtacgaactgaatgtcgccgttctcaaccgcttcaactgccggtttcgccaggacatcggcacgcacgtaccactggtcggtcagcattggttcgatgaccacgccgccacggtcgccgtaaggaacggtcaggtcatgtggtttaatttcttccagcaggccgagtgcgtcaaccgcagcaacgaccgctttacgtgcagcaaaacgctccagtttctggaactctgcagggatttcgctggaataaacgtcagattcgttacctttggtatcgaacacctgggcgctttcacggatatcgccgtcaaaggtcaggatgttgatcatcggcagggcgtgacgtttacccacttcatagtcgttaaagtcgtgcgccggagtgattttcacgcagccggtgcctttttccatgtcggcgtgttcgtcgccaacgatcggaatacgacggttaaccagcggcagaatgacatatttgccaatcagatctttgtaacgcggatcttccgggttaacggccacgccggtatcgcccagcagggtttccggacgagtagtcgcaaccaccagataatctttaccatctgcggttttcgcgccgtcagccagcggatagcggatgtgccacatcgaacctttcgattcgcggttttccacttccaggtcagagatagcggtgcgcagtttcggatcccagtttaccaggcgtttgccacggtaaatcaggtcttctttatacagacgaacgaaaacttctttcaccgcattggacaggccttcgtccatggtgaagcgttcacgctcccagtccacggagttgccgagacggcgcatctgacgggtaatggtgccgccggattccgctttccattcccagattttgtcgatgaaagcttcgcggccgtagtcgtgacgggttttaccttcttctgcggcaatcttgcgctcaacgaccatctgggtagcgatccctgcgtggtcagtaccgacctgccacagggtgtttttgccctgcatgcgctgatagcggatcatggtatccatgatggtttgctggaaggcgtgacccatatgcaaactgccggtgacgttcggcggcgggatcatgatgcagaaactttcctggctttcatcgccattaggcttaaagtagccctgcttttcccagtgctcgtaaagcggctgttcgatatcttgtgggttatatgtcttttccattatttccaggttgccgtattcaggttgaaaccagccacgcggtaggctttatagcgttcgcgcgccagttgtttcagagaatcttcataaggaacgaagtctaccacttctgtgaaagcggtggcaaaatctgcaaagcttgttcgcagactaatcaatatatcgcgcgggctgctgctgcgtttttgcggccaggcgatctccaccggcgcaccgccgcgcggtccttctcccgctaaattatgcggaacaaagctttctgccggacgcgcccacagggcttcatccagccggtaagcctgcttttcatcttcacaggcgatgagcacgcgcttaccactgcgccaacgttctgcggcaatttcacacaccagctgctcaacggcgcttaagccatcgacggtggtgtcattgtccagaaggtagaacgtcgcgtttttcataaatggggcttcttgtggtggatttaaatattgctgcattcctcaccctaaaagatgagcaatgaatttctattgcgctcgatcggttccctctcccttagggagagggttagggtgagggtaaaacgcaaacttactcttcgccgttaaacccggcgcggtttaacaggaactgtgccagcaacgctaccggacgaccggttgcgcctttcgctttaccagaacgccaggcggtaccggcgatatccaggtgcgcccagttgtacttacgggtaaagcgtgacaggaagcaacctgcggtaatcgccccaccaggacgaccgccaatgttcgccatatcggcaaaattggactccagttgttcctgatactcgtcacccagcggtaagcgccatgcgcgatcaccggattgttcagacgcggcaatcagttcatgggccagcggattgtggttcgccatcagaccagtaatgtgatgacccagcgcgatcacgcaggcaccggtcagcgtcgccacgtcaatcaccgcttccggctcaaaacgctcaacgtaagttaacacgtcgcacagtaccaggcggccttcagcgtcggtgttcagcacttcaacggtttgaccggacatggtggttaacacatcgcccggacgataggcacgcccgccaggcatgttttcgcagccagccagcacgccgataacgttaatcggcagttgtagctccgcgaccatccgcatcacgccgtaaaccgctgccgcaccgcacatatcgtacttcatctcatccatgccttctgaaggcttgatcgagataccgccggagtcgaaggttaaacctttacccaccagcacgattgggcgtgcatcttccgacgcgttgcctttgtactcaatcaccgacatcagcgattcgttctgcgaaccctgaccgaccgccagataggaatgcatccccagctctttcatctgttgttcgccgataacgcgggtaatgacattcttgctgtagctgtcagccagttggcgcgcctgagaggcgaggtaagcggcgttacagatattcggcggcatattgccgagatcttttgctgctttaatcccggcggcaatcgccagaccgtgctggatcgcgcgctcaccgctggtcagttcacggcgggtcggcacgttgaacaccattttacgcagcggacgacgcggttcgctcttgttcgttttcagctgatcgaaactgtagagcgtctcttttgccgtctcgacagcctgacgcactttccagtagttgttacggcctttaacgtgcagttcagtcagaaagcagaccgcttccattgagccagtatcattcagcgtattaatggttttctgaataacctgcttgtactgacgctcatccagctcacgttctttgccgcaaccaataaggagaattcgctcggaaagtacattcggaacatggtgcagcaacaatgtctgccccggttttccttccagttcgccccgacgtagcagggcgctgatgtacccatcgctgattttatcgagctgttctgcaatcggagaaaggcgacgtggttcgaagacgcccacgacgatgcaggcactccgctgtttctccgggctaccgctttttacactaaactccatgcactacgctcctgaatcttaaagacaacggcggtggctacagatagaattgcaagctttcgtaactcatgtccgctgttgcgatgacttcgtgttaatcttaacgttattacggcattggcacgtcagaacaaaatctgagaggtgaatccgttgagtataattatcttagcgacgatttcgacgactcaagagaataaatgacgtttaagccatgaaacaagctaaaatcctgcaaaagacgagtttttacgggcgtatttaaagtgataatcataagatatctggtgcgggagacgctcaaaagccagctggcgatactcttcatcttgcttttgatcttcttctgtcaaaagttagtgaggatcctcggcgcagcggttgacggcgatattccggcgaatctggtgctctcccttctcgggttgggcgtgccggaaatggcgcagcttatcctgccattaagcctgttcctcgggctgctgatgacgctgggcaaactgtataccgaaagtgaaattacggtaatgcatgcctgcggcctgagcaaagcggttctggtgaaagcggcaatgatccttgcggtattcacggcaatcgtcgcggcggttaacgtgatgtgggcgggaccgtggtcatcgcgtcatcaggatgaagtgttagcagaagcgaaagcgaaccctggcatggcggcgctggcgcaagggcaattccagcaagcgactaatggcagttcggtgctgttcatcgaaagcgttgacggcagcgatttcaaagatgtgttcctcgcgcaaattcgaccaaaaggtaatgcacgtccttctgtggtggtggccgattccggacatttaacccagctgcgcgacggctcccaggtcgtcactctcaaccagggaacgcgcttcgaaggcactgcactgttacgtgatttccgcattacggacttccaggattatcaggcgatcattggtcaccaggcggtggcgctcgacccgaacgataccgaccagatggacatgcgtacattgtggaacactgacaccgatcgtgcccgcgcagaactgaactggcgtatcacgttggtattcaccgtgtttatgatggcacttatggtcgtaccgctgagcgtggttaacccacgtcagggacgcgtactgtcgatgctgccagccatgctgctgtatctacttttcttcctgatccagacctccctgaaatcgaacggcggtaaaggtaagctggacccgacgctgtggatgtggaccgttaacctgatttatctggctttggcgattgttctcaacctttgggacaccgtgccggtccgccgcctgcgcgccagtttttcgcgtaaaggagcggtgtgatgcaaccttttggcgtacttgaccgctatatcggtaaaactattttcaccaccatcatgatgacgctgttcatgctggtgtcgctgtcgggcattatcaaatttgtcgatcagctgaaaaagccgggcaggggagttacgacgcgttaggcgcaggaatgtataccttgctgagcgtgccgaaagatgtgcaaatcttcttcccgatggcggctctgcttggggcgttgcttggtcttgggatgctggcgcagcgcagcgaactggtggtgatgcaggcttctggttttacccgtatgcaggtggcgctgtcggtgatgaaaaccgccattccgctggtcttgctgacgatggcgattggcgaatgggtcgcgccgcagggcgaacagatggcgcgtaactaccgtgcgcaggcgatgtacggcggctcgttgctctctacccagcaaggcttatgggcgaaagatggcaacaacttcgtctacattgagcgggttaaaggtgacgaagagttaggtggcatcagcatttatgcctttaacgagaatcgtcgtctgcaatccgtacgctatgccgctaccgcgaagtttgacccggaacataaagtctggcgtctgtcgcaggttgatgaatctgatttgaccaatccgaaacagattaccggttcgcagacggtgagcggcacctggaaaaccaacctcacgccagacaaactgggcgtggtggcgctggacccggatgcactctcaatcagcggtttgcacaactacgtgaagtatctgaagtcgagtggtcaggatgccggacgttatcagctcaacatgtggagcaaaatcttccagccgctatccgtggcggtgatgatgctgatggcgctgtcgttcatctttggcccactgcgtagcgtaccgatgggcgtgcgtgtggtcaccggtatcagcttcggttttgtcttctacgtactggaccagatcttcggcccgctgacgttggtttacggcatcccgccgattatcggcgcactgttgccaagcgccagcttcttcttaatcagcctgtggctgttaatgagaaaatcgtaaccaagcaagggagcgaaagctccctttcacattgttgataaagtcaaatacgagttcgatcggtcccctcgcccctttggggagagggttagggtgagggggacagatcgcgcctgacttaccttcttctcccccccagcaaactccccaacatcccgcgtacaatctgattcgtcacctggcgagcggcgcttttcgccattgtttgcaccacaccatctttcttcccgccgcgtggtccggtagtgccaaacaaaatatcctgcaatccaccaagaataccgtcatccaccgccacctctttccctttcgtggggggattcttttgctgctcggtactggcctgaacgcctttttgcagcatctcataggcggactcgcggtccacgtcatcctcgtacttgccatacaccggggagtgattaatcaagccattacgctcatcttccgtcactggccccattcgcgaacaaggcgcgatcaccatcgctcgttccaccactgaaggacttccttttgcatcgagaaacgagattaacgcctcgccggtccccagttcctggattgccttttcggtatcaaatgccggattggcccgcatggtttgcgccgcagcttttaccgctttctgatctttgggcgtaaaagcccgcaaagcgtgctgaacgcgattaccgagctggccgagcacattatccggaatatcagacgggttttgcgaaacgaaccagacgcccacgccttttgagcgaataagccttatcacctgctcaatcttatccagcagtacctgcggggcatcgttaaacagcagatgtgcttcgtcgaagaaaaacaccagttttggtttctccagatcgcccgcttccggcaattgttcatacaactctgaaagcatccacagcaggctggcggcgtacagtttcggcatctgataaagcttctcggcgctgaggatattgataacgcctttaccgttggtatcggtgcgcatccagtctttgatatccagcatcggctcaccaaagaagtgtgctgcgccttgctgttccagcgacaatagcccgcgctggatggcaccaaccgatgtgctactgatatttccgtactgattctggaaggatttggcgttatcgccgatgtactgggtaatcgcccgcaaatctttaaagtcgagcagtaacagcccctgatcatcagcaatgcggaagatgatattcagcacgccagattgcacatcgttgagattcaacagccgcgccagcaacagcggccccagatccgaaaccgtcgcccgtaccgaatggcctttctcgccaaagatatcccacaccaccaccggattggcatgcggttgccagtcattgacgccgatatttttaagccttgtgagcagtttttccgacgccgttcctgcctgcgcgataccggtcagatcgcctttcacatcagccataaacaccggcacgccgatttccgacaatgactctgccagtttttgcagcgtaacggttttacccgtccccgttgcgccagtaatcagcccgtgacggttagccattcccggcagtaaaaacagttctgtgtctggcgtgcgggcaattaacaggggttcgctcatgagatttcctccagtttcctgcctggagtataggcaacgtccggcaaagagaatacgtgtaatgaagagaaaataacctaaagcgtgttgccttgataaatctgatacccgaggtcaacagtgttgtggttgtgatcgttatttttaattttgctcagcaacatttgggcggccatccgaccaatatcaaaacggggagtaattacgctggcgaggcttgggatcatttgcctgccaatctccagcccatgaaaacccgcaatggaaatttgttctggcacggcgaggtttcgctcgcggcacagcagaagcgcacccatcgcaatatcgtcattggtgcaaaatacaccgtctaaatccgggtttgcgctaagggcatcacgcattaactgcattcctaaatgaatggatgagatggcgcgtggattcatgcgtaatggggaaagattatgcagcatcatcgcatcgcaatacccctgataacgctgttcatcgcgggtgtcatctttggaaccgagatacagaattttgtgcctgactcgcttctccagcatggtacacaccatgtcaaaagcggcctgccgattatcaaaaccgacctccatatccagccgttctccctgtacatccatcaattccacgaccggaatggtggctgaacgcagaaatttcaccgtcctgatggtgtgatatttttccgaaagtataatcccgtcaatgttataagagagcaggttaatcaccgactcttcttcggaatcgcgatcgtaattgtaattagcaataagggtctgataattatgctcagaggtgacggattctattcccgcgagaatgtcagcgaagagttgattttgaaatgacggaatcaagataccaagggtataactttgtgcattcaacaacatgccgggagcgcgattagggatataattgatctcttccataattttggcgatgcgctcgcctgtttcctttgccacctttttcggcgagcggatataacgactcacggtcatttttgttacgccagccagcgtagcgatatcctgtaaagaaattctgtgattgcgcataacttctcccaacgtcgggggaatcttcaatcttcccccgaaactacatcacaatattttattctttcagtgcaatacggcgttaatggctaacacgcccagcaaacccataatagaaataagggtttccatcaccgtccaggtacgcaacgtttcaccaaccgtcagattaaaataccctttaaatagccagaagccagggtcgtttacgtgtgacgcgatcacgctgcccgcaccggttgccagtaccattaaagcgggatcggcatgggtaacgttgataatcggcaacaccacacccgcggtggtaatggccgcgacggtggcagagcccagagcgatacgcaacagcgccgcaacagtccagcacatcaataacggcgaaagcgtagttccggtcattaagtgtgaaatatagtgcccgacaccgctatctactaatacctgcttaaacgcgccgccgccagcgataataaacacaatcatcgcgatagcgcctatagaatccccaatgatatccatgatttgctcgatggtgcgtccattacgtcggcccagtgtgaaaatcgcaataacaatggcaataaacagcgcaacggcagggttaccgacaaattcaaagaagaggcgcacggtgttagttttcggtaacgtaatttcacaaacggcggcgatagccatcaggatgaccgggatcacggcagcgaaaatactgttccagaaggagggcatctcctcttcgctaaacagatgaggattaaataagccttccggtggtgctttctcaaagcgagttagcagtttagaaaacagcggtcctgcgacaataactgtcggaatggtaatgataaatccatacagtaaagtcgttccgagattagcctcaaagatagtcgcgatggcagtaggccctggatgtggcggcagaaaacagtgggttacagagagtgctgctaccattggtacgccaacatacaacaggggtaatcctgatgatgctacgatggtaaataccaacggcaacagcaggacaaaacccacttcaaaaaacatggcgaggcccacaaccagaccggtgatcactagcgcccattgcacgcgttttttaccaaaagtagcaatcagcgtagtggcgatacgttgtgccgcacccgtatcagaaatcagcttgcctaacatggccccgaaaccgagaatcattgccagcccgccgagcgtgctgccgataccattttgtatagagtgcaggacggcctgtgcatccatcccttcggcaaatccgacgacggcagctaccagaacgagggcaataaagccgttaactttaaagccgatcatcaggataagaagcagcgcgacgcctgccgcaataatgattaatggcatagtctttatctcttattagtgccagaaaagcagcgctttcgcgctgcacgtagggtagtaggtgttaaacagccactaacatgccgccatcaacaaacaacaggtggccgtttacgaaatcagaggcttttgaagaaaggaacaccgcagcaccaatcagttcctgcggatctccccagcgtgcggcgggggtccgtttgcacaaccaggcggtgaaggcttcgtcctcaaccagtgctttagtcatttctgttttgaaatagcccggcgcaataccgttgacctgaatattgtggcgcgccagctcgacgcacatgccgcgggtgagcatttttaccgcccctttcgatgcggcataaggggtgatggtgtcacgtcccagttcgctttgcatcgagcaaatattaataactttacctgccttgcgttcaaccatgtgacgagttaccgcttgcgataccaggaacacggcggtctggtttactgcgatcacatcattccactcttgttcagggaactcagtaaaaggatgacggcgctggataccggcgttattcaccagcacatcaatggggccgatgtccttttcgatatgttcaacggcggcatcaatttcatgtttatgagtaacattaaaaggtgcggcaacggcctgaataccctcctggtggagtttttctacagcaagttctgcgcgttcggcagtaatatcattaataattatttgtgcgccatatttacccaggccggttgccagtaaaaagccaatgccctgtgctgaaccggtaatcaagatattttttcctgccagtgaaaatagatcgttcattgtattattcctttatttatctcttagaaaacaagctggacttttgctgcctgggttttatcaccggcgaaacgtagcgcctcttccaggtcagtgaagggatattcagcactcagtaaaggcagtggattgataacgccattcgccagccatgacactgcggtattaaattcgctggtaaaacggaaagagcctctgagtgaaatctccttaccaatcaacgtcatcattgggaattctgccatcgcgcctcccatacctacctgcaccattacgccgcgtgcacgagtgacctccagacaggtattcactgatgaaggatgaccggacacttcaaagctgacatcgaaatagcctttttccgctttccagtgatccatgtcgtcgttttgtgggtttacgagcacatccgcccccatctctttgcccagcgaaagggaacggggactcacatcagcacagacaatttccgcggcccccagtgttttcactgcactgacaatcaggcagccaatgggtccaacaccggaaataaatactcgcttgccctgtaactcgccggcctgatgtgcggcatgaatcgcgacggctaaaggttcggcaaaagccataaccttttcgtcagctttggccggataagggacacattgcgacgtttcgaccattttataacgggtaaaaccaccatcaacatgagggaaatacatggcactgccaaaaaaacgcatctctgtacactgattctcgttatgttcaatgcagtatttgcagtgaccgcacggtttagacggattaatggctaccgtttgcccttcatgtaattctgatgagtcgctatgaataactttaccgataacttcatgacctaacaccatcggtgcctttatcatgaaattacctacttttccttcctgataataatgtaaatcggaaccgcaaattccacctcgggttatttgtactaatgttccattattattccaatctatcgtctgctcggtaacggcaacagttttcttgcccgcaacaacgcaggactgtgttttcacttgcataaattcctcactggtcaggtagacacctcggaagcatttaagcggttttaattgtcattatttgtgatgaagatcacgtcagaaaattgttacattactatgttacgcataacgtgatgtgccttgtaattcttatcagcagaaataaaaaaacgtgaaattattatgccaccaggcgtagtatcgcagcaggtaagatgattcaggagattttaaatggcgggtgaaagctttattttgatgggcgtttcagggagtggtaaaacattaattggtagcaaggttgccgcgttattatctgctaaatttattgatggtgacgatcttcatccagccaaaaatatagataaaatgtcgcagggtattccattatctgatgaagatcgacttccctggctggaacgcttaaatgatgcttcatacagtctttataaaaagaatgaaacaggatttattgtctgttcatcattaaaaaaacattatcgtgatattttacgcaagggtagcccccatgttcatttcctctggttagatggcgactatgaaactattctcgcgcgaatgcagcgtcgggctgggcattttatgccggtagcgttactaaaaagtcagtttgaggcactggagcgtccacaagaagatgaacaggatattgtgcgcattgatatcaaccatgatattgccaatgtcactgaacaatgtcggcaggctgtgctggcgatacgacaaaacagaatatgtgcgaaagagggcagcgcctcagatcagcgctgcgaatgattttcaaaaatcggctttcaacaccacgcggtaacgcgccttaccgtcgcgcacatgctggatggcgtcgttaattttcgacatcgggaacaattcggtagtcggcgcaaccttgctgcgggcggcaaaacgcatcagcttacgcaactcataaggcgtgccagtagcagagccagagacactgcgatcgcccgcaattaacgtaaaggccggaacagacagcggcgtgagaaccgcaccgaccgtatggaaattaccgccatacgtcagcgcctcaaaataaggctgccagtcgaggctgacgttcacagtattgataatgagatcaaactgccccgccagagttttcagtgcctgcggatcgcggctattcaccactttatcggcacccatcgccagtacttcctgctctttcgccggatttgaactaaaggctgtcacctcgcatcccattgcgtgcagaagttttatagcgatatgccccagcccgccaataccaattaccccaacgcggctggtagcagtgatatggtgcatcaatagtggtttaaagaccgtgataccgccgcacaacagcggcccggcggactcgatatcaatattttctggcagtggaatcacccattgccagtccgcacgcaacttctcggcaaagccaccgcgattcataatcgtcggcaccgcaccttgctcgcagttgatctgattaccgctaatacaggcgtcgcagtgaccacagctacgcgccgtccagccaatcccgacacgctgaccgacctgcaaacctttatcctgcgcggcgctcccgagtgccaccacgcgcccaatcacctcatgcccggcaaccagcggatactgtgaaaatccccattcgttatcgatcatcgacagatcggaatggcagatcccgcagtaatccacctgcacttcaatatcttgtggcttcagctcaccgggatcgtactcataaacttccagttcgccgcccgcttcttttgcggcatagctttttatcatcgacattttttggtccttctctggtgttgtctgggaagtgtagagcatggcagggcggggtgcctggagtgtgacaaaggttacacatcgcggtatgcaatgctgaaaatttcagcacttagcgaggtgcgagcaagctggcgcttgcatggtggtgcgtgacaggtataattcacaacgttttccgcatacctcttcagtgccgaagtggcgaaatcggtagacgcagttgattcaaaatcaaccgtagaaatacgtgccggttcgagtccggccttcggcaccaaaaacgatgtaaa

SEQ ID NO: 212 - DNA, 1050 bp, Escherichia coli
  modified_base (16)..(16): a, c, t, g, unknown or other
  modified_base (20)..(20): a, c, t, g, unknown or other
  modified_base (24)..(24): a, c, t, g, unknown or other
  modified_base (1003)..(1003): a, c, t, g, unknown or other
caactggcgcagtaancagnaaantcagcagacgtcttctgaacgtgaactggagatgtctaccgagattgcacgtctcaaacgccagctggcagaacgggatgaagagctggctatcctccaaaaggccgcgacatacttcgcgaagcgcctgaaatgaagtatgtctttattgaaaaacatcaggctgagttcagcatcaaagcaatgtgccgcgtgctccgggtggcccgcagcggctggtatacgtggtgtcagcggcggacaaggataagcacgcgtcagcagttccgccaacactgcgacagcgttgtcctcgcggcttttacccggtcaaaacagcgttacggtgccccacgcctgacggatgaactgcgtgctcagggttaccctttaacgtaaaaaccgtggcggcaagcctgcgccgtcagggactgagggcaaaggcctcccggaagttcagcccggtcagctaccgcgcacacggcctgcctgtgtcagaaaatctgttggagcaggatttttacgccagtggcccgaaccagaagtgggcaggagacatcacgtacttacgtacagatgaaggctggctgtatctggcagtggtcattgacctgtggtcacgtgccgttattggctggtcaatgtcgccacgcatgacggcgcaactggcctgcgatgccctgcagatggcgctgtggcggcgtaagaggccccggaacgttatcgttcacacggaccgtggaggccagtactgttcagcagattatcaggcgcaactgaagcggcataatctgcgtggaagtatgagcgcaaaaggttgctgctacgataatgcctgcgtggaaagcttctttcattcgctgaaagtggaatgtatccatggagaacactttatcagccgggaaataatgcgggcaacggtgtttaattatatcgaatgtgattacaatcggtggcggcggcacagttggtgtggcggcctcagtccggaacaatttgnaaacaagaacctcgcttaggcctgtgtccatattacgtgggtaggat

SEQ ID NO: 213 - DNA, 874 bp, Escherichia coli
aggctagtcgtcgttcagttagttgaaagttaactgtcacgaacggtgcaatagtgatccacacccaacgcctgaaatcagatccagggggtaatctgctctcctgattcagagagyttatgstcacttttgagacagttatggaaattaaaatcctgcacaagcagggaatgagtagccgggcgattgccagagaactggggatctcccgcaataccgttaaacgttatttgcaggcaaaatctgagccgccaaaatatacgccgcgacctgctgttgcttcactcctggatgaataccgggattatattcgtcaacgcatcgccgatgctcatccttacaaaatcccggcaacggtaatcgctcgcgagatcagagaccagggatatcgtggcggaatgaccattctcagggcattcattcgttctctctcggttcctcaggagcaggagcctgccgttcggttcgaaactgaacccggacgacagatgcaggttgactggggcactatgcgtaatggtcgctcaccgcttcacgtgttcgttgctgttctcggatacagccgaatgctgtacatcgaattcactgacaatatgcgttatgacacgctggagacctgccatcgtaatgcgttccgcttctttggtggtgtgccgcgcgaagtgttgtatgacaatatgaaaactgtggttctgcaacgtgacgcatatcagaccggtcagcaccggttccatccttcgctgtggcagttcggcaaggagatgggcttctctccccgactgtgtcgccccttcagggcacagactaaaggtaaggtggaacggatggtgcagtacacccgtaacagttttttacatcccactaatgactcgcc

SEQ ID NO: 214 - DNA, 209 bp, Escherichia coli
ggggaaatgtggtggacagagtcattgaaggggcttacgaggtggtgggcgtktttgaccggattgaggaaaagcgtgatgccatgcagtcgctggtcctgccgccaccggcacgccaggcgctggcacaggcggcgctgacttaccgttatggtgacgaacatcagcccgtcaccaccgccgacattctgacgccacgacgccgggag

SEQ ID NO: 215 - DNA, 273 bp, Escherichia coli
ccggcacgccaggcgctggcacaggcggcgctgacttaccgttatggtgacgaacatcagcccgtcaccaccgccgacattctgacgccacgacgccgggaggattacggtaaggacctgtggagtgcttatcagaccatccaggaraatatgctgaaaggcgggatttccggtcgcagtgccagaggaaaacgtatccatacccgggccattcacagcatygataccgacattaagctcaatcgcgcattgtgggtgatggcagaaacgatg

SEQ ID NO: 216 - DNA, 150633 bp, Escherichia coli
  modified_base (6598)..(6598): a, c, t, g, unknown or other
  modified_base (7157)..(7157): a, c, t, g, unknown or other
  modified_base (7167)..(7167): a, c, t, g, unknown or other
  modified_base (7171)..(7175): a, c, t, g, unknown or other
  modified_base (40388)..(40388): a, c, t, g, unknown or other
  modified_base (59905)..(59905): a, c, t, g, unknown or other
  modified_base (59909)..(59910): a, c, t, g, unknown or other
  modified_base (63832)..(63833): a, c, t, g, unknown or other
  modified_base (63849)..(63849): a, c, t, g, unknown or other
  modified_base (148184)..(148184): a, c, t, g, unknown or other
  modified_base (148520)..(148520): a, c, t, g, unknown or other
gcgaaatcggtagacgcagttgattcaaaatcaaccgtagaaatacgtgccggttcgagtccggccttcggcaccaaaaacgattgcgataatcgtaaaacctacaacaatcaatacgttgtacaatgaagctggacgttgacggcaactacaaaatggccgcatctccggctttttttgtttataaagcctcgggccggatcttttcactcactccctgttttgtcaatctctctccacgcaacttctgagcatctcgacattgtgttcaatatagctgagcgtcaccttaatatcgcggtgtccgagtagtttctgcgtgacatacaaattttgctccggtttctgcatcaattctgtggcaacggtatgacggtagcgatgtgatggaaaacggctgtggcaggcatcgctgagtttggcaaagaaataactcacctgattttctgtcatcggtttaccctggcgtagcgtccgccgactgaaacgattgatgttgaacaactgatcgtcagcccgtattccctttgttttcgcttcttcaagcagatgctccagatagggccgcagtcgggaggcgatgggaacaatatgttcatcatggcttttactgccttcgatctgaataaacagcgtgtcatggaccagatcgatatccctgacccgcaggtgaataagctgattcagccggatagcggtgtagttgaaggtttcgactacggtcagccaaaaccatgccggatataaaggcgaacgatagccacgctgcattttttcccgttcgataaactggttcagcactttgcgggatgcgaggatttgctcgcgggtcagggttttctttttcttacgagattcccgcagcgatgttttctggaatggattgatgaactgctccagtagcccctgttcaatggcgaagttatacaaggctcgcatatggcgcatatagtgattccagctcaccggcttgatacagcgcacatttagcaggtaatggcgccactccagtaccatatgcggtgtgacttcggcgggtaggacgttgcgccagtgggtatactgatttaccgccgtgcaatagcagctctgggtatcagggcgcagcagacgggcaaaaaaatactcttccaggagctgttcaaaggtcatgagtgtcttctccttcactgagcaagagatgagggttattaaagggaacgtcatctccaaaaagcggcgtgggatcgtcaagcagatatcccttcagacgtgaacaacggcgtgggccgacaacggcgcagtgccagatgttgaggccgtttttttgttttcggtgaagattcaggttctggaacttcttctgtacttcccgccagtattcttctgggacattctgaccgcaggtgctaagccagagtttgaaaataccgggcgtcaccagaaacaccgacccggcgacggtatggattcgggcgttaggttcattgacttccagatgttgagcctgaacgttacgcaccagccactgccagaaggcttcgccggatagtgcggtttcgttttgttcgggtagaggggatggttgttctacttcaatgttcgttgcaatcaccgcttctgtctcatttcggatttccgctatcggtgtgacggttccaatgaaggtagcgggccgctgttgtggatcttcccaaatcagcgaaggggaaaagcgtaacagcgtgagttcactgctccaaccgccgctggcctcaatccggcaatgccagatggctttgtcctcacaggggatgagtaactggtgtgcctgcatctcgtcgaacagccgcatgttatgctgcggtacagcatcaagcccctggcacagcaaccagccgcgcacagcatcggcagcgttcttgctgaccagccacagcgcctcttccgtcagccagccgtcagagcctccattcgggttgttgagccgaaactcatgcgccagcaggtcgcgcaaactggtgataatttgctgcggcagcgaggtttgcggacgatggatcgccttgaccggatcgccgccgagattaaatgccaccgacgcccggtcggctttctgcaccagttcacccgccagcccggcatactgatactgtccgttcaggcagtggagtagggtggataatgcagcggtgtcggcggcgagccagtcgaggctttccggagggatcagttgggtaagcaggagaactgccgcagccggatggcgcaggtaatcacgttgcggcagatagcgaaatcgatagggttgggtcagcgggccatgccatggaaaccagcgtttcccgctaaaattttccacttcaatatcggtgatgagtttacccagatcgtgcagcagcgcggcgtagatgataacggtggtccagcgttcggactgcgcggcctgatcttccggcgctgcatcaggcggaaaaagataactctgccgcagccgtgcggcatagcaggcggcttcgaggctgtgatcgagcaggccacctgcgtgggaatggtggtggttttccgaggctgggaacaactgcgccagttctgcgaagcggtggattggtatcagccagaagcgttcaaacagtgaggcgggaagggcggtgctctggcgaataaactggatcagctgttggcgggtagtttcagctagtagcgtttgcgcggattcaggatgcagccatccctccgtgacgtctggttcgccagtggatggtgtggtgttttgctttttgcgcgtcagccatatccgcataatggccctttattcccaatggattttgaggtgcaggaaggcggtgacgcagtgaatcccctggagcttacataagtaagtaactggggtgagcgaggaaagccaacgcacctgcaactcgaaagacgaagggaagccccttttcgggtaagcccgttcccccttcactctcttccccttaaccctttggattttgccttttggtgccgtcagatttggggcaaaactgtttattgggttgcgcaaatttattggagtggagaaaaacggcagagcaggatgctccgccgttgatatgaaggtcatgcgctcagcgctaacgggctgctgcgcccgttcaagcagatactcacaggcattacgcgctaaaccgctggcacggaaaatcgcttttttgtcttgctgcaacaccttcagccacgatgcgatgtaactgtcatgctgtagcttcgactggatgccaacgtgagcacacaggaaagccgctcccatttcggcgaccagctcttcaaaactgtacgtcggatcgccgaaggtatgctttccggcagtgatgccgtcccggttcaatcgtgaagcgtgtccggtagcgtgcgtcagttcatgcagcagcgtgccgtaataatcctcacgcgaagtgaactgctcaggatgcggcatgatgatgcagtcgcgccccggcgagtaatacgcccggttctggcgtcggtgagtgatcatcaccgcactttgccgggtaacctgctcagtggcggcgataggatcatcgaccatcacgacaggctgtgaaaacgcctccggcagcccttcacattgttgaatgttgaacagccggaactcgcgtactacagcgtaagacatcactttagggttgccgtcagcatcaagaaccgtatttccgttgctgtccacaacttcgcgctgctggggcagataaaacacggccagtgtagatctttcgcctttgtggatgttaccgcccgcgttgcgaatttgagtgaaggtcagccagcgatcgttttcatatccctgtcgttctgcgctgttccagagcaggggaatattgatgccgtgataaaaccgcccggacagggcattcatcggcaccaccggttccccttcccgccacgggcgaacccaggggagcacgcctttctccagcgcggcgataatttcatctgtgactttctggtaaagatcgttgcttctgttcataagcgtaacctcatgataaagaagccgggtacagcgctcccggtcgggagtcgcccggcacgaggagtaaaggatgctgaggtaatcagctggtgtgaagggcagtaaccaacaggtggttatcttcaagcgttaagcgcagcggcgtcatcagcggtacattgctgctgccgtcagagggcaaacagtacagaccgaaattgatactcttacggtccgggcctgcgcttttgaatgtcagcatggtcgcgacaatcaggttttcgagacggtcgtcttcctgagagggatcgggtggaaaactaactaccttttcccaggcctcagttgagacagacagcgataaggattttgcttcagggtaagatgaagttggcatcgtgtttctccaatggtgaaagcagagaaacaccgcccggcagggagggattcctgcatggtggggtagaggatgtatcaggcgctaagcgctgtccgcgaggatgatacggagcggacgaaaaggcgagcctcaccgggtagggtggcaacctgaaggctctggttgcgggtcaaacttcgtacagattaatacggtatcaataataatcaagagcctggtgtctcagggctagagtttggattcgttattctgaagtccaacactggtgtgctggatttatccgctataggggttaaaagcaatttatccgttgtaggggataaagcagtttgggcaatcgatgatacctgcgaagctcacggtctcaggctttgaagatctgtttacgatgccagccgacgtattgttcagtgggccacagcgatttgtcgtgaggaaggtgtaactgctggccgttccgttgccagaacaggttatccaccaccgggctacggctgacgccgccggagatgcggatggtaaggttttcatccagcccgaatgcgcccatatcaaaagcatcgtggtgcagcgaacatagcgccagaccgttgtttaccacacacggcccgccataggttttccagtgaatatgggcggcttcaataccaaccagcgcaccatcgagtcgtagatagtaaccgcagaaagcacatcgcgaatggtaagcccgaagcacgatatccctgaaacgcggatcgcggctctttgaacggtcgataaaatccagacccagttggttggcgaggatccgctgaatactctcggggaaacgatccatcaggatctgctgggccagttggtcaattacttcagggtgtgcaagcagttgctggtaagctgtttcatcaaaaccccccgctacctgattatcaatcagctctttctttgtcggctgggtgttgcctctacggggtttgcagccttccgcattagcaatttcccagaagccgtcagttctgagtcgccagaaaggcatattgggatagtcagtgcgtcgcttggggccaaactcttttagcaggcgagtgagtggttcgtggatctctaggccgtagttaaacaggcgcgggtggcctgctttgtactgtgacaacacatacagcagcagcaacggtttatgcggcgcgcatacatcaccctgacgccatacagagacgttagagatagccgattgcagtgtttcgagtgatgtcataggaattaaccgggtaacgggctgatattattgcgatcatgctcgcaaaagcggtgaaattcaattgttgcttgtgacattaataaggaagttagacactttaatgtctgagagttagacatcaatgaaaatgtcacttgatggaaaaaattatctgggcgagagaaacctaaagaggatgtagtctgacagatacctatataaacaactggtacctgtcagactaggtgcgtgctaacgcaccttagttgataaaatctaatccgactcgagattttgatacaccgagtctacctaataaattcaaagcatattcgtagcgtaattcagcaactatttttgcttctacggatattatgttcatttcattttcagtgggcttggcatattttagtgctattattttatcttcagagaaaataccttgattttccacatagcaatccattgctttaggatttgccttgccatcgagtccaacggtgaaactaagaatatgtattttcccgtcatgttcagactgaacgaacaatagattattctgtgtggaataatttagtatttgtctaattgattcatcttcgttgatttctggcaaattgggtagtttaagctcgttttgcatatttttacgtgtattatttaaagcaactttcgcatcatggtaatgactccaacttattgatagtgttttatgttcagataatgcccgatgactttgtcatgcagctccaccgattttgagaacgacagcgacttccgtcccagccgtgccaggtgctgcctcagattcaggttatgccgctcaatgwcgctgmgtrtawcgcttgctgatwacgtgcagctttcccttcaggcgggattcatacagcggccagccatccgtcatccatatcaccacgtcaaagggtgacagcaggctcataagacgccccagcgtcgccatagtgcgttcaccgaatacgtgcgcaacaaccgtcttccgaagcctgtcatacgcgtnaaacagccagcgctggcgcgatttagccccgacatagccccactgttcgtccatttccgcgcagacgatgacgtcactgcccggctgtatgcgcgaggttaccgactgcggcctgagttttttaagtgacgtaaaatcgtgttgaggccaacgcccataatgcgggcagttgcccggcatccaacgccattcatggccatatcaatgattttctggtgcgtaccgggttgagaagcggtgtaagtgaactgcagttgccatgttttacggcagtgagagcagagatagcgctgatgtccggcggtgcttttgccgttacgcaccaccccgtcagtagctgaacaggagggacagctgatagaaacagaagccactggagcacctcaaaaacaccatcattacactaaatcagtaagttggcagcaagcagttaagttttgctgtgtttttcgttagtgacatctgtatgatcattttattacccctaagtcagtgaatacttaaatctaatgtacatatagaatagaatcattattttcatgttttatagttatttgcntttatagccnttannnnnaatcaaagcaatactatggttattaatatttcattcattgttaccaagcatgtctaactaaaaactatgtggaataatactgctctcttggctagctagtgatattgtcgttttatctattgatttgtgatggattgataggtattcatgtgatgccgttgaaatcaccttttgcctattgattagttgcggattgataggcgtttatgtgatgccaatggcatcacccttttacctattgattggtgttggattgataggtattgatgtgatttcactggcatcaaaagcttattttcccttttatctctacataaagggcacgtaaaattctcttttatgtagagataaaaaactcccttatttgtcactcttagcccaaccatctggcgttagaattaattcacaccttttcttcaagttattcgcgcgaaaaacttgaattggggaatttaacaatttcccgtttcagctcggtgattgagtagagttcattaggttaagtcgtcttttttacagtctatagggagtattggttaaaaacagcttataggctgtaaaacgttctagaaaatggtgaatgccttatgaatactgtttatccgttgaagaccttaaatcagttacgtcctcttctgattggctttcgtaaagtaaatggactgacccaaaaggatattgcagagaggcttggcgtaacacagcaaacctatgcgcgattggaggcgaacccaggtagcgccagtattgagcggttgttcaaagtgtttactgtgttgggcgttgaaatagaactttcttcttcattggcttcatcagccataaattcatataagttaactgataaatatagagattctctagccagacgagaaaagtggtgatgatgtctatgtgatagtctatggtgaaaaccttcgaacatgtcgataaaattcatttttttaaacgtgttgccggaatatgcttatggcatcgacacgttcttactatgtgtcgatgaaattcgcttttttaaacatgtcttctggatatgtttaccgcatcgacacattccagccatatgtcgataaagccttattttttaaacatgttgccggaatatgcttatggcatcgacacgttcttactatgtgtcgatgaaattcgcttttttaaacatgtcttctggatatgtttaccgcatcgacacattccagccatatgtcgataaagccttattttttaaacatgttgccgggatatgcttatggcatcgacactttctggctatgtgtcgatagaattcgcttttttaaacatattgtcgagatatgcttaaggtatcaacatgttcttgctatgtgtcgatgaaatttgcttttttaaaacatgttgtctggatgtatttaccgcatcggcatgttccagtgatatgtcgataaaatgtgattttttaaacatgatgacgtgacatgtcgatgacaacgacatattatggttatatgtcgattaaaacggttttcataaacatatgaactggaatgcagaaaccccttacaacgatttgccgatactgccgcctgacctggagcgcattgaaacacgcagcgtacttaaagcatgcataagtgcgcgcgcagcaatcgctgagttgaaaactgctggtgagttgatccctgaccaagggttgctgataaacatcctcccgatgctggaagcgaaggactcatcgcgcatagagaatatcgtaactaccagcgatcaactctttcagtatgctgaccgcgcagatggcgcagatccggccactaaagaagcgctgcgctatcgtacagcgctctatgatggctatacccatcttgaggactatccactctgtacaaacacagcggtagctatctgtaccaaattacgtgcagttcaaactgatatcaggaaaactccgggcacggtattgcgtgatcagaataataacgtggtatatacgccgccggtgggtgaagactctattcgtgagctactggcgaattgggagcggtttatacacggtgatgatgatttagatccattggttaaaatggctattgcgcactatcagtttgagtgcattcacccgttcccggatgggaacgggagaacgggccgtatcttgaatattctatatctgatccagagcgaattgctttcgctaccaatcctgtatttatcccgctttatcttggagagacgcgatgattactacacgctccttcgtagggtgacagaagagggtgactgggaatcgtggatattatttatgctggaggctgtggagagtacgtcccgatggactactgataagatatcgattgtgcgggcattaatggctgaaaccacagagtatgtacgcgagaagctaccgaaaatctacacccatgaacttgtccaggcgctttttgcacaaccatattgtcggatcgataaccttgtcgaacgtggggtggccaagcgccagacggcatcgacatacctcaagcagttggtcgaaattggtgtgttggaggaaatgagcgttggccgtgaaaagctgtatattaacactaggttgctacaggagttgaatcagtagtgaatgggcccagaaaacaaaagcgtggacaaatggtgatgccactggcatcactttttctccaaacattgcgcccgaatctccgcaaccaacttactgatatcccgttttttacgcggttcagccggtattttcggctctgaaaccacatgcggcacaaactccggcaccgtcgctttgccgcgtcgatactgattaaactcaccgccctgcgctttgcgcagcattgccagcagataggcgagcgggttttgtatgccgccacgggcaacgcgttgagctgcgtcatcaagcacgtcctggcgcagcgggggcggcaggttctgcatggcctgcaagacaagctgtttttcaggattagttaacggaatttccggcggccagttcggcggtgagctgttcgcgcgcgcggtagtactattacgaatatctgtagatacagtacgtacagaagcccggtcctgatttgagactaagccgccaggcctcggtttccggcttagtcctgattcggtaccaggtgaaattttgcctggtaccgtattgagaccggacgtttctggcttagtctcctcaggagactggcgttgctgccagcgggcgcgttcttccagcagttctatacgcgacgataaataacgcaggctggtgtccttgcgaatgtcgggtaatgctgccaacttactgatttagtgtatgatggtgattttaaggtgcttgcgtggcttccatttccatcagatgtccttcctgctccgctactgaaggcgtggtgcgtaacggcaaaagcactgccggacatcagcgctatctctgctctcattgccgtaaaacatggcaactacagttcacttacaccgcctctcagcccggtaagcaccagaaaatcattgatatggccatgaatggcgtcggatgtcgcgccagtgcacgcattatgggcgttggcctcaacacggttttacgtcacttaaaaaactcaggccgcagtcggtaacctcgcacatacaaccgggcagtgatgtgattgtctgcgctgaaatggacgaacattggggctacgtcggtgctaaatcacgtcagcgctggctgttttacgcgtatgacaggatacggaggacggttgtggcgcacgtcttcggtgaacgcactctggccacactggagcgtcttctgagcctgatgtcggcctttgaggtcgtggtatggatgacggatggctggccgctgtatgaatcacgcctgaagggaaagctgcacgttatcagcaagcgttacactcagcgcattgagcgacataatctgaatctgagacaacatctggcaaggctgggacggaagttactgccgttctcaaaatcggtggagctgcatgacaaggtcatcgggcattatctgaacataaaacactatcagtaagttggagtcattaccagcgaagaatatcttgcgatactcctcgctaattttaaaacgaatggtgctgatcaccgttcttaatcacttcgccagaaccgaccataatatggtgttggtttattagcgctgattcatggggatccctcagtgcttttgcggttttttatatctttaaagcagtagcggtagggtcgcgctggcagtttgctggctcacatcgctgtacttatgatccagcgcaatcagcgatgtggtgagtaactctaccaacagcataactcccaccttggcattcagcgcgccggcgctcaaggggccttccggtttggccgcgaccagttgaatatcactcagcgaagctaacggactgcgcggcgtattactcagcgccagtacacgcacaccttgcttacgcgctagttttacgacatgcagcagatcgcgcgtggatccagaactggaaatcgccaccacgaacgtgtttttactaagtgttgtggcgttcatggcagcacgatgcatatcgctgaacaattgtgcgggtttccccagacgcaggagtttgtaatgtaaatactcccccagaatagcactggctgctacgccataaatctgtactgactgagcctgatgcagtgcaagcgtggctgcttccagcaaggtcctatcgagtaattttgctgtgtcctgtagtgcttgcacggattcattgaccacattgtcaatctcatcaccgccgtactctacagactgtacttgtcggagatcgagtgcaagcgccattttgaattcgttatagcccttacaccccagcgttcggcacagacgtgtgacgctagcctcgctggtgccgctttcacgcgccagttcggtaatcgtcaggtagacaacttttgccggatcgctaagtacaaactctcccagcttctgttgagttcgactatatccatcaacgctctggcgcaatctcagcagcaggttttcattttctggcatgcaaaatccttaatgcgtttctctgccgatagtgtggcggaaagtaggggagagatgccagtcattttaaaaaagtatgatcggtgtcttggtttttgatggtaattttcatttttaaaattagttatggtaaaaatttttatcaatgatcagggagatgaaaaaatgatgcaaatatttagcggcgcttcgtcaggcgcatggtttgaaaaagcgcagcggttcggcaaatcgttcatgctgccgattgcggtattgcccgcagcggggttgttgttggggattggtggggctctgtcgaatcccaatacgttgacggcctacccattcttgaatgtcgactggctgcaggcaatcttcacaatcatgaccagcgcaggttctattgtgtttgccaacctgtcggtactctttgcggtcggcgtcgccgtggggctggcgaaatcggataaaggcactgccgggcttgcggcattgctagcgtttctggtgatgaatgctaccatcaacgccttattaacgctaaatggaacgttggcgcacaagaaccccggttcagttggccaggggatgacgcttggtattcagacactggaaactggtgtgtttggtggggtggtgattggtctcgtcacctgcacgttacatagccgtttcaataaagtctcactacctcagtttctcggttttttagtggttctcgttttgtacccattatcagctcccttgccgcgatagtagtgggtgcggttatgacggtggtgtggccgcatttccagaaactcatttttggactgggcggcctggtggatgcgacgggctatctggggacgctgttgtacggcttcatcctgcgtatgcttggtccactgggtttacaccatatcttttatttgccgttctggacgacggcgctgggcggcagtgaaatcgtcaacggccagttggttgaaggtacgcagcggattttctttgcccaacttgccgatccgaatacgcagcagttctacgcgggtaccgctcgctttatgtccgggcgctttatcaccatgatgtttggcctgcttggcgcatgtctggcaatgtaccatacggcaaagccggagaatagaaaggttgtcgccggactacttttgtcggcagccttgacctctttcctgacgggaatcactgagcctgttgagttctccttcctgtttgtcgcgcccgtattatacgtaattcacgccttcttcgatggtctggcgtttatggtcgcccatattttacatatcactattgggcaaaccttttcgggcgggcttatcgatttccttctcttcggcgtgttgcagggggaatctaaaacaaactggatgtatgtccccatagtgggaataccgtggttcttcctttactacttcactttccgctatttgattaaccgctttggctggctgacgccgggtcgtgagaacgtaaccctggttgaatccggccagcctcagagtgaacgcgcagcggcagtcattgccgggctgggaggcaaagagaatctggaagaggtggactgttgcgccacgcgcctgcgcgtgacggttaaagagagcagtaaggtagatgaagctgcgctgaaagtgaccggagcgcgtggcgtgattattcgcggcaacggcgttcaggtgatttatggccctcatgtcaccatcattaaaaacgaagtcgaagagattttatcgtaatgaaaactgtactggattccctgaaaggtaaattaatcgtctcctgtcaggctctggaaaatgagcctctacatagtccgtttattatgtcacgtatggcgctggcggcagcacaaggtggtgctgcaggtatccgtgccaacagcgtggcggatattagtgctatcaaagagattgtctcccttccgatgatagggattatcaaacgcgattaccctggcagtgaggtgtttatcacggccactctccgggaagtggatgagttgatgaccgttgagccggaaattattgccctggatgctactgcgcgcccgcgccctggtggtcagacgctggaagaactggtcacgcagatccgcgctcgctacccgtccgtacttctgatggcagatatagcaacagtagaagaggcggtgacagctgaacgtctgggttttgactgtgtgggcactacgctctacggctataccgcagaaactgccaggcatgtgctggcggaaaatgactgtggattcttacgtgaggtcctggcagcggtcagcgttccggttgtggcggaagggaacgtcgataccccggaacgtgccgcacgttgcctgacattaggcgctcataccgtggtggttgggggggcaatcactcgtccgcagcagataacgacacgctttatcgcggcgatcgcctcgtaaagcaccgatggggtatgatactttggtggggataagcgataattatcgcttatccccatattgagagtgttatgcagtacccgattagctagattttccagaccctgcaaggtgagggggactattgacgcgctggacgaactattcgccacgctgagctacgacaaaccgcgggtgattccgctgcactttaaaatttccgaggttataccctgttgatgctgattaccaccttcaccagctgcctgatattgtgcaaaaactacggctggtgaaggttggttttaccattactgctgtatataccctgcaactgttatggctgaatggcgagcagtacatccttccgtgtcttatcaacaccattattggttgtttaattgcttcggcggtaccgtctggttgtggtcacagtggtataacgggttattgcgtaagaatgcccatgacgcttcagaagcctatcagaaagtgatattggctcagcagcactttacaagcggcggtacagtggctgggagattattgccgatccgatatgccgcattaatgagagagttcatcataggagaacgcttttgccaaataaaccacctgcctgtcgtccagaatcgccgcgtagctggttttcccaaccgtttgctcagaaatgagatcaatagccgcaaatcgcgggcctgatcgatgctttcaatatagttagccgccattttttgcagcgccaggcccacgtgatacaagcgtgtatccggcatatagagcggatagtcgttatcgagaaactcctgagtcaggcagtgggcggagcttctgggaatatagaggtaatctgcgaggcgatctgatgtataatctgtttagtaagagtagcgtttttaacgctattacgtccatggtgtagcctatatgcaggcaaagttcatatccttgagttttatgtcagcctcttcctttaagcatctacttggtgtctatcgttacttcgcacacaagcatcatgtatatgatgtaacgaaattagttaacgcccttataagaatcaagacgttatcgggacgctgttaacctggctatccatcccaaaaccggtgctgactggcaatagcgcggacagcaaaagcgggtgatgacaccggggcagaatgaaaaatattatcttgctggcgcgttacatagctgaacgggcaaagtctgctacgtgggcagtaaccgcaaagttcagccttatttatcagtctgttgaagcaactgaagtctgtgtaccggcgggcaaaaacgatgcccctcatcgtggataattacattattcacaaaagccgggaaacgcagcgttggctgaaggaaaatccgaagttcagggtgatttatcagcaagtttactcgccatgggtaaatcattttgaacggctatggcaggcgcttcatgaaacgataacgcgcaatcatcagtgccggagatgtggcagttgctgaaaaaagtccaacactttatggaaactgccagtccgttccccggcgggagacatggtctggcaaaagtgtagcggtattaggcgcagctatttagcgacatattcctttgttttatcgtcagttcgtaaacgtccgatagcgatgatgtgaagtgcactatttgcagcacgctccccaccctgattaagtcggtaacggttcatttttttagaagatacggtaaccgagttgacaccacacagcaccgcaaaacctgattctattcttagccgttggggattatctccggcagtgatgagcaactgcgaagcgctttcgtatccaacagcattacgtttaatcagttcaggtgccagttcatcgacaattgccgcaatcatgacatcaaggtcggcgatttcatcatgtaactcgaaatagcgtcaggcaagtgatttcaatgcaatgcgataaacgttggtaacattacgatattcactggcactaggcttccaggatcccggagtcctgataagttgcatacgtgtcatatttctgagtggttcgcgtaattcatccggtgcagagataatataggaatggataatctggagagcgactctgcaggctgatattgcggttttgcggcaagtttttggcatccgcttctacgccaaatacctgaagtaggaatggatgcgttagcagcatacatccggatctgcgcggggaatagccggaaacggctatccctaccacaatagctaactttgtaatagtgcccttttaggctcatgtactctgacgtaattctatctggtagttgaattgcacgatacgcgactcttctgattcatcatgattattattcaatagcccaatcagtaacttacccgtctctatccccatttttttgtagtcaatacggatggatgtcaaggttgggtgtgtttgatcgcaattgtctgaaccatcaagacaagctacagcgatattttcaggaatttttaacaaacgccgctggcactcaaacatgatacccagcgcaatctcttcgtggctgcaaatcacagcatccagctctggttgtcgcagtaatatctcgtttaatgcgtaacgccccaattgcagacttgcggcatccggcatggtgataacaagatcagagttctggtaatggctcaacattgctttatgccagccgttcagttgctgacgttgcaggcggttgtccatatgcgcaccgataaatccgatattcttataaccctgttccagcagatgttcggtcagtttatgtgatgcttcaaaaaatgctgtttcgatggtaatttgagccggactgaaaggggaaccgacaacgttaatggtaggtatatttgttttctcgagtatctggtgagttttatcagccaactgagaaccaaaaataactaacgccgccgggttgccttgaagaagcgtcatcagaatttcagcttctttgagctgattatactcatgacacccaagcagtagctggaattcatttttattaagcacctgctgcaacgactgcataaagcgggagctggctttatctgtcagggaaggaaccagtacggcgactgtatcactgtgaccagatgcaagggcgccagcagttctgttgggaatataacccaactcttctacggcctgttctatcttttccctcagcttgtcagatacctgttccggtgttctcagcgcacgggaaacggtcatggttccgacacctgcaaagttagcgacctcctgcagcgtcacccgtccggtaccacggcgcttacgtgttttttccatttcgactccatggataattacaaccagctgttttcattactgttatttcaccattactctttccagtttttgcccacggtagcaaatatcctgttgcattgtatatgcaggaaccgaatatagccaaagcatggcggcagagaaatgatagcgctatcacaaagattggtagcgttatcagatagcgctatcaaatgcgacaatcatcacattaattaatgcgtaaaatatctactctcctgttaattatcatcgggagttatcagtagcatgttaaaaaatctattaaatacagaggtcgttcaggtcgtggaacaggccaaagactggcgggaagccgtggcgatttcatgccggccgttgattgaaaacggttctatcgaaccgcgttatgttgatgcgatctatcgctcgcacgacactatcggtccgtactatgtggttggccctggtattgcgatgcctcatgcgcgcccggaagagggagctaacaagctgtcattagcactgaccctgatcccttcaggtgtgaattttgatgccgatgaaaacgatccagtgaaattactgattgtgctggctgcaaccgacagtaccagccacattgaagcgatttctcaactcgccaagttattcgataacgaaaaagacatacaggccattttgatggccaaaacgacgcaggacattttgtctgttattgcgcgctattaatccagaggaacatttatgaaaattacagtggtttgcggtaacggcttaggcaccagcctgatgatggaaatgagcattaaaagcattttgaaggatttgtccgtcagcgctgatgttgatcacgtcgacctgggctccgcgaaagggacgccgagtgatatctatgtcggcaccaaagacattgccgagcagttagtcgcgcagtctgtcgcaggcaaaatcgtcgcactggaaaatatgattgataagaaagccatgagagaacgtttatccgtggtattaaacgaattaggcgcactgtaagctgggggcgatatggatttctttcgttttttgatgagcgatgtactttccgaacccgcagtgctggtcggtttaatcgccctgattggcctgattgcacagaaaaaaccggtaaccgaatgcattaaaggtaccgtcaagaccattatggggtttgtgattttaggcgcaggggcgggtttagttgtgtcgtcactgggtgatttcgcaaacattttccagcatgcctttggtattcagggtgtagtgccgaacaatgaagccattgtttccgtagcgcagaaaagcttcgggaaagaaatggcgatgattatgttctttgcgatggttatcaacattatgattgcccgtttcacaccgtggaaatttatcttcctgaccggtcatcacacgttgtttatgtcgatgatggtagcggtaattctggcaacagcaggcatgaccggcattacgcttatagccgttggctctttggttgttggcgtggcaatggtctttttcccggctattgcgcatccgtacatgaagaaagtgaccggttctgatgacgttgccatcggccacttctcaacattatcttatgtattggccggtttcatcggcagcaagtttggtaataaagagcactcgactgaagacatgaatgtgccgaaaagtctgctgttcttgcgcgacacgccggttgctatctcttttaccatgagcataattttcctggtgacgtgcctgtttgcgggtgcagatgcggtgaaagagcttagcggtggtaaaaactggttcatgttctctatcatgcaatccattaccttcgcagctggcgtgtacatcattctgcagggtgtgcgcatggtgattgcggagattgtcccggcattcaaaggtatttcagacaagctggttccgaatgccagacctgctctcgattgcccggtcgtcttcccttacgcacctaacgctgtactggttggtttcctgagtagctttgctgcaggtttaatcggtatgttcacgttgtatctgctgaacatgatcgtgattattcctggtgtggtgccgcacttcttcgtaggtgcagctgcaggggtattcggtaatgcaacgggtggacgtcgtggtgcgattttgggtgccttcgctcaaggcttgcttattaccttcctgccagtattcttattgccagtgctgggtgatattggttttgctaacaccaccttcagtgatgctgactttggcgcactgggtattttgttagggattatcgttcgctaatattttgatgacattaatatcctccaggatttcaggaacgtggaggatattaattcctcttattttctccatttttctttcttccagtcaggactgcatccgattaatcgtaagcgctccgagaagtacgtagcgtaaggattattttacagctgagaagtttcagtgcagcagttcatgcacacggttcgacggctagtcattgatcttcataattacctcgcgtaaaaaacggggtaaggccgctcatcccagcgtcatctccacaggtaataattcaacgccaatgccagaagagttcgttaacggaagacgccgtgatatacgccctttgatcagcgagagcctgagccatttgaacagaagattatcattgatatcatgctcccgggcaatacgggcaacagaaccccttggttgtaaagccagtgtaaccatttgaagtttaaactcatttgaaaatgacctgcggggttcagctgataatgttttttgttccataacaggtgtccactagttgaaaaggtgggtacctatgttaccaatactggcttaatggctacatacagcagtcggtttacgcatacacttttatagtgcactccggcctcatgaatataacggtggattaccgccgaacgaatcggaaaatagatactggaaaaaaactgaaattgtgaccagtttttgttgaccactacaaataaataaaagagttgcagtgcttgctcggtaagaaaacaatggaagttgagatcctcaaagaagctgtggagtacaccactctacagtagttgcgcaaatttggagtggacgataatgtgatcgtctataagggcaacgctatcatagtcttgtcctggcgggtaaaaaagcgcgcttaccttaacgataagcgcgccgctgttcaggccttgagtggttattcaattcctgtggtgactgtaaaagtgcgcgtttgctgcggtgcaacctgaatcagcgtgccattacgttgcgcggcaagatacccctcaggccgacaggttgcaggtaatgcaaaggcggctacctgttgctctccgttataaaggatccagcgtgtcacataatttagttcagcactgtagaaacgagtaacaaacgtagtgccatcgggagagatcatgcgaaactctggctgatctgtataagcgtccagtttgtctgcaaagaagacaatttctggatcataaaattccggttgactcagcgtcgacagagaggcttctccctgcataatccgttgattaaacgccagccactgagcggtgggattaacatgcgaaggcactgattcacgcaatcttaatatttcgtccgggatattctggctgaatgtagcatttggtatatatgcataattcatgtggcacatatattgtagtggcatatctacagaagccagattggttacggccatcttaatatcgaacagtgtagaggatttgtgaaggaccactgttggttgagccagataatgatgaccgaaacccattacatactcgtaacgcccgttaaggcgtaacatatctccgtctaattccagccatgcttcatccatcgcggcacaggccatttcaccgtgtagcagatgagtatcttccgcagatgggcagccattagccagcaaacctgaatgaaaagcaaaacagccataggtctctatcacctctgtcgccggtttaggctggcgaaacatattgcacatggtgaggccgtgtccatcaaattgcgcatcccaaatcatctgcccatccagggaagaataatcaaatgtccacgactgtttgcaattttaagcccctcgacaccgctgtcatagcgaaaagacgtgacagtaaaatcactattttccagcaagatacgaggtttctcgccaaaaagcgcccgccacaaattaatacgcgtactcataacggttctcctcaggacgctgtgacttcagccagtgcggtacgtactttgctttcacgccagaagtagactccgacatagacaaagcagagcatagaaaccaggaatgaaagctgtagtgagtggaacatatctgcaatatatccctgaattgccggaaccaccgcggcaccgacaatagccataacaatgactgctcctgccatttctgtatgttcgttatcaactgtatccagtgttcctgcatagatcgtcgcccagcaagggccaaacaaaacacttaccaggacggcgacatagaccgcgctgaaacttggagccagtgcaacatatgccaggaacagcgcccctataacggaatagagaatcaatactttttccggattaaaacgcgtcataaggatgttggctataaacttgccaataaagaagcaggcaaagctatagaccatgaagtttgaagcatcacgttcgttgatatcgcccaactccagcgccagacggatggtaaatgaccatactgcgacctgcatacccacataaaggaactgcgccacaataccgcgacgaaagcgcggatttctagccagatagcgcagcgtatccattgctgacgggcgtttatagtgacttgtctgtgccactttacaggttgggaagcgggttaaaaggaacaacaccatgaccacaaccagaatcataatcatatacttatacggttcaagggtgttctctaacatcagcaccttaaagttgtgaatttgctcggcgttcattccggacatctgcttctcaaggctttccccctcggagaaaaccagatatttgcccaataaaataccagacgcagcaccaatcggataaaaggtctggctgatattgagccgcaatgtggcataggcttttggaccgatcattgaactgtatgtgttcgctgcagtttcaaggaaactcaggccaatcgcaatcgcaaaaatagctgcaaggaacatagtgtaggttgccatatgcgaggcagggaaaaaaagtgtacaaccaccaatatacagcgtcaggccaattaaaattgccaccttataactggtctttttaatcacaagggatgctggtattgcaattaaaaaataacctccataaaatgcgctctgcaccaatgctgaagcaaagttacttagcgaaaatacacttttgaattgagtgattaatatgtcatttaatgcagctgcgcatccccatagcgggaataaacacgataacaaaataaactggaacaagggagtcttattcagatacccatcaggcatctgaatgatgtttttatcgttcatagtgctacctttaactgtgcaggatgattattcgtttaaggttaaaaattcattaaattgttcaatactcggataagatgattgcgtacctttccctgtgacgctgaaagcggcaaagagagcggcttttttcaaagcggcttcaacatcaccgctttgaacataataatgggaaaagcaaccaataaatgcgtcaccagcgccactagtatcaacagcatttactttgaatgcaggaacatggacttcctgatcgcgggtcatccataatgcgcctttttcgctcatggtaacaataatattgttcagccctttatcaactaacgaacgtgcggccaaacgaatatgatcataagtatcaaccgacataccggttaatatttccagttctgtttcattcgggataaagaaatcacatttgcaggcataagacatatctaactcacgcaatgccggagccggatttaataacacttcaataccatttttcttaccaaactcaatcgcgtggtaaactgtttccagttgaacttccagttgtaaaacgatcaatttgcattttttcagatcttctgcagctcgatcgatatcttccggggaaagaaatttattcgctcccttaattattaatatactattgctcgagttggcattaacaaagatcggtgcaacaccactgctggtacaggggaccttctcaacataagtggtattaattccccatgattcaagattacgaatagtattatccgcaaaaatatcatcacctactttagtcagcatcaggacttttgaattcaatttagccgccgccaccgcttgattagcacctttcccaccacatccgattttgaaggcaggtgcttccagagtttctccttctttaggcatctgattagtgtaagtaatgagatccaccatattggaaccaataactgcaatgtccatttcactacctcttataaactttcgcataacaatggtatttaaataacattagcatgttacttttgcatcatttgtgactgagatcgcgattagcacatcaacccgatgtttatttaatagacttccagtctcatcactcaggccaacactatctaatcataagcaacctaacaagattagtgcccaaaactcagcagcctatacccttttcatttcaaaggggcggtcgtatagtatggtaatgaaaacaatgtttactaacgccaaaatgttatttttataacattcttacggagagagagttgatggaaacgaagcaaaaagagcgtatccgacgtttgatggaactgcttaagaaaaccgacagaatccatttgaaagacgcagcgcgaatgctggaagtttctgtaatgactattcgtcgcgatctccatcaggaagatgaacctctgccactgaccctactgggtggctatattgtaatggtgaataaacccgcgccatccatgccagtaatccatgacgttccaaaaaatcatcgtgatgacttacctattgcaattctggctgccggaatggttaatgaaaatgatctgatcttctttgataatggccaggagataccactcgttataagcatgatcccggatgcaatcaccttcaccggcatctgttactcacatcgcgtctttgttgcgttgaatgaaaagcctaatgtaacagcaatactttgtggtggtacgtatcgtgccagaagtgatgctttttacgatgccagtaactcttcgccattagactctctcaatccgcgaaaaatatttatttccgccagcggtgtgcataatcactttggcgtcagctggtttaaccctgaagatcttgccactaagcgtaaagcgatgaaccgtggactacggaaaattttgctcgcccgccacgcgttgttcgatgaagtggcctctgccagcctcgcaccgatctctgcatttgacgttctgattagcgatcgtccgttaccggcagattatgttacgcactgccagaatggttctgtaaagatcattacacctgattcagaagacgaatgacttactgaaaaaacaccacaatcttgttaaacatcgtcgggttggactgattacgttgcactttcaccacatattccagcttatctatttggcttatcacctactccagacgctggccatccttgaccagtagccagatatggcttttgtcgcagtcctgaatcggcaggcagagaatgtcttcaacgttaagagcgcgacgggcaaaagcccacaaaggtgagtcattacacccggatggtaaacaggcacttccttgttgtagaagccgttatattgtccataatgtctgggtttttaatgcatactgggtaacaaccggacgaatcttcgaatatcactggcgctgccagccggtttgaattcatctcacaaccctgcatagagcgaatctcctgcctgtacgtcactccactccatggtatcaacttcacactctttatctgcggctagcttcagccaccagataagcatcgactatgaaagatgagccatgacaacataacgttggtaacgctctgacgccttaatggaagatgcctgccaccatagggaatgtaaacgactgaagtgtggcctttaatgccgtgaacggctcatggtctcctggcacggttgccgccccaacctgtaacaacattccacagtacaatgtctgtcagagtcagagcctcccatgcttgttgtagtaactctaccagttacgaacatccttcctcaaaattgttgtcatatctcgcatggaagaaaagatcctggctaaggagcaacacacaacgtattgcggaacttgcatatttttcctgtaactagtgtattaccacatatggtaatagctacctgtgtggtttcgctggatagcaaggggatttattcgcaagtaaaatgcctgataaaatacacgaatctagtaatcatcaatatttactctggtcgaatgacgcgtgaagtggacggccaacagacgcagtcagtgatctacagcctgttgaataaaaccccggatgcttcccccgattctgcaagtaatacttcggttatttgcactattttatccctgttgaatttggttaagccggtgcagacgcgccgggaaacgcacacctgaaccggcacaataaaatacaatacaaccccctgttactggagaaatgtaagcgtcaacggagcaccgtattgacgcttatttattggtgagtactacgttccatggcaggagttcatcaactcggttggaaggccattccggcagtacgctcaggatatggcgcagatacgcttccggatcgataccgttcagacggcaggtgccgatcagcccgtacaacagtgctccacgctcgccgccgtgatcgctgccaaagaacataaagtttttctttccgagacagactgcacgaagcgctctttccgcagcattattatccgcctccgccagaccgtcatcactgtaataacagagggcatcccactgattcagtacatagctgaacgcttcgcccagtctggattttttcgacagcgtaccattcttctccaccatccattcatgcagcgacgtcagtaacactttgcttcgctgctgcctgacggcaagacgctctgactccggtaatccccgtatttcatcctcgatggcgtacagttcactgattcgcttcagggcttcttctgccgtcgcacttttgctgctgatgtatacatcgtggatttttcgccgggcatgggcccagcacgcaacttctgtcagtgcaccaccttcacgttctgcactgaacaacctgtcgtaacctgtgaacgcatccgcctgcaggataccccggaaggggcggaggtgttgctccgggtgtttcccctgccggttcggcgagtacgcgaaccagaccgctggaggagatgacgaacccacattgcgatcatcccggacatacgtccagatacgccctgttttcgcctttttctgacccggtgccagtacctttaccggtgtgtcatcagtgtgaatcttgcgggtgttcattacataacggtacagggcatcattcaccggtgtcattaactggcagcacgcgtcaacccagttggagagtaaggcccggctcagttcgacaccctggcgggcaaagatttcactctgacgatacagtggcagatgttcgcagtattttcccgttaacacgcgggcaagtaatccggggcccgcgataccacgctctatcgggcgggacggcgccggtgcttcaacaatacagtcacattttgtacaggctttttttacccgttctgtgcggatcactttcagggcactgctcaccagttccagctgttcagcgctgacttcccccagataatccagcttaccgccacactccgggcaacagctttcttctggctccaggcggtgtatttcacggggaaggtgtgccggtaacggacgacgatggcgcgactgtcgcaactggcggggaacctgaggatcgtcttcccgcccactgtaacgatcgctgtcctgttcacgttgtttcagcagagcctcagccagttcaacttcacgacgcagtttttcagaacgggtaccgaacagcatccggcgcagtttttctatctgagcccgcagatgttctatttcccgttcatcttcttcgatcttttcttcggcacgtgtcagtgcagagcgcaggaaggcttccgtctcttcaaccagactcagttgctggtctttctgacggagggcttcagcctgctcagagagcaacctttccagctctgcgatgcgaatgaggtatttctgactcatgaccgtttttataatgcggtcaggagttttttacaacattgtcagtgagttacggctggatgtttttggctgacgccagtccagcttatcgaggagcattgccagttgcgagcgggtaatggataccttgccgtcacgtaccgcaggccagataaactggccttcctccaggcgtttggtgaacaggcacagaccatcagcatcagcccaaagaattttracggtgtcaccccgtcggccacggaagataaacaggtgaccggagaagggattatcattcagcacatgttgtacctgttctcccagtccgttgaaggatttacgcatatcggtaacgccggcaacgagccagatacgggtacctgatgggagtgagatcatcttcccctcccggtcagttcacggatcaacactgtgagcagctctggcgatggattttccagcgtcatgttaccgtgacggaattccaccttgcaggaactggcactgactctggtctgagtggaagtggataaagacggcgcaatggccgccacaggttctttctgctcatccggcgttatttctacaggtaataattcaacgccagtgtcagaagaggtcgttaccggaagacgccgcgaaacacgcccttcgttctgccagagcctgagccatttgaaaataacattatcattgacgccattttcacgtgcaatctgtgcaacacaagctccaggttgtgatgccagttccaccatacgaagtttgaattcattcgaatagtttttacgaggttcttttcgccagtcctgtaattccatacttagatgtccgtctatatcagatgggcgtctaagttaccaattctcgtctgatggctacatacggcggtcagtttacgcttacggagaaatgcctgcgccggggtccgatatggcagtattgttgcagcctgcggcatggctcaggggatggatttgatgggcaatatggctccgtttattctgcgtggtgtcacgctgaaagggattgatagcgtcatgttcgcgaaagagaaaagagcagcaatctggcaacaggcgatatagtatttgccagagtccagaatggatagtctcactaccgtttatccgctcagtgacgccatcactgtggctgaaaaacttctgagtggcggaattcgcggtcgtgcagtcattcaatatagctaattagatggatgccgagctcaggcttagtataataagttttaggggctgcggccccttttactggccagttgttgcttcctgagaagactgatagcgtaccgaggttttgaaatagctccagaagtcgtacactggctcagtagaacaatatagtttggaacgcattaccgcaccttcccagccactccagaaaatagccgccagttgtgtattattcatatttgaacttatttcgcctgaagataacgcgtcggacaggcaggccgcaacaagtgcctgccagctctcaagaatattctgtagtactttaatgaaggattggggaagctccggactctcctgcatcatatttccaaccaggcagccgcgggtaaaattgtattttttaatcccctcacaggcatcattgatgaaattttccagacgtaccattggtgtgcaggatgattcatgtagatgttttttgagtttatgctcgaagaaactgtcataggcgttcagaacggtctgagcataatcctctttactcttaaagtagtaataaaatgagcctttagggacattggcatttttaacaatggcatcgactcccgtcgcaagaaaaccattctgcgtcagcagttcaaggccactgcggatcagatcattacgagtatctgcataggtactttctgtctttcgcggccttccccggccacgattttcgcctgtcatgacccatctcctacattttattgtcaaaagaataagtgattttgcgcgagagcttcaatcagtttatccccgcagtggcaaagtgttcgcttttgccgactggacagtggcagtgcctgtcgctactgcgccatcgctgaacagtgcagaattagcaacgtttgcttttgacacaaagcatacgcccattctcacgcgaatgctttgcccttgacttgccaacaaccgaattgcttgctctgcagctatgtttttttattagaatattcgccactaaataaattataataagttgattttattagatatctatcagaatctatatggtcagcacgagttgcatgctctaatgtttcaaatgccagggtatgtgcggcttcagcaaatatctcaggccaacctttactcagcatcgacagtcctttaaggactcttatctgaatctccctcatactggcaccatcgcgcgcgacaggtgagaaaaagtcttccagtagatcgttattctgaagtggtgcaacatgtactgaaggatatttcacttctatttcatcagatttattctgcgcgtaagtggaaagtatacgaacacctctgccaatgacatcaatggcggttccaggatcgttcactgcaggggaaagggcccggcaggctatttcggccatgacgctaagacaaaatcgaggatcctgagcaaatgaacgtgcatccgagacaataatcgtctcaagtaaatcggtgttgattgacgactcctggccctgactcaggtacaaaactggcatggacggatgtatgaaactgcctggctgcgccacgaggtatacatgacggggatcattggtcagcagcttgctaagtttcaccatatcaatatattcaacatagccaatcttcttcggataaactgcaaccgttcctttcggctgttcattgttctcaagccatggatatccgccgagacagggatttcttgctctcgcaataaatgtttcgatggccgcctgttctacttgtgccgttgtctcaccaaccctccccagagaggtcaaatgctgtatccagcgaagcaatgtgatgaggattaaggcaatgacaaccagtgtgacaatgaataaaatgactctccccctttctccataagctcccatattgagggcaataatccctaccagactgaagagaaaagaaccgatgaaggtggccagtacattttgtgtggtgacgtcttcaacaactaaacgcgtagctctgggagtcacattagtagtggctgaaccgtaggctgtgaccatgatactcagcgaaaatgtggtcactgccagcatactcgatgccagtatgttcagaatgttatcgactgcttccgcaccaaccttcacggaaaccgactcaggtatcattgatttaaaaagaattgataaaagggccgttattatcgcgacaattgcgaataacgttgccctgaaccatagttttttaattgtctgcttcagcatccatttccagcgtgaaatcattctgcattccctcatattgcggccgggataataattgccgcccccaggacggcatgttgctattaacgaaccaggtgcaggaagtgcaggtgtttttcgtactggtccagtatgtcattaatcagctgttcctggttccagcccatcacatcataattttgaccgccttctttgagataaacctcagcgcgataatatcgatgttgttcagtctgctgctcatcattatccattgcggcgagcgcgaaggtcggtgagatatacccgcgaagcctcacttcatatataaaattcagctcgttgcccaaatcgacttcaagacgaatacgatcgtcgactgcatcactaatgtggcttatcgtcccctgcttgttcagttcctcctgaaccagcgtcatggcgggctggataacgtcgtccataaaacgtttcacaagagatcgcttcggcagatacgcgatattgcgtaaccttctctgccaaggaattgggttacgtgcagccgtaggagcaattgtcgccatgctcaggctttcacgcttggtcaaatcccggcgcaaagcttttaaaagtccgtatatagatattagtaagatcactgagaagggcaatgcactcgctattgtcaccgtttgcagcgcacttagccctccggcaaggagaagcgcaattgcaacaatgcccatgagcgaggcccagaatattcgctgccagacgggtgtgtttgccactccacctgatgccagagtatccacaaccattgcccccgaatcagcagacgttacaaagaagacgatgaccatcgccattgcaatgaatgacagcacagaagagaacgggaaatgctccaggaaattaaacagggccagcgccacatcctgctgaacagtattggcgaggtctgtggccccctggttcataatgagatagatcgcgctgttaccaaacaccgtcatccacattagcgtaaaacccgcgggaacaaacagcacgccggtgacaaactcgcgaatggttcgcccgcgggagacccgtgcgatgaacatccccacaaacggcgaccatgaaagccaccatccccagtacagtaatgtccagccccccagccagttgctcgacttgggctcatacgcgtaaaggttgaacgttttactcaccagttccgaaagataaccgcccgtattttccacaaatgacttcagcagaagcacggttggtcccagacacaggaccagcgccaggagcaacaaagccagacccagattgagttcagacaggatacgtattcccttatccagaccggacaccactgaaatcgtcgctaatcccgtgatgaccacgatcagaattacctgcaccgtttcattgatgggcaccccgaaaagatggttcaaaccggcattcacctgcaaaacaccgtaacccagtgatgtcgcaacgccaaagaccgtgcctataacagcgaaaatatcaaccgcatgtcctacaggtccgtatatgcgatcgccaataatgggatagagtgcggagcgcagagttaaaggcagaccgtgacggtaactgaagaacgccagaatcagcgccacaatggcataaattgcccatgcgtgcagtccccagtggaaaaaggtcagacgcattgcttccttagctgccgcaacggtttctggagtgccaacgggtggcgaaagataatgcattacaggttcggcaacgccaaagaacatcaggccgatccccatccctgccgaaaaaagcatcgcaaaccaggagtggtagctgaaatcaggctgcgcatggtccgggcccagcttgatatcaccgtagcgtgagagtccaaggaacgtgacactcagtaaaatcagggccacagcaaggatgtagaaccagctggcattcgtgaagatttgttgctgaagtagtttaaaatttttgtcggcgacatccgggaatacggcggcaaaggcgacaagaaggaaaattagcaaagcagatgtaaagaataccgctttgttaatctgacttgtagacttctttgggattgtatcattttcactcataatcatttattccattaattaaattcgcactggatagaaggtactacctctcacaaagtagcaaagttcaactggctatgcggcgttaatcgtaatgcatggtggaatgttgaggtgtactggcaatagcggacactaccatttgttctttttttaagcagtcatctgatgatatttttccctgaaggctgccggggagatattccccagacgagagtgacgacgctgacgattgtagaaaatctcaatgtattcccgtattactgagatggcttcatcccggttattaaaacgatagtagctcaggctctcatttttcagcgttccccagaagctttccatcggagcgttgtcgtaacagttacctttacgcgacattgatgttttcagaccaaactgctcctgtatgacccggtaatcgtatgcgcagtactgtgaacctcgatcagagtggtggattagcccggcaggtgggcgctggctcctgagcgccataaacagggctttacctgtcagctcttttgtcatgcgctctcccatggcgtagcgacaatttcgcacgtataaacatctttgatgccagcgaggtacaaccatccctcctgtgtggcaacatacgtcaggtccgccacccagacctgatttggtgctgtaggagcgaacgtctggttcagcagatttggcgcaactggcagattgtggttcgagttcgtagtcgctctgaacttgcgtttctgcttacagcgtagccttagctccttacgaagacgtgccagtcggtcacgaccaacgatgatgccattctctgccagctccgtctggagccgccgggttccatatgtttcgcgagtgcggatatgtgccaccttaatctccagttttagccgctcatcactttgttttctgtctgagggttcatgctgtacccagttgtaataaccgctcctggatacaccaaatacctgacacatcgcttcaatgggaaattgttgtcgccattgttcgattaacgcgtatttttcagcgactcctgtgcaatttaatatatctcgctcaaggcgagcttcatttaacgccttacgcagttgcagaatttcagattccagttcagccaccgtgcgggaaccaggagtaccgagcccttttctggcggcggtaacccattgtcctaaagtgccttcaggaagagataatcgggaagcgccttcactgatcgaaagttgattttcaagaaccgttctgacagcttcggctttgaactctttagagtaacgttgggtttttctgctcattattagctccttctgatgccattctatttcaggaaggagtgtccgttaaactcaggctacctcattggttcccactacttatttggtggacaccactttgtctaattcgtcagattctgaccagacggttcaggctgtacgcttacaaacaactagtggaaatacttgtactttataatttcaagggtacgggtccgcttcgtttgatttgcgtgtttttaacaattttaaaacccagacatactgttccggatgtggccccaccaaaatttccactgttttgttcatttgtcgggcaatcgttttattgtccgcgctggcaatgcaagcatccattggtggccgaatttcaatagtcagtagatgtttttttcatcataaaccgggaaaagtggtataatcatagcctgactgatgttcatcagacgtccaatgattggtaatgtcgctttataggtcgcaaaaaatcagcaaattcactgtattcaggaccatgatcctgatctgggaggtaatatccccagtatccctggcgtactgactgaataaatggttttatcccatcctcccgggcatgtaagcgccccccgaatttacgccgtactgaattccagacataatcaatcactggatttcgttgctgatgaaacatggcggccattttttttccctgagctgccagcaacattgcaggaatatccacgctccagccatggggaaccagaaaaatcacatttctattattgtgtcgaatttcctcaagaatttcgaggcctttccagaacactcgtttctggaacttttccggaccacgaattgccagttctgccatcaacactatggattgcaatgctgtggcaaacattttgtcgacaattatttcccgttctgtatcactcttttctgggaaacaaagcgataaattaatcgtcgccctgcgacgagcttttttgctcaatctgcccgcccaacgccctatttttgccaagacaggatctctgaataaagggggaaacattgaaatacctgcaatcattcccaaaaggaaccatgtagaccagtaaacaggggaaaggtaatttttcttaaattcaggaataaactcagatttatattttttcattatttagtgcgaatgcctctaccaaaattatcattactgttttattcagagaatacatcaaaccttaatttaaattctgatgttctgagtgtacaggatatgcatccaaagagcggatagtagtttcatggatataatccagcaaagcgtatcgttttcggtactcagagcgttttttactggctatatcgcttagcggctttcgaatcacctgggttggtaatctgtaccagtcaccacaggtttttcctgctacagactcccagaaatcactatagaccgcaacaaaggttttgcgtttctgataccagtatctcaattgccggaaaacatgactgtgctcactgactgccagacactcagagatattgcaagctttcatcaacgcacaaaatgcttcaaaaataatccgttttgggaaaatcccataacaggcccgggttgcgcaccgaataacatcaggtccggtatttttaggggctccctgtaatccgccaataaaagcaatgtgtccattttgagtcagaatgactgaaaatgttaaccgggcaataactgttttattgtaaaacaatgacaacatcaactctccttcccggtcaaaaccactgggagaacactggatatcaaaattctctccatctttcccgatgaattggactaatgataccgatttttgtggaaacaaaaatttagaatatttttctggcaaattttgcacaaagcgataatgctcaagaatatattgtccacgggtccaggcgcgcccccctttatgcaaataagggcgatgaattcttgctggcaacgtggggtgtattgccagaatatcctcaatgcacggcaaggaacgcagttcataataatatcgaatactgacaaccggatttatagaacatcgcaaaatgtacatgaaccgaaattttctgtgttcccacttccccggtagtgaatctgaggaacaaataatccttttaaggaaaccgataaatgataagttacttatagaaaacatattgttacttttgcttcgctaatgtgagtatttttaacgcagttttattaatatcaaaccgctcttctatatcctgttttgccaggcgagccatctgataaaaacgcccagggtcattaaaaaaatcattcagggcgcacatccatgcgtgcttattacctgctggtaacaatgtcccggtctggttgttctgaataacctcagggattccaccaatctgagtggccactacaggcacagaaaatgccgatgcttctgccagcaccataccaaaagattcgttttctgaaggcagaaccaccagactggcaacccgatatacgggggcggcaggaaaaacattgtcagcaataaaaacatcatcatgcatgcccatactgtcaatctgatactgtaaatgttcccgcagttcaggtgaaccagaccccacaatcaaccaacagaactgtcgtccattcatttttaaatggaacagtaaattcaacataaattcgtgccctttttccgggcgcaacattcctacctgagcaattacggggcatcctcttcgggacgccagccaggaaagaacactcggaggcaaactgtttcgggaatcaacgtataattcctggaaatcaaagccaggaggcacaacagtaacccgagttcgacatccttcctgctccagatgtgtcttcatatttgttccgggaacaatcacctcatcgcaaaaatgatttattgaaaaaaattttgtttttcgtgtcaaatatgtcttttgcctgataattctgaatggatgtttccaggtaaaaaaccgtaccaaaccaacaatattactatcatgtccactgtgacaaacgattgcatcgggctgaaaactatgaactattccgagtaatctccatacagtaggaatgtgaagactgtttcgaaataacgcgaatgtgatatcaattccaaacttactggcttcaaaagcaattttgctgttctccctgcagacaagcagaactgaatgccccatttcttcagggccttcatttgagcaacagcctgtaattcctgaccacctatattcggtgatgattccgtaaatagtatattcattattagtcatccggtaatcttggccccttatgaagggccagcaacgatgaaaaaaacggtgttgtataataaaaaagtcgtcttttcagccatacgcaattttcccgttccttggtgcttattcttcctatccgtgtagttcctttagcaggagcattcattcttctttctgttgtatataaataatggaatccaagttcttcagcgatctgaatataatccttgttataataaccttccggccaacacaaatgtttactgcattttcctgtcatttttttaaatattctctcccgctcaataagtcctgccgaagatgtttacactgttcttctcgtgaagtgaactttttatcccaacgtgtatgagtatgtgtatgaacatgaaattcgaccagaccagattgcaacatttcgttcacttcagaccagcgaagcataacattatcagcattcccggttgctatttgatgttcgcaatcgcgatgagaatattcctttccaggagagtgacgaaccggaccatttccaataaaactggtaattaaaaaaatatgtgccttgagattaaactcgtttaataaaggatatacctgaaaccagttgtcaaggtatccatcatcaaatgtcaacataacgcttttacggggaagttttccgccccgataaaaaaactccagttcatctgatgacagtgttttccagttgttttcagccaaccatttcatttgtttccggaatgtctcgggagaaagtgtaaccagtcctgggcaatggctgacatgatgatacattaataccggaacatgatttgctttaaacaaaatgccccctccgtttaaaatttaaagtttctggcacccagtaagtagagataaaaggaaagcctaataaaggtggtgaactttatatactactaaatcaaacatcaacaatttataaacaataatatattatcatatcttttaaaaacggctcactaagaaccttgaggtggcacactaaatttagctacctgaacagaggtgatatgctcacctcagaacaacacaggtgccataatgaaaaaagaaatttcagcgcagagtttaaacgcgaatccgctcaactggtcgttgaccagaaatacaccgtggcagatgcagccagcgctatggatgtcggcctttccacaatgacgcgatgggtgaaacaattacgtgatgagcggcagggaaaaacaccaaaagcctcccccattaccccggaacaaattgaaatccgtgagctcaggaaaaagctacaacgtattgaaatggaaaatgaaatattaaaaaggctaccgcgctcttgatgtcagactccctgaacagttttcgataatcgggaaactcagggcgcgttatcctgtggccactctctgccatgtgttcggggtccatcgcagcagctacaaatactggaaaaaccgtcctgaaaaaccagacggcagacgggctgtattacgcagccaggtacttgaactgcatggcatcagccacggctctgccggagcaagaagcatcgccacaatggcaacccagagaggctaccagatggggcgctggcttgctggcagactcatgaaagagctggggctggtcagttgccagcagccgactcaccggtataagcgtggcggtcatgagcacgttgctatcccgaatcatcttgagcgacagttcgccgtaacggaaccaaatcaggtgtggtgcggtgatgtgacctatagtgtgcccggagttcagggcgggcatggatgcttaaatgaaccgcgagtctgtctggaatattgaaccggtaactcacgatgagaaacccaacaatcccaccgggtgtgacggtggagaacctgagcggcagtgacctgcggcatgcccgcagggtgatgtaacccgctgacaacggggattgaggcgagatcactaagcgagatgatcctcaaggttaagtactgaaaggctgaagaacatgaacccgttaatccgcctctgtgggttgaaaacgtcaccacggcctacgtgatctgacaggccgtgcaggaggaactggcagtgatacgtaagcactgccggtcgaaggtgttttgacatgtatgcgaaacaccgggncagcagcgtctatcacacttgcgttgctgacttctgccaacttgcggcaagcaaggataaagagtgcgacgggcagcctcctcagtatgcctgagtccaggcaggtaaaccggggaaggtcagcgacggatgttaagggggcatggctccgatgacgcgctggctggcggagcttccgtagtagtccgcgatggggaaagcccattacatggcgaagggaagcagtttgaatgtgtttgcgacgtgaattaactgacctaacgaggtgaagacctttgataatcagcgaaatgcaacgcaagcttgccacatgggcagccaccgatccgtccctacggattcaacggctgctgcgtctgataacacaaccagaatggctggctgaagcggcgcggatcacgctttcatcaaagggggcccatacccccggcgttgatggcgtgaacaaaacaatgctacaggccagactggctgttgagctgcaaatcctcagggatgaattactctcaggccactaccagcccttgcccgccagacgggtttacatccctaaaagcaacggcaaactgcgaccactgggtatccccgcgttgcgggatcgtattgttcagcgggccatgctgatggcgatggagccgatatgggagagtgattttcatacgctctcatatggcttccggcctgagcgcagtgtccaccacgcgatccgcacggtgaaattacagctcacagactgtggtgaaacccggggacgctgggtgattgaaggcgacctgtccagttacttcgacaccgtacatcatcgactgctgatgaaggttgtacgccgcaggatcagtgacgcacgtttcatgactctgctgtggaaaaccatcaaggcgggacatatcgatgtcggtctctttcgggcggccagtgaaggtgtgccacagggcggtgttatatcgccgctattatcgaacatcatgctgaatgagttcgatcaatacctgcatgagcgctacctgagcgggaaagccagaaaagatcggtggtactggaataacagtatccaacggggccgaagtacggcggtcagagaaaactggcagtggaaacccgcggtggcgtactgccgctatgccgatgattttgtcctcatcgtcaaaggcaccaaagcacaggcggaagccatcagggaggagtgtcggggtgtgctcgaaggcagtctgaaactcaggctgaacatggataagactaaaatcacccatgttaatgacggctttatctttctggggcacaggatcattcgcaaacgcagtcgttatggcgagatgcgagtggtctcaacgatcccgcaggagaaagccagaaacttcgccgcatcgctgacagcactgttatcaggcaactacagtgaaagcaaagtcgatatggctgaacaactcaaccgaaaactgaaaggctgggccatgttctatcagttcgttgattttaaggccaaagtcttcagttatatcgaccgtgtcgtgttctggaagctggctcactggctggcccgcaaataccgtacaggtatcgcttccctgatgaggtggtggtgtaaatcaccgaaaccgggtcagagcaaaacgtgggttttatttggtaaaaccaatcacggcaagctcagcggcgaaatactgtaccggttggtggggcaaggcaagaagctgttccgctggcggctacccgaaggtaatccctatctgaggacggagaccagaaacacgtatacatcgcgctttacagaagtggcaatggcgttcgccagcatttaaatggagagccggatgcgctgaaaggtgcacgtccggttcggggaggagaggcagggaaatagtccgactacgccctgcctcttactctactctggacgggtaagcgctgggcgtacctcgccgttgttctcgacctgttcgcaagaaaaccagtgggctgggccatctcgttctcgccggacagcaggcttaccatgaaagcactggaaatggcatgggaaacccgtggtaagcccgtcggggtgatgttccaagcgatcaaggcagtcattatacgagcaggcagttccggcagttactgtggcgataccagatcagacagagtatgagccggcgtggaaactgctgggataacagcccaatggagcgcttcttcaggagtctgaagaactaatgggtgccagcgacgggctatgtaagcttcagcgatgcagctcacgcaataacggactatatcgttggatattacagcgcactaagaccgcacgaatataatggtgggttaccaccaaacgaatcagaaaaccgatactggaaaaactctaacgcggaggctagttttagttgaccacaacagactacctgaagggagccgcggtcgcctagcagttgcagtagcaggagatcatccagccgcagtacaggtcacgatgactctggttaatgataccggctttgaccccgtattttccggctctatcgctgaatcatggcgtcagcagccgtgcacaccatcctattgttgtgactgggaggctgccaccatgcttcgcgctttccctctggcgaaaaagggagaaggacgggcccgtctgccttcactttatgccagcttcggtaagctgggtgagacaccgactcatgaagatatcattgataacaatcgatccatcaactggcctgtataacgtggctgccggtgattaagaaagctgcacctacctaagtagtagcaaacgcacactttttagaaaaatcgatggtcagaaactggattagcaattccgttccagggttgcttttgatttacgttggcgtctgatcattgatttatcctcaaaagcccaacctcattggtaatgaaccagctccgtgaatgtccgctctggcacagagcgaaattttttgatctccccccctgaaatctaaacttagtcatgtcacgtttttgggtttctaaaattttaacttcgcgtttttcgttgccgtaagggttatacagaaatgtccgttaagcagagttcaaaattgattgccgtgatcacgactggtttgaaagccgcgcccaagcctgtacagctctggtttgcgttgattatgaacctgtcagcctaaagcaagcggatggacgatgagtattggtaatctttcagagtccggaaaagttcagccccagtctgaacaggcttgctggcgccagtccagtttcattcagtcgtggtttggttcttacggcctgtgcaatctacctcattaggcacatcggcctgccagataccggctcggggtgtatttccgcttccacgctgaatactgttctcagcaatcctggggtcatcacctcttctggtgtgccttgcgccataacatgtccgtttgccattaccaccagttgatcgcagtaccggctagcctgattaaggtcgtgcagcacagcgaccaccgttttcccctgagtccggagttcgcccatcaaccgcatcaggtccacctggtgattgatatcaagataggtggttggctcatcaagtaatacaacgggcgtattctgggccaggaccatcgccagaaatgcgcgctggcgctgaccgccggaaagctcggttaaccgacgaacggcaagatgattgatccgggtctggttcatggcgacattaactcgtgcattgtcttcagcggagagacgcccccagagtgacagccagggattacgaccatacgaaaccagctcctggactgtgatcccctctggcgttaaatggtgctgaggcagcagcgaaagcctgcgggccaactggcgtgatgagagcatatttatgggattatcgccgagaaatacggtgccagactgcggcattaaaagccgcgaaaaacagtttaacagcgtcgatttcccgcaaccgttagggccgatcagggcggtgatcttccccgttggcagtgagagtgaaacgtcgttaagtaccttgtctgtcccgtaactgaccgtcagattttcagttcgtaaagtcatttatcgcattctcacaagcaaccagacaaaccacggcgcaccgataatggcggtcagcacgccaaccgggagctccagtgggggatgaataattctcgccagcagatcggcaaccaccaacagcaacgcacctgtcagggctgaaacaggcagcagtctgcggtgacgtccaccggtgatgctacgcatcatatgcggcaccacgagaccaataaagctaatcgggccgcaggcggccacgccggtagatgtcatggcgacagctagtaacaaagcccagaatcgggtatggggcaccgacacaccgagcgtggtggcgcgcgcatcgccgagtgcaaggaggtcgagatcgcggcaaaaactcaggctcagcggcagaaataaaatcatcagcgggatggcaatcttcacaaagctccagtcacggccccataagctgccggtcagccacagcagggcgttgttcacatcctgcgggcgcgagagcatcagataatccgtcaggctggcccagcatgcagaaagcgccacgccggtgagcgccagcttcatcggctggtgggtctttgccagcatcttcagtaatatcaaccccgccatgccgcccgcaaaggccagcagcggcagcaccatcacgggcagtgacggcataagaagtagagcccccacagaggccaggctggcggcatggttaacgccgagaatatccggtgatgccagagggttgcgcacaatcccctgtatcagcacgcccgccacggcgagggctgcaccgacaaacagtgccagcagcaagcgcggcagtcggtactccatcaatacataataatgctcgcgtccggcctgccagtcggtcagcagcgcgcgccacggcacggggatcactcccatatggagtgataacagcgcacagcccgccagggcaagggtgatgaaaataaccagcgcaattttcatcctcgcctcctcacaagccagacaaagcaagggctgccaatcagcgccagcactgcgcctgcgggcagatctccggggaaggccagcgcgcgtgcgagtacatctgccagcagcatcagcgtggcccccagcagcatgctcactggcagtacgttgcgctgatcgaagcctgcccagaagcgcgccagatgtggcaccagcagaccgataaacgccaccggacctgccacgctgacgcacgcaccaaccagaagcagcactaacatattgatgaccaaacgtagcctcgtcaggttcactcccagcgtatgggcggtgctgtcgctgaggttgagcaggttcagttgattcgccagcagtaacacgacagggactgcagtgaccaccaccggcaagagctgccagacatcctgccagcgggcgtgggacactccgcctgccagccagtaaaagatgccgtaagcatgatcttcggccagcagcagggtgatgcgggtaaggcccatacaaaaggccgacagcgcgatacccgcgaggatcagtttgtttctgtcatgggtatgacgaaatccgcctcctgcggtcatgaccagcagccagctcacgccgcccccgcatgccgcgatgaacgacagagaatagcctgcaatcggcgtcggactcagcgcgctggtaagcgccatagccagcgccgcgccgctgttaatgccgagcagtgaaggagaggccattgggttgtgggtcagggtttgcagcagcgtgcccgcgagcgccaggcttgcgccgatcagaacggcgaccaggcttcgtggcaaacgaaggttttgcaccagcgcttctggtagcgttggcgtgtgtccaggcagcagggcgcgggttgcatctgctccggaaacaggaatggccgagtagcaaaacagactcagccagaaaataataataagtgctgcaacgggaagcccccacagcagcatcgggtgttttatcgcggtcatttcacaacggtaagcggctgatggtggaagatttttaccgtgtcagcggcaatacgctctgcagcaaaaataccgcgcatccgcgcccaggtgttactgtcgaccgaagcaacctgctgcttctgcgcggcggttaacatctgccagagcggatcttgttgccagcgtttaacaatgctctcttcgcgatagtgggcaaccagcagccaggcaggattgaccgccagcagttgctccaggccgatggacggcatggacgaacccgccatcgcagcgggaacgttcagccccagagaggccagcacgctgccggtccaggtctcctgagtatgcaggttgaattgctgttcgcgtgatgtgccaaaggccacgcgtgtccctttgggaagctggctggcccactgcgccatcctctctttatgttgttccagacgtgcctgcatctctcgctttttacccaccatttcgccgatgatagccgcagattgcaaattttcagcgtaggtttcgttgcgggacttaagcagcagtaccggcgcgatttgctgcaaggcgatgtaaacccccgcatggcgactgctgtcggcaatgatcaggtctggtttcagagcggcaatggcttccaggctcggctgcgcgcgcgttccgacggactgccacggtttcaggtgcgcacgcacttcgggcaggatgcgttttgcatcgttatcgtcggcaataccgatcgggctgacgtccacggcggccagcgcatcggcgaacgagagttccagcaccacaatccgttgtggcgttttttcgagtgtaaacgtgccgtgttcgtcctgaaccatggcggcaaaggcgtggctgatcaccagcagcaggcctgcaaaaagaaaacggataaatgccaacataatcacattccagctaaaagcccggcaagccgggcgttaacacatcagaacttcaacgacccctgcatatacagcgtgcgcggctggcctgcatagatgcctttgttgttgtcgtcataagagcggatgaagtagtcctggtcgaagatgtttttcacaccgaatgccaggttcagatctgccatctgcgggccaaagtcatacgccacgcgtgcgccccagagcatgaagccgggaatgcggccggtactgccgtcggcgctctctttcaccgtattggcgttatccgcaaactggctggactggaaatcgctgttcagattgaacgtccagtttcctggcttgtagtccacgcccagcgtgcctttatgtttcggggagaatggtaccagattgccgtaggtgtcgcctttctcgcggatttccgcgttcacatacgcatagctggcgtagatggaaacgttatcaagcgttggcgttagcgtacccagatcgtaacgtgcctgcgtttccagcccggtatggcgcgttttgccacgtgcagtgacggtgtcgttggtctggttggagtcgtactgattgttaaagttaatcaggaacagccccatttccgccgtcagcgcgccgtcgtcgtagcgggtaccgagttcccaggttcgcgctttttccggttccacattgccgctttgcacagccttgccaatctggctgtactgtacggtgccgaacgagccttcagtgtttgcataaagattccagctgtcagtcaggtgatagagcacgttcaacgccggaagcggtgcgttatagctcacttcttcgtgcgtgcctgtgatggcgttgttctggtatgactcgatatgttcgaaacgcatacccggcgtgatggtccagttgccgatgtcgattttgtcatccagataccaggcgtgtgcctcggtgccggaacgcgtatcgcggtcgtaagggcttgagccggacggcaactgcccgctgctggtggcggtgtagtaacgcatttcatgcgttgattcattcacatagcgatagcccacgcccacttcgtgcgcggaagggccgatcataaagatctggctgtagcgtggctcaataccgcgcacccagtagttacgcggcgagagggtgatgcgtttgccttgctccaggtagccgctgcgcagggtttgggtgtagaacccctgaatgttgaatttatgctggctgtctggctggaactggtagcccaggctcgccagcttgcgacgaccccagaagcggtcatacgggcgggtggattgccagcgatcggcgtcgtaatccgcgcgagacaggccaccgggcatgtcggcttcaccgtcgtaatattgcagcaggctgttgaaggtgtgcacctcatccggcgcatatttgcttttcagcatcaggtcgtcgatgcgggtggcgctgtgctcgcgccagtcactgccgcgcgtgccggagtagagcagcgcggtgccaaaaccgttgtccgctgtgccgcccaccatcaggttgtgcgtctctttcgggttgttttgtgaagaggttgggctgagctgaccttccacgcccgcctcgataccaaagtcctgcggaatggcacgggtaacaaagttcaccacgccgcccacgctctgcggtccgtaacgcaccgcaccaccaccgcgtaccacgtcaatggcatccatgttgccgagcgaaatgggagccagtgaaagctgcggctgaccgtaaggggcgaaggggacggggatgcgtccatcaggacggtcgagcggctggcgaggcgcgggttcaggccccggatgccaaagttcatcgccaggtcgtggctgccggtgccgttgttttccggcgcgctgacgccagggatgcggttaagtacctcacgcatggtggttgcgccggttttggcgaaatcctcacggcggatcacgtcacgcgcgccagcatgttcaaatacgtcgttttcacgcgcatcacccagccagtcgccgaccacggtcagggcatcttcttttggtgcgggcgcgggctccagcgtccagctgttatttcccagcggttttacctgcagtccgctgccgtccagcagttgttgcaggccgctctcgacgtcgtaatcgccgtgcaggccgttgctctgcttgtcgcgcgtcaggctggcgtcaaccgagagggtaaatccgctgtgtgcggcatactgattgagcgctttatcgagcgatcccggtgcgatattaacctgtgcagcaaaagcggaaaacgagagaccggccagcggcagcaggctcaggcgaatggcgttaaccaaaggtgttgttttacgaaaaacgcgtaacggcgtcataccttccccatcatcatttttgttgtgttcagctatgagtcgaacgagaagggtaaaaaggacaatcgaaataagaattattttccttacagtggtgaaatgtttatccagtaccgcgtaatagactgaattttaacgggaagcgtttgcgcgataacgttcaggatcgcatcggtatttttcagcgggaacgtcccgctcaggcgcagcccggcaacggcgggatcgcagcgcagcacgccgttgcggtaacgggttagcgtggctatcacctcacccagcggtttatcgctgaagctcaggatgtccttcgtccagcttgtactctcgtcatccagcggtttcactgcgccaaactcagaggcgctgaactgcaggctttcaccagcgttcacgatgcgtttttgcgcgggggcactggcgagaagcacttccacagcgtgctgctgaacgtcaagctgcgtgaaattatcctgctggcggacggtaaattctgtccctaaagcagtgagctggccctgacgggtcaggacacggaaggggcgttgcagggcatctttcgcggtagtaatggcgatttcaccgtaccagagccggacggtgcgctgatgcgcatcaaaacgcacatccgccgcgctttgggtattcagcgtgagcagggagccatcttccagttgctgacggctgactgtgcctttggcggtgcggtaatctgccgcagaccttcgccggtttccgactgccagagctgccagcctccgccagcgccgagcaacagcagtaatcctttcatcacgtgacggcgggtgaggcgggtatcgtgcaacgcccggctggcaacgtcgccaggcacaccgccaagctggttgcgcaggttttcaacctgctgccaggcccactggttatcctgatcctgttcataccactgttgccagcgcgcttcctgttgtgggctgacgcgctcgccgcttagcacggcataccagtgggaagctgaacgcagcgcctgacggcgggaatcggttaacaaaggattcataacccatactccagacggaacagcaggcagtgctcgacggctttcgccacgtattttttcacggagctgatggaaacaccgagtttgtgcgcaatctcgctgtatgtcagaccatccagttgcgaaagcagaaacgcttcacgtgttttgccgtttagcccgtccagcatgctgtcgaggagttgtagggtctcgagttggctttcgcgttcctcaggtgaaggcgctcccccctccggcataagcgccagcatctccagatacgctttttccagcgcgtttcggcgaaacaggtccaccatcacgcgtttggcgatagtgcagaggaaggagcgaggatcgcggatcgtcgagagcgtttcgctgaccattacccgcaaaaaagtgtcctgggcaatgtcatctgcatcaaaagcagactggagtttgcgcgtcagccagcttttcaaccagccgtgatgtgtgccataaagcgactcgaacgttaaggaagctgtggtagtggcgcggtcagacatgcggagtgcatcaaaagttaattatcacgtagttatattaatatgagaatggttatcattacaattggaaataaaattgtttccaatagacatttttaacatgttgtttttctaagtgttataaggtaggtataaaatgggatggagcctctgcttctggcatgtgtcggtcagaatgactcatgatgtggtctgctattattgacatcctcactgccctaaaggatggggatttcggtaatgatcttacccagcaatagtggacacgcggctaagtgagtaaactctcagtcagaggtgactcacaagacaaaacagtttcaaccagtaaaaaacgtaaacaccattcgcatgaatttcgtagttaagatctgaagcttgcagaatgcatcggtgttactgccggagtccgtgaacttagtctgcatgaatcaccacagctttacatctgtcgcagtaaacagcaaaatcagcaaacttacttaattatatcgagtgcgattacaatcgctggcgatggtacagtgtggcttggcagtctcagtccggaacaatttgaaaatcagaatctcacttaaaacggcatccattttacaaaagatggccgtctgtgtatttataatgaataccttctacatgtttagagtgcataatccacgacaaggcgatatcctaaaaattagctagcaggcaactttgatggcatagataatgtttttagtaaaaaagagttgacttaatataatacagcctcttcctacataagaaggaatgtgctcacaaaaaaaaaccattagtctgcttcctgttcttacaataatcagtattatgtattttatttatatagcaaaatatgcttgttacacctgtcataattaggcatggtaaaattattgactgaaccctgggggagaaagatgcacagtgattattataatatggtttttggtgaaaaattggccaatattttatatgaagctaactctcaatttttttacgagagaaatgtcatagaagaggcagtcaacgctttattctgtgagcgtgaaataataaacaacaagaacataataaagaagctgatgttctttttgtcagatgttaatcacaccaagaaagatgttgttcagagcgcacttaatattatcattgacattacatcaggtgatatttgagattttacataaaagataatctctcaaggagtcttatctgaaaacgaaatatatagtccctctcgttttgtaatatcgattggctttgttgaatcggttacgtaccccggagccggtcatattttcaggtaatacacacgctttcagacatttcggctttcgtcattttggtatcatgggcatagcttctgctacctgaccatcataatcacgcagcttcagtgaagcagtgaccacctgtttaacccggtgtatcgttatgatcttatccagcaataatggacacgcggctaagtgaaccgccccgggtttcctggagagtgttttatctgtgaactcaggctgccagatcatcgtttccgatggaagcataataagcttttctgcttctgccggtgggatatggccctgcctttccagcaatcgtcgattgttataccagtccacccacgtgagtgtggtcagctcatcatactgacacgtgcattacccctaccgcgataatgcaaccgtacaatatagggcgtttcctaaacgcagccctcatcactccaatccaacaagacacagcatttttgatcacgaagaaagacaaataatttccgtaaatgtttccgttgttacaaataacaacagtgttttacatttctttggcctcaggcccgcgcatgttgccattcgatgtcattttcctgactcgtttcttctttatggtgtagtgtgatcttcactttatggatgctaacaatatgaaaagaaaaattattcccgtgctaatcggttgtacgctctctttctctgccctggcggcacaacctacggctgagcgctatgtcgtcagttttccagaaggcacgcacgtgaactacgccggcgcatttgccagtgcattcccgaacggccttccggttgggataggttctggcctgctgttcaccggtaaacagggcgatgccctgacattcgcaaccattaccgatcgcggtccgaacgcggattcaccgaaagaggggaaaaacgaaactaaaattttcgttacgccagatttcgcgccgctgctgatgacgattcgtgtacaaaacggcaaagcggaggccatcgatccccgtcctctgcatgacgataaaggcgcgatcaacggtctgccgctggcaagcgacgtgattggctccaccaatgaagtggccttcagcgacacgttacatagactgaagggggataatcgcgggctggatacggaagggatcactccggatggtaaaggaggttactggctgtgcgatgagtatggcccgttcctgattaacatcgacagtaaagggaaaatcctggcaatccacggtccgcaggcggcggaagaggaaaaagcgattgcgggcggtttgccaaatatcctcaaatggcgtcaggcgaaccgcggctttgaaggcctcacccgtatgccggacgggcgtattattgtcgccgtgcaaagtacgctggatatcgacgctaagagcaagaaaaaggcgctgtttacgcgtctggtgagcttcgatccggcaagcggaaaaaccgcgatgtacggttatcccatcgacagcgcggcctacagcaaaaacagcgacgctaaaatcggagacatcgtggcgctcgataaccagcacatcctgctgatcgaacagggaagagataaaaacaacagaatgcgtaacctgatttacgaggtcgatctcaataaggcgagcgacctgtcaggcttcgacaagccgggtgagtatccggagtttgatgatgagaaaaccctgtcacagcgcggcattacccttgcgcagaaaacgcaggttgttgatctgcgctccttgggctggcagcaggagaaggctgaagggttggcgctgatcgacagcaaaacgctggcggtggcgaacgataacgactttggcgtgaaggtggcgatgcaacatccggtcgagggcaagacattcaaggattatcgggtgaacgcggaaggaaagctgacgcttgacgacaagcaggttgaaacgaccctcagagtgaagccactggagaaaccggagtctgacagtgaactgtggattgtgacgctgccggaagcgttgaaataagtttataaggtacggacagcagtatcgcttagtttttcaaattcatgtatgtgaacaatattggggttccggcgtagacccccaatgaaagcgtcaccacgtgaaaacatgcctgcacggtttacacgtcatcccatggtggcagccggttaactttcctgcgccaccagtggaaaaaggccataagcagtccgaacaaaagtaagcgtacagcgagggccgtattgacggggatgtgttattcagctggcagtgctatgcgccacggaagcagttcgctgacccggttgaccggccagtctgctatgacgccagacacatggcgaaggtagctttctggatccacgtcattcagtttgcacgtcccgatcaggctgtacagtagcgctccccgctcaccaccatggccagagccgaagaacagggtcttcatcttttcacgcaaccagctttccagggatttcaacagcggtttcgtttttcgctgacgttcagcaagccgctgctctgccggcattccccttatatccgcctctatggcgtacaactgaccgatctgctccagggcttcttccgtcagtgctgacgggatgcggacgtgcacatcgtggatctttcggcgggcatgagcccagcaggcagcttccgttatccsaccattgcgatacagctcgttgaacccggcgtatgcatccgcctgcagtacaccactgaaccccgcaagatgggtctgcggatggatgccttttctgtccgggctgtaagcgaaccacaccgcmggygccarcgctgacccggcattgcggtcatcacgaacatacgcccacaaccgcccggtcttcgtcttcttattacccggcagcagtacctggaccggggtatcatcggcatggagtttgccgtcagtcatgacatagccatgaagcgcctcttccagcggagacagcagccggcagcatgcatccacccagcccgacagcagtgaacggctcagctccacaccttgccggccgtatatttctgactggcaatacagcggggtgtgctctgcatacttcgaggtcagcacgcgggccagcagccccggtccggcgataccccgctcgatgggccgcgaaggtgcaggtgcctgcacgatggcatcgcactgagtacaggcatgtttttcccgtaccgtccggataacccggaaggcgctacgcatcaactccagctgttcggcggtatcctcgcccagatagctcagtgaaccgccgcagttcgggcagcacggcgccgcaggcaacagtcgcttttcgtcacggggtagtgattcagggaacggcttacgggtgcgggtctgacgcaacggacgctgtactgccgggtcatacaccctaccagtcagcgtatcgctctctttctgaagccggttcagatcggcttccatttgtgcgatacggcgggagactttttcggaacgactgccgaagttcatccggcggagtttatccagctgcgcctgcagatggtctatttcgcgctcccggttgctcagcttttcctgcagggcgtggatcagcgcttcctgttcggccaggcgctgtttcagcaggaagatgtcgtcagaagagatgtcgttcataagcccgtattttaccgggcttattctgtgacaaccaggataaagagatttacagcatggtcagggaggtcagcagccgcttgggctgtcgccagtcgataccttccagcagcatcgccagctgcgcctgcgtaaggaacactttgccatcacgggctgacggccaggcgaagcgcccacgctccagccgtttggtcaggaggcacagtccgtcaccggtggaccacagcagtttaacctgactgccgctgcggccccggaaaatgaaaacatggccggacatgggatcgtctttcagcgccgtctgtactttcgcagccaggccgttgaagccatttctcatatcggtgataccggcaaccagccaaattttggtcccggaaggtaacgggatcatcgcttcagttcctgtatcagcagagtcaggagcttttcgctgacattgccattgaagcggagcgtcccgtgccggaacgttacctcacagctgatactgagggtttccgggtcctctgcgagcgattctggctgttcggcagctgcatcgagagtcacaggaagtagctgggggctctctgaagaaggtaatagcagctttccctcacgcaattgttgtcgccatttgaacaacagattggcgttaatgccattttcaagagcaagttttgagatggatatcccgggttcacaggaggcagcaacgagctgctgtttaaattcgggaggataattagggcagccttttcgcctgccgggagtcacatttttctgcatatctgacactttggttcccactacttatttggtggacaccactttgtctaattcgtcagattctgaccagacggttcaggctgtacgcttaccactattttatccctgttgaatttggttaagccggtgcagacgagccgggaaacgcacatctgaaccggcacaataaaatacaatacaaccccctgttactggagatacgaatggaatgacgaggcagcctgtcagtcacagggggctgttggcataaaatcaacggaaaggccaccaacaccggaattaagctccacagtccccgcactggcaatccattcccgggaaaggcattaccgcaaactgctccggaggcaaccattacagcctcagtaacggattatcagccctggcatcttccgacggcacctcctgccgcccccacgccctgctgtataccccggtaccgcagcgtgggcagcacttttccccctcataatcttcgtcacacatcacacaaaaccactttctcaccttcaccgtataatccggaaccgtcatgccctgcagatgcaaacgacgggcctctttctctgccgggtcaagccaggtacatcgcagcaggattttttcagcgacagtcatctggtcatgttcaaaccacggtggttgtccgtcattgccccgctgaagtgttaacgggcatccacaggacacacagcacaaaacgtcctgtcggttgtgcttcgcagcttctttcgccgtaacaaaatggcctttgctgtcattcgccatataacagttcagaattcgcatatttcctcctgagttgtccggggaatactgaatcctccggtctggcagtgtgtgcagtactgctccccataataatcgtggtgacattgtctgcagtgccagctggctttacgcaccacgggtaaggcatccggtacgaattgctgcagacgtttaatcaactgtatttctctgcgctccggcctgacataagggcactgttgaccgtgctctgtcagcctgtcgtcagtgtgttcaaaccagggaagttcagtgtcgtattgcggatggtatctgagtgcactgccacacaagtggcaggtgtagttagcataaggtgcggcctgtgcagtacgggcgcccgtcagacgtccgttgccatcaagagcgataaaggattttgcgtacatagtcatatacctcagccgccagacgacacgcaggcaacagccgtcccggtacgggcagcgtggtcagggtgtgaatggcggttcagttaaaatctggactggagtttgggtaaagcaggctggttgctgttacagcactgtggttgtcacacaatggaacactgacgtaaaaaacagtcagtgggcgagtggatacatcgttgccgccagacaacaacccatacttttggtttgccggatattggcgcgccagtcgtgctcaactccggctacagccaaaattgcgctcaccggtgcagtgagctttggtatgctccttcgccagatagtcagcacgttccagcacctgctgaaagccggtgtcatcattacgcgccagccacaccgccggccaggccggaaaatgcaccagcgtggcatggcacccgacatccactcccagggcactgcaccacgcctgtttaatcatcccggccagagactccggagcgcggtaatcaccggcacgacaccaggtatcccggttgaccagcagcatcaggtgatagtgttttttacctttgcactccccaaactcccgggcccagacgtaatgcagggttgtgggatgcacgcgtttaccttcccgatgcttacgtttctggtaagcgtcgattcgggctttcagggcattgatgaagcgggatatcacagctgcgtccgttgctgccggtacatccgggagacgcaggtcaacccgcaatgccgtcaggcggggatgaacattcagtgcgtgccgcaccgtctcacgaatacgttgctgccagaaggggttgtatttgtaggtcatggttaaatctccgtatggttcatacggaatagccacgtcgtaaaaaatacgcagagtccctgaagtgacctccggcaggacactgtctcaggcactctgtgataacccgaacggtcgtctccggactgacgattgaattcccggcgttgttttttttaatgtaaaaaaccggttacggataaggcgtggcgagggagctatcgtgatacgcaaaaagaaatgcggggattgcggtaattcgattactcataatacagtgtgttgcctgtattgtggcgctgtcgttccttccggttattaccggaagaccgatcgtctgctctgtttactgagttactgctggtgctgattctggttaccgtttcaggcgtcagtgtatttgtactgttgcagtaggttactggggagggattatcaggaatcggcggagcagagcgactcgctgcgtttgttgtgccagacagtaacgcaccggatccctgcaaaatggtacctgaatcaatcacagttaggtattccgccaatccgtgatcgaatcgagcggaatacgcagccccgacaaatacgagcccccttcagcagatacaggccggtaatacctgaaaatcagcctattaccgcccacgcctccggcaccattcccttttgatttcgaattctttgttgtcgctataccgcttaatgttcccggcacctccggtgcagataacaccggagtcatcgtagcgctgcttcaatattcaggtgacatatttccagacggaagccggcgcgcgatcgtaaagtttgttcattgtcagttctgccagccggttgtcaacggcagagttaaaggcttccagctccgcaagggtaagtttataacgcgtgtgggaattcacttttcccgcgtctcctgacgtattacgggctgccacttaccaggtgtcccgcaatacagccttagtgttccgttatcggggatccggacgcaccgcaacaaccggggaagtatttctggtttagagcagtgtcaagaggnattnntcagcccctcactcrcckgckcagtctcaggcaggagcattaatacgctcagttcatgtcttatacaggaatgggcacagggggagctggcgtgtcactgctgattttacgcatcagcgttcatgtatctgcactctgatacatgaacgattcacagcgctctgttaccggagagatttactctcttagcttactctggcaaatcctttacgttactctctgatgacttcttatatttataataccaatcagacagccttatcccatcggtgatatcagtctcctcctcgccaggaacgggctgactcactgtaaccaccaccgaaaacaactctgcaattatcagaacgcctgcttctctccctgtcctcacgaaaactatcccctctttatcgcgcgtgcgtgcggaagcatcttttcgcaacaaccacccggtataccggtacggctcagccaccgcaacctccccgtttatctcctggcggtcacattcccgattattttttacgtttctccccggttgttatgccggtgaaggtggcgcgctgttttcatgaccacaccggctggtttaacaacatccggaggaacattctcatggctaccccagtttcactgatggatgaccagatggtcgacatggcatttatcactcaactgaccggcctgacagataagtggttttacaggctcatcagggatggggcctttccggctcccatcaagctgggccgcagctcccgctggctgaaaagtgaagtggaagcctggctgcaggcgcgtattgcacagccccgcccgtaatttctgaccgttatccgttcacccgcagcagacgtaatccccggcctgccggcggcattctgctgcctgttatatccccgtgaggaatatgaaaatgaaacaacagtatcagacccgctacgaatggctccacgaaagctaccagaaatggctgaccggcttcacccggcacgccgtatcctggggcgtgtgtcatccgaatatctactacttccataatctgacgcccggttgggtgtcattcaatggtgaaaaaccggagattgccatcgtaccccagagcctgcaccggctgatttatggccctgacaaacgggccacgccgcccctggatgatgatctgattgtgaatttatgcaccagtgaacatctgctggttcatcatccgatgctggaaggcattctcctgtctgaatgtgaacgtctgaggcagcgttctctggcaaataaactgatcagcctcttccgtcagtttggtggcacggagttgcgcctcaaactggtctggctttgctggcttgatttaatgaccggaaacagccttgaagactggacagagaacctgaaacggaaatcagaaaaagagctggaggaatggatcatcgaccgtcagaagcagagcgcagcactgacggatctgatggatcagtacgtgctcctggcataccgcacaacggttgacgatagccgcaactgatgccggttgcttccggaaggtgtgacaaaatacggaaatgatgatgagctcccggccccgcatgctcacctgcagagcgtgttcgtcgtcatcatactgagccatgacgggcgtcttaagggcatcctgtcattgctgagcaggcaacaccaccagaggagccacggacagggatgttctttacagccmgatacacgccaggttctcagcagactgaatgtgcaggtgcggttattcaccagaaatggcatgctgcggtacatacccatcctggtgacaatatgtacgtggcgacagcgatcccggcactgtggaagagactcactcagcctgcaggatattctttccggcatccgggaatgtccgcctgaatgcaaacaggatgatatttgaatccgtaatactgttctttcatcataaataatttatgcagatacagttaaccgttacagtagccggtttgttttaccgggaaataatatccgtcagactgatgccggaacatatctgaaacacgttatgatgttttgttatcagaaatgttgtatattcttatccgtggcgacagtttaatgccctctggtatcacctgataatgcatatcctgcgatgattcgttatatttacgggacacgcctcttttcattgtgctccttttcagacttcattttccgtaagtgttccccggcataaaggaggtacctttctggcgtttataactctctttatcggtgacgccggtaatacagggaataccacaccgacaaacgaggtattaacagacgatatttcagtgtccataatttttctgtccggttaaataacgtcagtctgctgccctctgactgtaatcatcaaagccggaatgcataccgggttacaacgtaaaaaaagtgatgctggcccccggtgcagctggcgggcgaaacatgtttacctttcaataccccctgtctgcagtctccactcttccatcctcttaagctacgtcggccacatgagtgcacttccatgataacaggtattcctgtcagcataacgaagccggttaccttcccttcctcctgcatttcctgtcagaatgactgtacagcgcgcagattgcctttttattgaccaccttaacataccattataaacttctttttatcatgttattatcaccttattatgtttaattttcaagcaaccggagaaagaggatggttcagaaaattttgtcggataaggttatgaatgaaagagcaaatgcgtattactcttattatcttggagagcgtaatatctccgtactgccccttaatgtttatgatcccccggaacgttttatcgcttacataaaaaaaacagagaaaatctgaacatcacactttcagattttgaacttgaacaaatcatttctggtatgcgtctgaaggccctggccttcctggtccccctggaaaaaatatcctggatcgcgggcagtgaacgcgcatgcttattttcctggtatctgttgatgcagtttatccagaataacagggcaaaaataagcgcagacttgcttcaaaagaataaactgtatcttaaagaagagtatctggaagggaatgccttcccgtcggactcatcgacacagttcagacaaatactcagagttctcgatattctttctgataagaatttgcgggatgagtggataatccagaccaaagacagatggatacgggcatttaaatcaaagagtcctttcagttacctcctcccggagaacgaacatgaatgcatatggacatggaattatttgaagggaaaaaatattgcactggaaaaactggccagttttcctggttctgctgatatttaccacgcaattcacctttcatttgacaggtaatgactccaacttattgatagtgttttatgttcagataatgcccgatgactttgtcatgcagctccaccgattttgagaacgacagcgacttccgtcccagccgtgccaggtgctgcctcagattcaggttatgccgctcaattcgctgcgtatatcgcttgctgattacgtgcagctttcccttcaggcgggattcatacagcggccagccatccgtcatccatatcaccacgtcaaagggtgacagcaggctcataagacgccccagcgtcgccatagtgcgttcaccgaatacgtgcgcaacaaccgtcttccgaagcctgtcatacgcgtaaaacagccagcgctggcgcgatttagccccgacatagccccactgttcgtccatttccgcgcagacgatgacgtcactgcccggctgtatgcgcgaggttaccgactgcggcctgagttttttaagtgacgtaaaatcgtgttgaggccaacgcccataatgcgggcagttgcccggcatccaacgccattcatggccatatcaatgnntttctggtgcgtaccnggttgagaagcggtgtaagtgaactgcagttgccatgttttacggcagtgagagcagagatagcgctgatgtccggcagtgcttttgccgttacgcacccccccgtcagtagctgaacaggagggacagctgatagaaacagaagccactggagcacctcaaaacaccatcatacactaaatcagtaagttggcagcatcacccagttgatgcgcaacggtacgattattccagcgaataacacggtatcgttaggagcagtagggacttcggcggtaagtctgggattaacggcaaattacgcacgtaccggagggcaggtgactgcagggaatgtgcaatcgattattggcgtgacttttgtttatcaataaagaaatcacagggcattgctaatgcaggtacgcaatattacctgaagctaaaaacctgcacgttagccctttgtaggccagataagacgcgtcagcgtcgcatctggcataaacaaagcgcactttgccgacaatccgaacagagctcgccattggcaggctctggtgttcttttacgctaccatgctaataatcaacacaataatcagcccaaccacggagttgaccagctccagcagtccccaggttttcaacgtgtcttttaccgacaggtcaaagtaacctttgaacagccagaatgaggcatcattaatgtgggtgagggtgttggaacccgcagccgtcgccagcaccagcagcgccggattcacgccaaccagctgaccggttgctggatcaaggattgcagcactgataatcccggcggcggtcatcgccgaaacgacaccctgacccgtcgccagacgaattagcacagtgatcagccatgccataatgtagggcgagatattgccgtgggacatcaacatgccgatggtgtcgccaatgccggtgtcgatgatagtttgcttcaacacgccacccgcaccgatgatcagaatcaccattgcaatgcttttcaccgcactttcaaaagcgttcatcacccactgcatgtcatgaccacgtgcggtgccaaagagtacgaatgcaaccaccatcgcaataaacattgcaatcggcgaggaaccgataaagttaaccacttcccaggcaggggtatcttttaccagccagatattggcgatggtggtggagatcataatgatcgccgggatcagcggcaccagaatcgaaacgccgaaagagggcagattgttcatatctaccggttgatctgctttcaggaatgatggcgttgggcgctcaagattgccgaggaacttcggcaggatcagacctgcgcagattacacttgggatcgtcaccagtacgccatagatataaaccatccccatatctgcgccataagcattcaccagcgccacaggacccggctgcggtgggaacagtgaatgtgcggtagtggcagctgctactgccgggatcgccagtttcaggaacggaattttagcttcggcggcaatgacaataaccagcggcgctaacatgataaaggccacttcatagaacatcgccagaccaaaaatcaggccgatgataatcaccgacagctgtacatagcgcagaccgagacgcgccagcagcgtatgtgctatctggtgagccgcgccggagtcgaccatcaatttaccgatgaccgcaccgaacaccacgatgatagccagttcccccagcgtgttgccgaagcccgctttcatggtgtgcagcagcgacatcaaatccattcccgccagcatcccgacggacagcgccgccaccaacaaagccaccattgaattgattttgaacttcaaattcagtaccagcatcagaccaatgccgaataccacccagagaatgttaagcacatgcataacgttttaccttacctggttgaaccgttgttattttgggcgacatgttatgtaaattggtcaaccattgttgcgatgaatgtcacatcctctgatcaataaccatcgattaccctttgctgcaatttgcagcaacaaccaggagagtgaaattcttgtgatgtggttaaccaattttagaattcgggttgacatgtattaccaaaaggtagaacttatacgccatctcatccgatgcaacgccacggctgcggtctggttgttcatccggatacctaaacaactccagggttccgcgtctctttgctgtggaacccactatgtgaaagaggaaaaatcatggaacagacctggcgctggtacggcccaaacgatccggtttctttagctgatgtccgtcaggcgggcgcaactggcgtggttaccgcgctgcaccatatcccgaacggcgaagtatggtccgttgaagagatcctcaaacgcaaggcgatcgttgaagacgcaggcctggtatggtctgtcgtagaaagcgtgccaattcacgaagatatcaaaacccacactggcaactatgagcagtggatcgctaactatcagcagactctgcgcaacctggcgcagtgcggcattcgcaccgtgtgctacaacttcatgccggtgctcgactggacccgtactgacctcgaatacgtgctgccagacggctccaaagctctgcgctttgaccagatcgaattcgctgcattcgaaatgcatatcctgaaacgtccaggcgcggaagcggattacaccgaagaagaaattgctcaggcagctgttcgcttcgccactatgagcgacgaagacaaagcgcgtctgacccgtaacatcattgctggtcttccgggcgcggaagaagggtacaccctcgaccagttccgtaagcacctggagctatataaagatatcgacaaagccaaactgcgcgaaaactttgccgtcttcctgaaagcgattattccggttgccgaagaagttggcgtccgtatggctgttcacccggacgatccgccgcgcccgatcctcggcctgccgcgcattgtttccaccattgaagatatgcagtggatggttgataccgtaaacagcatggcgaacggtttcaccatgtgcaccggttcctacggcgtgcgtgctgacaacgatctggttgatatgatcaagcagttcggtccgcgtatttacttcacccatctgcgctccaccatgcgtgaagataacccgaaaaccttccacgaagcggcgcacctgaacggtgacgttgatatgtacgaagtggtgaaagcgattgttgaagaagaacaccgtcgtaaagcggaaggcaaagaagacctgatcccgatgcgtccggaccacggtcatcagatgctggacgacctgaagaagaaaaccaacccaggttactccgcaattggtcgtctgaaaggcctggccgaagttcgcggtgtcgaactggcgatccagcgcgctttctttagccgttaatatccaccggcatggctgcgcgccgtgccggttccttcttccttgccgtcactctctgaagacggattctggagtttacgatgactactattgttgacagcaatctgccggttgcccgcccgtcatgggagcattctcgtctggaatcacgcattgtgcatctcggttgcggggcgtttcaccgcgcgcaccaggcgctgtatacccatcatctgctggaaagcaccgacagcgactggggtatctgcgaagttaacctgatgccaggtaacgaccgtgtgctgattgaaaacctgaaaaaacagcaactgctgtacaccgtggcggaaaaaggcgcggaaagcaccgaactgaaaattatcggttcgatgaaagaagcgctgcatccggaaatcgacggctgcgaaggtattctcaacgcgatggcgcgtccgcagacggcgattgtctctctgacggtcacggaaaaaggctactgcgctgatgcggcaagcggtcagttggatctcaataacccgctgatcaagcacgatctggaaaacccgactgcgccgaagtctgcgattggttacatcgtcgaagccctgcgtctgcgtcgtgaaaaagggctgaaagcgtttacggtgatgtcctgcgataacgtgcgtgaaaacggtcatgtggcgaaggtcgcggtactggggctggctcaggcgcgtgacccgcagctggcggcatggattgaagagaacgtcaccttcccgtgcaccatggttgaccgcatcgttccggcggcgacgccagaaaccttacaggaaattgctgaccagctgggtgtttatgacccgtgcgccattgcctgcgaaccgttccgtcagtgggtgattgaagataacttcgttaatggtcgtccggactgggataaagtgggcgcacagttcgttgcagacgttgtgccgttcgaaatgatgaagctgcgtatgctgaacggcagccactctttcctggcatatctcggttacctcggcggctatgaaactattgccgacaccatgactaacccggattatcgcaaagcggcctttgccctgatgatgcaggaacaagcgccaacgctgtcgatgccggaaggtacggacctgaacgcctatgcgacgctgctgatcgagcgtttcagcaacccgtctctgcgtcaccgtacctggcagattgcgatggacggcagccagaagttaccgcagcgtctgctggatccggtgcgtctgcacctgcaaaacggcggcagctggcgtcacctggcgctgggcgtggctggctggatgcgttacacccagggcgtggatgagcagggtaatgccattgacgtggtcgacccgatgctggccgagttccagaagattaacgcgcagtatcagggcgcagaccgcgtgaaagcgctgctgggcctgagcggtatttttgccgatgatctgccgcagaatgccgactttgttggcgcggtgacggcggcatatcagcagctgtgcgaacgcggcgcgcgcgagtgtgtggctgcgctgtaactaactgattaccctacagacttactggtcaatcaaactgatatttggttgaccagttttcgtttttttgcccacctgtacgtgccaacttccagtgctaatggtatagtttgagattaacgggtgccgtaaaattgcccgttgtaggccggataaggcgttcacgccgcatccggcaaaaatttgattaaccgcacctaacggacacaacaccatgaaatctgccacctctgcgcaaagaccttaccaggaagtcggggcgatgatccgcgatctgatcataaagacgccgtacaatcctggcgaacggttgccgccggagcgtgaaattgcagaaatgcttgatgtcacgcggacggtggtacgtgaagcgctgatcatgctggagatcaaagggctggtggaagtgcgccggggtgccggtatctatgttcttgatagctcaggcagccacaacacagacagtccggatgccaacgtttgcaatgatgcgggtccttttgagctgttgcaggcgcgacagcttcttgagagcaacatcgccgagtttgccgccctgcaggctacccgcgaagatatcgtcaaaatgcgtcaggcattgcaactggaagagcgtgaactggcttccagtgcgccgggcagcagcgaaagcggtgacatgcagttccatctcgctattgccgaagcaacgcataacagcatgctggtggagctgttccgtcagtcctggcagtggcgggaaaacaatccaatgtggatccagttgcacagccatctggatgacagcctgtatcgcaaagagtggttgggcgatcacaaacagatcctcgccgcgttaatcaaaaaagatgcccgagcggcgaagctggcaatgtggcagcatctggaaaacgttaagcaacgtctgctggaattctcgaacgttgacgatatttattttgatggctatctgtttgattcatggccgctggataaagtcgacgcctgacttattataataagcgcaagggtaaacgttccttgcgctttcttaaattaagaagtcgcaatgagtattactttgtaaattgcaggggattgtttagctatctgtataacctgaatgttagtactcattcttcctggtagttatttaccaatataattccattcaccattttttaattcaaacagttctggaagagatgacggttgcagagtcatacgtttgagtggtgcattttcatcacccgggataactttatatcccatttttgcatggatctccgcggtaccgggataggcttctataccaattattgggtcattacccaactcaatattagcattaagtaatgcggcaagagcgaatccggaagaatttgctacccctgttaccgtcattatctgatcaatatagatatcaatccttggctgctcattggtccatctttttgcctgagaagctggaagggttgaaatatatcctatcgtggttccggcataactaggaacattgcaaccagggcctaatgttatttcatgaactgtatagtcctcaacaggatcgaaagggcttttcataaataaatttagccgtaatccttctgctaactctgtggcagtatgcgcctttttacatataccaccatatatttcgtctaaagctgaggtgattttcaagtttcgatagagcatacgtcctgttgttgtaataccattgaattctctgcatgtttctgtcacataattaaatggccaggactctttactaatatcaagttttctaatttcgacaacgctttttccatcgtaattatggttattgccacgagcaagaggcggaagatagatattttccgtatccatgcgtgcacgttcatgtttacgtgttaactcactgtcgacttttggatgatgaaggaagtgattatctgtaataatttgactctgaagggcattgcttaatggcatagacataatagttacctttatgagtatttcactgatgcttagaaaaatagataaatttttctgtagtaaaaagagaagtaaacaaatgacatgcatgtttctgttgtagtgatatcaactctacacagtgatattaaatggtgggaaacactctaaagtatcaaaaaacgctcatttaaaattatttgcatgcaatttaaaagcatatcttattactaattggaatttgatgttgctatattgatgtctatattaataatgcctgtgaatggtatttttgatgtatttgatatgttatcaatttatattatttacaaactaattgtttcaaataatacatggctgattatgcgaaaataaataatttcacaccggaattaagtagcggtggtgacaagtattttcatctacgtaactattcggaatattcagaatatactagcggtttttttttgagtttgatgatttttatcaaatcatgacttttttcctgaaaagtcagtagatattcataggcaagtaaggttttatactttgctgacaggattcaggcctgtctcagactgacatggatgtaatgaacaaaagggaatggctatggaaaatgagcatcaatacagtggtgcccggtgttcagggcaagccgcatatgttgctaaacgtcaggagtgcgcaaaatgatgcgccaatcacttcaggctgttttacctgaaatttcaggcaataaaacgtcaccgctgcgtaaatcagtatgcagcgatctcctcactctttttaattctcctcattcggcattaccgtcattacttgtttcaggcatgcccgagtggcaagtgcataacccgagcgacaaacatctccagagctggtattgccgtcagctgcgttctgcactgttatttcatgagccacggattgcagcgttgcaggttaatctgaaagaagcgtactgccacactctggcgatcagccttgagataatgctgtaccacgacgatgaatcgctaacgtttgatctggtctgggataatggcggttggcgcagtgcgacgctggagaatgtcagctaagcacaatctccagctcgcgcagttcacgccagaagcgttcggcaactggattcatgcgggtattcatccggtatgcataggcctgaatcgggatcaccagttcgtcccgattcagtacaacgagctgcccgctgcgaatttcttgttggatggcgtattccggtagccaggcaatcccacagccgtcgagggcaacctgctttaaaagctcgctcatcgaagagacaaaaaaggtgctgaaacttaactcactgtggcgcgtcagggtgcgattaatcaatcgccccatgtaggagttgcggctgtaattcagtaacggaaagtgtggctgcgcgaggttaaaaagtgcttctccgtgttcgtcactggcgcaaacggggaacaattgagattcaaataagcgaatgtggtcaaacggcgcttccagcaaatcttcgtcgtgaaaggaaaaaatacagtcactttgcccttcacgcagtttatcgaccgcttcatcgacatcaatagcttcaattgcccaggtaaagagcggcggcatctggctgataatggacggtaacagcccgagggaaagagagtgtgcagcggctattttaattttgcgttgcgcgtaatcgctgccaccacggagttctgcaaggttgctctctaactgttgcaacagatggcggatctgcgaatggaatattttaccttgttccgagagttgcagcggcgtcacctggcggttaaacaattcaacgccaatcgcctgttccagcgcacggatgcggcggctgaatgccggttgcgagacgttgcgactgactgctgcctgggaaaaattgcggcatttttccagggtcagaaaatcataaagccatttagtttcaatattatgcaaaaccgcaccacagtcatccattacgttttactctgtcagccgcccttgcgggcattctacgtccattcgggcggctgacaaccgtttatgccgtttcaaacgttcctttcacgcaggctttgccgtctttgaccatcagcttgccgcgagcgtatacctgctcaatgcgtaattctggcgtcatgaccagtaagtctgcgtcattgcctggcagaatttcgcctttcccgctcaggttaaggaaaccggctacgctactggtgagcgggcgcagggcatcgctgatactgaaatcataatctttgaccagcacctgcacggtttccagcaacgtttcaaaaccggcaacaccgatatgggttaaattcccttcgtcatcgaagaacggctggctaccgttgccgtcggagctgagggtgacgcgtgccagcggaatacccgcctgaacggcgcgggcaataccttcggcaggggcgactggttcgtcaatgctgctggtgatatcgatggtgccgcctttgcgcgcgaactccagcgcctgctcaaacaacggaacgttgcggttaacgtgggtcggcagcaacttgctattcggcacatcgcagttttccagcaggtcatagacaggctgtaacgcctttttgctgtcgcccatgtggaacacggtgacgccaggtttaccgccgagcaaaccgccaacgcgggattccgccgccatattagccaggtgataaacgtccggtgcggcagaacggtgatcagagatggcgcatttcacgccaatcacgcgatcgataatcgccacgtctttttccacggaacccgtaatagtgcgggaagggacatgataagcgccggtcagcatccaggcgctgatgccttcttcattgagcgcacgggtcttggcgagcagggattccgggtggcgagagatagagtcggtgcccagcagaccaaccactgacgtgacgcctgcttccgtcagacgacttaacgccacttccggcgtgcgcgtcgtgggacctgcttcgccgccaccgccaatcaaatggacgtgttgatcaataaaacctgggcagaggatctgcccgctgagatcgacaaccgtgcagtccggtacaatgtcaggagggatattactggcaacggcgataattttgccgttagcgacgaggacatcgcaaattccccgatcttccggcgcatacaaatgcgctccctgcagcagggtaaaaccggctgcggtataatcaatcatggtaactccttgttaaacaataagctgcataacccagatcgacagcaatgcgttaatcacgcagaccgtaatgatatgcgggtaatatttggcattcacttcggctgtccccaggcagcgaccgacattttgcaccgggttgccattaaatacatcgcgggcagtaaaacggtgacatcgtggccggttaatgcgccagcggtcgccagactggcggcaacaccaactgcgccgcccatactcattaatgcggctaaaaggacggttgccgcttcacctggcaatccccacagcgccattaccggttcacagatatgccccacccagtcgagcaggccggtaattttcagcgcctgaatgatgacaaacgccatcaccacgtttggcagcaggttggtggtggcgatagtaaagccacggcgcgcgccatcgataaacatatccatgacgtttttgcggacctgagttgtcatgcttgcgctccttgcgttgggttgcgacgttcttcgaagttaagccagacgcgcaaaatgttggctccgacaaatttaaacaccaggatgacggctaaaggtacgattacggacgtgcccagaaaggcgaacaccgcgacgccggaagagaagtagttggtgatgatggcgctaccgctggtttgatatgcggcgaaaatcactttatcgcgttcggtaatttcaccttcctgcgccagctctttggtcataccggcggcggcatcagtgttttgcaggttagcgatcagcgccagcgagcagatccctggaatgcccaacaacggttttagcacaggtgtcattaactgctgcgcggcgcgtaatccaccaagaccatcggtaattgaaataatccccagagagagaatgactgacggtgccagctccagcgcaaagagaaagccatctttagcccccgcgccacccgccccgcgaaatgaggtggtggctccgttcgcaccaggcagttgcccaaacgatccgttcagaacggaaaatcaaaaacgcgccaccagctgtctgttccggaaaaaacaccggaaaaaaagattatggtgagaaaaaaagccagataccctttaatgcccactttttctgtcgccagctccccggctacagcatccccttgttgtgtcataacaatccccattgtttttttgtgtttgtgtgttgcttgagccaggaaaattcctggagcggaaaaaccttatcagccatgtgggtatggggaaaatgcaagtatgtttctggctatgcgttttttgcatagcggaaaaattatgctgtgtggaaaaggctctgcgcaggattgagttgcagaaaattcataaacccagtgacaatgacatcagtaaataaaaacagaaaatccagggacgaaaacgagatggcaaagtacaacgaaaaagagctggcggatacgagcaagtttttaagttttgtcctccgacacaaaccggaggcgattggtatcgtacttgaccgtgaaggatgggcggatatcgataagcttatactctgtgcccaaaaagcgggcaagcggttaacccgtgcattgctggataccgtggtcgctaccagtgataaaaagcgttttagttattccagtgatggtaggtgcatccgcgcggttcaggggcattcgacttcgcaggtcgccatttcctttgccgaaaaaacaccgccacagtttctttaccacggtacggcaagccgtttccttgacgagataaaaaaacaggggctgattgcaggggagcgtcattacgtgcatctctctgctgatgaagcaacggcacgcaaagtgggagcaagacacggatcgccggttatcttaaccgtcaaagcacaggaaatggcgaaacgaggcatccctttctggcaagcggaaaacggagtctggctgacatcaacggttgcggtcgaatttcttgagtggtaagggaaacactcctcatgaagtgaccacttgcagcttaaataattgtactgtgctgataagcgcagcaataaacaacgccgccgcgccgcagagagtggcgccggcaagcgccgatgttccattgccgagcatactggtcagcgccgggccgaggatttgtccaatgccgtaaatgagcgtcacaaagcctaaaagattgagatttcccggaacgctcagttggcgggcgatagtcatcaccagagatgtcgtgcccataaaggtaccgccaaaaccgatactactaatgataagcaaaagaggagagtcgctggcgagagtaagcagcacactgatagcctgcaccagcaaattcgccgtcaggcaaggcaaagccccccaacgttttgctgcccatagccagccaaagcagcctggcacaattgataagccgactaacgtccagagatgggcggttaacaatggtgagcctgcatctttcgccatgagcggcaggaaagtcgcgacgatgatataaccaaatcccgccaggccgtacagaatagccagtaaccaccagttcattatctgttgctccgtttttgccaatggcattggtgcgatggcgtgttttttcgagggcattaaaagcgtaagtgcaatcagcatcatgccagaaagcgccccggcgccttgccataacgtttgcgaggagaaggcaaaatgcaggcctgccagaacatattcgttgcccagtgcaatgccaatgccaacgccagaaaacaaagctgccagcacaaaaggatggcgcgtgtgctgcataatcagcgtcgaaccaaaaatcagcataccggcgctggcgacacccgccaggaagcgaatcaataacaccagaataaatggcggcaaccatgccattgcgaggatcaacaacccgctcgccagggcagaaaccaacagaaatgggcgcaggcgcgacggctggtgaaatgcgccaaacgaaaatagcagactgccagccagataccccgcatagttgccgctggcaatccacgagagctggctaaatgaaaacgccccttccgccatcatgacgggcaacataggcgtataaaggaagcgacctaatcccatacctaaggtcagaaccagcatcccgaaaagcgcggtgctgaaagaaaagcgttctacgggatgcgaggacgaaggcatgtttaaccttgtatgtcatttttgttgttaacaagttaataacaaaaaggtgaaatatgccagtctgttaatgcgatgatttaggggtaaagcgataaaaacgatttggttcgctaacgatataaatattaccagaggcatccatcgcaatcccttcggcctgtttgatgttatgcgacaaacctcgactacctttggttagtgatatttcaccgataacctcgccaaccagggttacttcctggagtgcgcgagattcatgagacagcaccagaagcgtatttttttgctggttaaattctgcgccggacacatcatctaaagtaaattgccgttgtagtgcctcgtctttgctgatgtgtaattcattgctacttaacagcccgttaactttgtagacctcaatcggatttttctctttaaaaaaccagaaagtgtgatcctggcgagaataagccaacccttcaaaaccgcaattggttggggagtcttgcagcgggatttttatttttttgaggatttttacttccgagtttggggtcagtgaaatcacataaatggcgtaatcgcgctcatcgctaatgacaaactgattatcgccaatgtattcgatcgtctcgagatccttaacaaaatccagaggaattgtgcggataaaatcaccattggtggtcatttcaacaatggcggcaggtttgttgatagtgctaaaaagagtattgctttgtgccgaccaggtcagcgaagagatattattcgttatgcctgcaatttctttgccgtcaatggtggcgtggtaattctgaaatgatgctgcatgattgcttttacgggcgcaagattgcacgaagaaagtacacactgccacaatggcaaaaagaatcacaataacggagatgcgtttacttaacgaaatactttttgtcacggtaatccctttaaggcaaatcaataagatatcgagaagtatacgtagcgaccttaatgaatccttaacgcggagaaacccggtaatgtgcaatgcagcgccagacaccatcctgctggcaataaattgactcagtcagcccagggatcacccattgtatttcctcgccggggggacaggtcagccaaatgcataacccgcagccgccgcgtaaatcacggggaatatcgctgacgcgaaaagtcatgcccgctgcctgcaacgctttgcgggtttgtatgacgccgactgtggagtgaaataaaaataaaaactctttcatcggcgtgtcctcactcgttgaccaattaccgccgcgccaattgcgccagcaaattgcgcatcaggatgggtatttaccggcattcccaggtgagattccagcatccgggcaaacgtctggcaatgactaacgccaccagtaaacagaatcggcgcttcacaggagagacgagcaatgaaattggcactcctccgcgccatcgcgttaatcactccggcgagaatcgcttctggcgcgacgcccgctgagcgcaggctgatcacttctgattcagcaaacactgtgcacatactcgtgatggcgtgcggcgtgacattttcggtaatgctgtcgagttgctcgacgctggtgccaagcgtgcgcgagatcacctccaggaaacgcccggtgcccgccgcgcatttgtcattcatcaggaaatcgcacaggttaccgtcatcatcaagctgaatcactttgctgtcctgaccaccgatgtcgattaccgcgcgcgttgctggcgcaagaaaccgtgcgcccagcccatgacaggagatttccgtcacttgtttatcggcaaaatccaccagttgccgtccatagccggtgagcgtcagaaacggcgttgtctctaacccttcgcgcagagtttcccaggcttcagtaattgctgttgccggacgaaagggtgttggaacgaggaaacggcgcgtaatcacgccgtctgccagtaagatccctttggtggcggtagaaccagaatcaatgccaatcgaatatgtcactgccactccttacagcatctcaataaaggccgcgacacgggtactgagctgcccgacatctgaggtggagtagtctgtttcaatagcgatataaggaatgttgtgctgctgacgcacatgacgtttaatcgccagcgattccaccgcgtaggtatggcacgcctgcaaaatcacatcaactacgccatcgacctgatattcttccaccatctggctgagcatttgcaggcgctgatcgttcggcgaaacacaggagcagccaatcgccagatatttatccgccagtgcgtcgtagacatcgcccgtttctgccacgcattgctcggtcgctttcgccccggtgcagttttcataaccgacaacccagccgccattctcttcaatcgcgcgcaccactttttctgctgcgccgccaatcgggcagccggtgattaaaatgcgtggacgcagggccagccgctggccttcttcccactgctgacgaacgcgggctgtcatcgcgtccagttcattgatcaacgcctctttatcgaaccggaaggttgcgccgtagaccactttcagaatgtcgctgccgctaagcgccggaggatttaactgcccaagatgataaaaattagccagtgcgcgacgttcgcggtttttcagcgcaatggcatcgcgcagagcatcttcgctaatctcgtgcccaaaacgttcttctaccgttttttgcaagcgcagcatctcggctttccataacgcacgcgaggcatcgtccttaacgctgttcggcaactgcatcacatgaacgggcttaaactccgccatgtattcatacattttctttttgccgtcgcaggtggtttcaccgaccaccagatccgaaaagtagaagtaggggcatttatcggttttgccaaagccgtagctgcttttaatcagcgggcagaggttgcgcggcagatctttctccgcttcttcaatggtttcatcagaggtagaacagagcgaaaccacaaccgcaccggctgccatcgggatctcttgcggcataaaggtgcagtaagtgccaaccagcggaatgccgcgctccttgagatccatgacggtgagaaagcctttctggcgagcttcagagaactgatcgaaaatggcgggtagatcggtgataagtgacatgattttccttccccgtaccacgggagataatgaaaagaggccacattattaccattcttttagtgtggtttatttgatctctctcgcggttagccacttagtttttcatggatttctaaaaattgctgagggggaacaaggccgggagctgcgacaacaaatataaaattagcccaatacaaccgccaaccagcgtaccgttgacacggataaactgcagatctttgccgatatttaactcgatttgccgcgacatatcccgagcatcccagctttttactgtatcgctgatgtggcgcgtcaggaatgcggaaaactcaggcgcgacgcggtgcgcggcttgttccaggtgaccatttaacgatgcccgcaaggcatcatcggcaattaacgtttcgccaaaccattgacccgcccgcgcgatacgttctttcacacgagaatcttcactgttgatatccgctttcagccattcccgtaaatccccccacaattcactgagatagcggttaaaagcttcatcttctttcagataactttttacggcatcggctcgcgctgccatttccggatcgtttttcaacttgtcgatcagggcaaaagtggcgcgatcaaacgcatgacggatctgatgcgcacgatcacggctgatatcatcaagcaaagaattcaccgcgtcagaaaccaactccgcgctatgttcgcccaaccattcggtggggagaattttggctttcagtggatgctcactctccagccagcgaacaatctgctgggcaataaacttgcgcgatttatcgcgctggagaagggcgatcaactgtgcgatcagcgtatcgagcagcacctgatgacgatcgtttttggtcatactctccagcatcaacgcactggttccggaaagatcgaccttatcaatcgcccgatggaccgcgcgcttaagcaggcgctgaatacgtgcatcatcggtcagttcaagaaaaccgctcatgatctgcaacagatgctgaccaacgcggcgggcgttctccggctgactaaaccagttgccaatcaacaacgccggttcgtgacgtcgaatcaatgccaccagcgactgggtatcgagaaatttttcctgcacgaactgaccgagattttcgccaatccggtctttattacgcgggataatcgccgtatgacgagaaatgatcggaatcggcacgcggcgaaacagcgccaccaccgcaaaccagtccgccagcgcgccgaccatcgccgcttcagcaatcgccttcacgccgctcacccaaaaattgggcggcaaaaacagcgtaactacaaaggtagcagcggcgataagcagtaaagagagcgccaacattttggcgcgtctgagttcaatgagtttattaataacgttaagaatagagcctgacggcaggatcgcgcaaaaatcaccgctcctccgccagctcggcagcctgatgttggcgcacgcgattgagcaatcccgccagggtgaaaacgacgataacgcccgccacgacggctaacagatgaaacgacaagcgaccgccgttaaaccacagccagcggccgatttcgaccgagacagacatcaccatcaggatcaccatattcagcgatgcggagacggtccctttcggtaagttattggaaaaaagcgtaaagcggaataaagtcgggaagatcaaaccaatcccgaaagcatacaaactggtgcccagcaccgaccacagccagacgtgcggtgacagcagattgccgataatcaacagtgcgaggccgaccagttgaatgggtacggcacgccagataaagcgcggttcggtcggatctttaacgaaacgcgccacgatggcattcgcgacaatcaccgcgccgaacaccggaacctgtgtccaggcgaactgcgaggtcgttaagccgcctgcgtcaatcaggatcaccggcgagacagccacccaactcatcatggggatatagcttaaagagatggttgctgcaccaaagaggaacagccgattgcaaaagacattacgaaaatcgcgcaagacgcttttggcgctaaatggaaccgcgccgcgcttcaccgtctctggcatcgccagcagtaagccaacaaatgagataaaacccataaccgcaatgatggcaaaaaggactttccagtgcacaaagtgcatcagagctgcgccggaaagcgggccaataatcggcgcaatcagtacgatggaggtgataatcgccatcaacttgatcccttttgtctgtccgaacgcctcctgcaccgtgacataaccaacggtagcaataaaacagatactggtgccctgaattgcacgcgcgataagaaactgtgtcatagacgtggtgaacattgtcgcagcgcaggcaagggtaaatattagcgccccggtaatcagcaccggcctgcggccaatcctgtcggaaagcggccccagcagccactgtaacgccataccgcccgcgagatagagactgacggcagccggagccagactgacatcggcattaaaatcacggaccacattaatgatccccggctggatcagatccgtcgacaggtacgcggcaaagtcatacaaaatcaacgccatcgggaaaaacagcgtggcggcatggcgggcaaaaaaacgtggcataacaaacaactccttgtccggagaaccccaacggggaaaacgaaattcaataccgtcggtaatgacgaaaggcaggcgagaaggacaaatgtactgaatttcatgtaatcaaccacactgcctgtgaacacacagacagagaaataccttctgactccaggtcagaatgtataacgattacaaatagtcatcagcacattacacctctttaattgatgggttgcatagaaaatatacaccttaagtgtaattaaaatttgcggttaatcaaaagagcgcggtggaaaggggaatatctgccgggtacaggaaatgtaaaacgcgagcctgtttccggaaaaatgtatcgtttgcagaggaacaaaaatagactggaaagcgcctcggggaacggaaaatagccaggtgagaatggttttgttagtcgctaaagtcgggccatcttatctacaggtgacggatcgccatgacaaacttcacgaccagcacgccgcatgacgcattatttaaatcctttctcatgcaccctgacaccgcgcgggattttatggagatccatttacctaaagatttacgtgaactgtgcgatctcgacagcttaaaactggagtcagccagctttgtcgatgaaaaattgcgggcgctacactccgatattctgtggtcagtaaagacccgcgaaggcgatggttatatctatgtggtgattgaacatcagagccgcgaggatatccatatggcctttcgcctgatgcgatattccatggcggtgatgcagcgccatatcgagcatgataaacgccagcagctaccgctggtcatcccgatgctgttttatcacggtagccgtagtccttacccctggtccctgtgctggctggacgaatttgccgacccgactaccgcacggaaactttatactgcagcgttcccgctggtggatatcactgtcgtgccagacgacgagattgtgcagcatcgcagagtcgccttgttggagttgatccaaaagcatattcgccagcgcgatctgatggagcttatcgatcaactggtagtattactggttacagagtgtgctaatgacagccagataactgcgctgttaaattacattttactgactggcgatgaagcgcgttttaaggcgtttatcagcgaactaatcaggcgaatgccacaccacagggagcgcataatgacaattgcagagcgaattcataatgatggatggctgttgggaagggagagggggaggaaagaagggaaagtagaaggggaacggagcctcctccgattgttgttgcagaatggggccgatcctgaatggatacaacgatataccggactttcggcagagcaaatgcaggcattagatcagcccttgcctgaaagcaagcgtgatccatggatcgagtactaatcagagacggatgacaaacgcaaagcagccttatgcgctacgcttatcaggtctacataacccattcaatatattgaactttaaagattttgtagtcctggtaaggcgttcacgccgcatccggtatgaacaaagcacactttgcctaagccatgctggaacgtggcgatgcccctgcaaagataaaacgagtcacaggcgattcgtgagaggaaatcaggggcctcgccactaattcgaattcattccattgcctgatacacggcctcgccaatttgcttcagtgcttcgcgataggtttcgctgagcggcaaagcgcagttgatacgcagacaattacggtatttgccggaagccgagaaaatcgagcctgccgccacctggattttcatgcggtacagctgccgcgcgacgcagaccatatcgacctgttcaggcaattcgatccacagtaaaaatccgcctttcgggcgcgtaatacagatttcgcagggaaaatactcccgtatccagcaggtataaagcgccaaattgcgctgatagatctgccgcatccgccggatatggcgatgatagtgaccttccagcacaaacgttgccgccgccatttgcgtggacggcacattaaagctactgatggcgtatttcatatgcatcagtttatcgtgataacgccccggtgcgacccaacccacgtgcaggcctggagcaatacttttactgaacgagctgcacaacagcactcgcccgtcgatatcccaggaatgaatggtccgcgggcgcggatactccgttgccagttcgccgtagacatcatcttcaaaaatcacaatatcatgacgttgagcgagagagagaacggcccgtttgcgcgcgtccggcataataaatcccagcggattattacagtttggcaccagaatgatgcctttaatcggccactgttccagcgccagttccagcgcttcaacgctgatgcctgtttctggatcggttgggatttcaatcactttcacgcccatgccgcgcagcatctgcattgaaccgtaataacagggggattcgaccgcgacaatatcgcccggtttacacaccgccattaacgccatcgacatcgagttatggcagccgctggtgatgatgatgtcatcggcggtgaccaccgagccgctgtcgagcatcaggcgggcaatctgctctcgcaacactcgctgaccggctaacaagtcataaccgagaacggtttgtagattatgctgcaccacccggcttagctcccgccacagcggtttcaggctgggcgtttcgacatccggcgtgcttttgcttaacggaacaatggaactgtcgctatgcgccaccagcatatccagcacctgatcccactgggtaatttccaccgggcgctgcaccggacgcgtcatcggcggtactggcggctgggctttacgttgtgcgacaaaataacccgaacgcggctgcggagtgatgagcttcatcgtctccagtatctgatacgcctgctgcacggtactgatgctgacgccgtgctcctgacttaagctgcgcaccgacggcaatttctccccgtgacgatacagcccttgctcaatccgttcggcaagcagagtcgccagatgttgataacgcgtcatgctgtattccttatgtggaccatacagagagaaaaaccggtacagatgaggctaaaaaaccggatgcagatgctgttttaacctgtctgtatgttaaataaaagtaatatttgaatctgtattgtgaactgccagaaggtggatgatgaagcctctgaaagatgaggaggcagcagatggaatttcacgaaaacaaagccaaaacgccgtttatcagacttgtgcaactctggcaggcggtgaggcgttggcggcggcaaatgcagacccgacgagtgttacagcagatgagtgatgagcggttgagagatattgggttacgcagggaggatgtggagtgagggggcaattcatcgcggataaacaggatttctctataacctccacaaggaagtggttattattgcgaaatcatcgcttcacggaaagacgtcagaatgaaagctacagaagcccgcctactcgattttttaaaacgttcgcagcagtttgttattcccatttatcaacggacttattcatggacagaacaacaatgtcggcaactttgggacgacatcattcgtgccggaaagcgtgacgatatatcagcgcattttatcggttcggttgtttatattgagcaggggttgtatcaggtttctggtatttctccgttactggtcattgatggtcaacaacggctgacgaccgcaatgttgctgattgaggctttatcgcgccatcttggcgaagacgaagtttttgatggcttttcagcaatgaaattgcgtaattattatttgctcaatccttatgagtccggcgagaaaggttttaaattactactgaccgagactgataaagacagtttactggcgttaataaaacaaagaccaatgccagaaaactattcccatcgaataatggaaaactttactttctttgatgaacaaattgccaaactcggtgatgacttgatccccttatgtcgtgggttagcaaagttattaattgtcgatgtggcgcttaatcgtggtcaggataatccgcaactgatttttgaaagtatgaactccaccggtaaggcgttaagtcaggccgatctggtgcgcaattttattctgatgggcctcgaaccagagcatcaaacccggttgtatgaagatcactgacgtccaatggaagtcgcctttggtcagcaaggttacagcgaatattttgacagttttatgcgtcattatctgacggtaaaaacgggggagatccctcggacagatgaagtctatgaggcatttaaactccatgcccgcagccagagtgttgctgaaaaaggcgtagatcggctggttgaagatattcatatctacgcggagtattactgtgcaatggcattgggaaaagaaagtgacaaatcgcttgctacggcttttcaggatttgcgcgagttaaaggttgatgtggcgtatcctttcttactggcgctttatcatgactataaaaatgacgatttgtctcacgaagatttcctgagcataattcgtttaattgaatcttatgttttccgccgtgcagtatgtgcaattccgacgaattctttgaacaagacgtttgccactttttataaggtcattaataaagaaaaatatctggaaagtattcaggtacattttatgaacctgccttcatatcgtcgtttccccaacgatgatgaatttaaacgggaattaaaagttcgcgatctctataacttccgcagccgcagctactggttacgaagactggaaaacgataaacgcagagagcgcgtggaagagtttacgattgagcacattatgccgcagaacgaaaatctgtcggctaaatggcgtgaagagctgggaagcgactggcagcgtgtgcataaagaactgttacatacgttggggaatctcactttaacgcgctataactcccgctacagtgacagacctttcgcggaaaaacgcgatattgaagacggctttaaacatagcccgctctatttgaatatcggtcttgggcagtgcgaaaaatgggatgaagccgccattcgcgcccgtgccgatcgcctggccgatctcgcggttcaggtctggcaagcgcctgctctttctgaagaggttttagctgtttatcgggggcagcctgaaaacaaaaccagttacagcctgagtgattatccttttcttgctgatggttcgcatagccgggtgttattcgatcatcttcgcgatgaaattatgcgcctggacgcagggatcacgcaggaagtattgaagctctatattgcgtttaaagcggaaacgaattttgttgatgttgtgccgcaaaaaagccgactgcgattgtcgcttaatatgcagtttcatgaactggtcgatccgaaaggtattgccaaagatgtgacaaatgttgggcgatggggcaatggtgatgtggaaattggtttcagtgacctcgcacaacttccttacattatggggttaattcgtcaggcatttgaaaaacagatggagagcgcgttggtataacgcagcgaaaaatgcccggtagtcctggcgctaccgggtcaatgtatcaggcaactttctgtttacccgcaatcaccccaataaactcctgcacctgcctttgtttacgcgccgacagcttgcacacctggcgcagcgactgcatcagttcgctctcggcggcggcgggtggttgggcggtgaggacaatacagccttccatcactttgacatctaccaccgtgccggtggcaaaaccggcggcttccagccactgacctttcagggtgatggcgggaatacggctgtaatccgggtaacgactcgcataactcacggttaattgacggttatttgccggggagacttctgcttcgaacggttgtgcaatagaatgcgtatcagtcataactgctattccctataaatagtgattgtgattagcggtgcgggtgtgttggcgcacacccgcaccgcgctaaatacctggatatatcatcagtaaatacaaggaaagtccagctaaaaattaatgaaaataagatgaaaattagcgtgaaatataaattttgctgatgtgaataaagcggctatttagccgctttattggttttttgaaggcgagaaaattagtttatcgccgcgtcagtcagtgcgtctgcaaggtgcagttgggtttgctgggcggattgggtagatgtttttaggttttcacaggctaaaatatattctctaattcttgataaaatcaagttctgttgattaaggggtggtaatggaattgttattcctctgattttacctacactgagattatatagaccgctagtggtaacagcgagccgttgcatttcttttataccagatggcgaattaagatataatgcaataaactcttgataaccttcaattatcccgcgaactcttatcaggtgattttgataaacacatttttcgattggagcgtgccaaatagcacaacgaccaatttcatcagcactaccattaccttcaacgattagaatatcgtttttttctaacgaccaaaaagctaactcatgaggttctacttcgaatctttcaagtttatcaatattaatatcacctctttggacattagcaacccgcaaataagggaaatggtttttaacaggtcgtcttttcggttgtttttgtattcctccagaaacaaacgttaagtcatcaatacgacaccactcccacccttccggaagttcaaacggtttttcctcatcgctaatcgggggcaacggtttttgtttttttattttcccttctttcaccagttgagctttttcctgcgcaattcgtttgagcagttcagaggcgggttcgtcattcggatcctgcggcacaagtttacccattacggccagttgcagaatggtctgttttaacgtatccacgctggcttcggtggtaaaaagtgtgtcgaaatgctcgctaatacgcgcccagttttcagccagttcctcggcgttttggctgtctgtaagcgttcccaacagggtttcaaccagttgctgatgtgcatccagactggtcagggattgctgttccagttggtcacagagaactgtaagttctctgatttttctgacaatttgttgttgttcatttataggcggtaaagcgattatctgttgttccattttttctttagtcatatggagcattgcaataccgttaccttgcgattttattttatctgtaatggataaaagaaaatcatgtataaaatatttgtttgagtactcttctgcaaataaatttaatttccatatatggtagtgataaattactttttctcctgtccaaatgaatggcccaaaagatgcggaccaagcgtatattaaatcaccattatttatatatttgttttcgtctaattggaggtcagagtaataccactcatttgatgtgaatagattaccaacacgcagcaaaggagtgcctgtttgaagcatttcatgttttttatatgctcgaccgttaataacctccatgagatctgcaacccgcacccactcccatccctccggcaattcaaacggcttctcttcctcgctaatttccggcagtggtttttgctttttaattttaccttgcttcaccagctctgctttttccgccgcaatacgcttcagcagctccgacgccggttcatcgttcgggtcttgcggcaccagtttaccgcgcactgccagttccagaatcagctcacgtaatttcttaatgccatacaaatcaattttaccggaactgccgcgcccggcggtggaacgggtttgcaacgccgaggtccaggtttccatatgatcaacgatcagcttttccacactcatcagttaacctccttgccagacagcgcagcgccgagaatatcgcgcagttgattacgcagcgtctggatctccgcctgttgctttgcatactgcgctaacagttcgtccggatcatggctgacggtttccgcctgatgtgggtttttaatatccagattgaagttacgcgcaatcacgtcatcaatgctgactttccacgcttgctcattctcgacgcggctggcaaaaccatcggcctcgttaccccaccagtcgatctccgcctgaaactcttcaaacttcatcggcttggttttgctgtagtttttcacgcccgccggatacggatgctcatagaaccaaatctctttggttggctgacctttggtaaagaacaacaggttggttttaatgccggtataggggttaaacaccccattcggtaaacgcacgatggtatgcaggttgcactcttcggtaagtagctttttgattttggttttaacgccttcgccaaatagtgtgccatccggcaataccaccgccgcacgaccgtttttcgccagtacttccacaatcagttgcaggaacagatccgccgtttcgcgggtttgcatctctgccggaaagttcttctcaataccgtcttcttccgtgccaccaaacggcgggttggtaacaatgacatccagttgttcatcccaggaggaaagcggtttgttcagggtgttgtcgtgacgaatttgtaccggtacttcaatgccgtgcagcagcatattggtggtcgccagcaggtgcggaagctgttttttctcaacaccgtggatctgttgttgcagcgtctgatgatcggcgacgctcttcacgtatttgttctttacatgatcaaatgcgcaggcaagaaaaccgcccgtaccgcaggccgggtccataatggattcgccgagtttcggatcaacgcgatccaccataaagcgagtgacggcgcgtggagtatagaattcgccagcattgcccgcagattgcagatctttaaggatctgttcgtaaatatcaccaaacagatggcgttcgctggcgctggtaaagtcaatttcgttcagcttgttgatcacctgacgcagtagcgtaccgtttttcatatagttataggcatcgctgaacgcctgcttcaccacgtagccgcgtgggtttttatcgataggtgcagtgaggtttttcaacgccgggaacagatcatcattaacgaattccagcagggaatcaccggtaatgccctgagcgtttgcggcccaactgcgccacaaataacgctgtgggatcggatattgatagttatcctgctccagttccagcgcctcttcctgggcatcgaagattttcaaaaacagcagccaggagagctgaccgagacgctgcgcatcgccgtccacaccggcatctttgcgcataatatcttgtaatgatttgattactgaactgatagacatgttgtattccatgaaaaacaaggccttctgcaacatgatggttgcagaaggcgcaaaagagagttgttaagcagagcggggcggtaattggtagatttcgttttccagctcgctgagcgcctgattatacccgttacggtcgccaaatccggttttaataatctccggtaaggtgcccatgctgtcgaatggtttaagtttcagcacctgaatactttcgatctcctgtacgcccgcatcggcgtatttatccagcagattatcgagcacggcttgcgctgcttcagagtattttgtgaagtagttccgcttgcgcacattctcggcgcgctctttgcgggttaacggcggctgaccatacactacgtggcaaagcatgtcgaatgggtcgagatctttaccgacttcttctgccagtacttcccagatgatcccctgttgctccagctcgtgaatgatcgcttctttgcgatcggcgtcctgccacttgcgggtaaagtcatccagcgaggcatattctttgagcagtgttttgcgggtgtaatctttaaaggattcggtaaccagtttaccgtcggcgtcgtaatactgaacacgctgtgcaataacgcccaccgctacaccgttgacgtgaaacttgcggattttcttctcgtcttcttccggaagtgggccgacatcatcggtatcggtaacctggtatggtggcgcaggcggttcatcaacgcctgttacctgttcttcgtcatgttcgctgatttcttcgagtttctcttcaaaatcagattctggatcggcgatatcctctggtgtggtatccatgactttttcgggaatgccatcgaaacgctcatcggcaaacagttcggtggcttttttaaagtcgaggatggtaaaccagagtttgccgtaacgttcgtcgatgcgtgtaccacgaccgataatttgcttgaatttggtcatcgactggatgttctggtccagtactaccagtttgcaggttttagcatccacaccggtggtcatcagctctgaagtggtcgcgataaccgggtacggttttttcgggttgatgaagttatccaactgagctttgccaatttcatcatcgccggtgattttcatgacgtatttgtcgttctttttcacctgctccgggttgagattaaccagggcgcggcgcatacgttctgcatgatcgatgtcgttacagaagacgatggttttatccatcgggttggtgcgcttgaggtagtcggtaatggttctggcaaccagttctgtgcgttcgtcgattaccatcgtgcgatcgaaatctttctggttatagatacgatcgtcgatcacctcgccgtttaagtcagtttgccctttggttgggcgccagccttgcagatcaacatcaatatcaacacggacaactttataaggggcgaggaagccgtcttcgatcccttcttttagcgagtagacgtaaaccggatcgccgaagtaatccgtgctggagacttcatgcgtctcttttggtgtggcggttaagccaatttgggtagctgaactgaaataatcaaggatctctcgccaggcgctgtcttcggatgcgctgccgcgatggcattcgtcgatcacgatcagatcgaagaaatctggtgcgacttgtttaaacgctttttggtcttcctccgggccagttatagcctgatagagcgcgaggtgaatttcataagcgggatcaatggtgcgtccgctgactttggtcattgccgtaccaaatggctggaaatcattatttttggtttggtcgaccagaatgttgcgatcggcaaggaacaaaatgcgttttttattttttgatttccacaggcgccagatgatctggaatgcggtataggttttccctgttccggtcgccatgaccagcagaacgcggttttgcccgttggagacggcttcaatggttttgttgattgcctgaagctggtaataacgtggcgatttaccgctgccatcgtcgtaatagtcctgagtaatcaccggaagctgagcttgtgtgtatcctttccagaggcagaatttttgccagagttcagcgggggaggggaagtcatccagcgttatttgcttttcaaggcattcaccttcggctgcggtggcatcgcggaagataaagccatccccgttggtggcaaaaacaaaaggaacgtccagcaggcgcgcatattcaatgccctgttgcatccctttgccaatttcatgtttgttggcttttgcttcaatcacggctaagggaatgcctggtttgtgatacagcacgatgtcagcagattttaccgttctgcgtgccgcaactttaccacgtacgatgactttaccgtcccggagtttgacctcctgtctgatttgcgttgtgttgtcccagcctgcattgagaatggctggcataacgcatttggtaatgatgtctgcttccgtcaggttacttaggttcagttccgccatggggtgttctcgcttttatcaggacgattctgattgtacataaaatcaatagcctggctatgatttagggcggtgtttcaacgtaaagtacgtagcagagatcacattgatatctctgttatatcttgcttgaattaatctgggcatatcagagacagataaacagaagttacaggaaccatatcaactctaacaaaatatataaaaatcttatagttgcgtttctttcgagcaagaaagataatgttattgttgattgtttgattgggtatatgaaatggaagctaaagaatgtaaggtgcaggatatccttactgaaaacaaaaagtttattattccttcttatcagcgtccttacagttggacggtagataatgcagagcaactcattgatgacatttataaaagctctcaatcagaagagaatgaatattttattgggagtatgatttgtatcaataaagggcaaaatcagtatgaagttgtagatggacaacaacgtcttacaacgttaagcattattgtctccgagctaaaaaaaatcatcccgattcaggggataaaagatgatttgcaaaaaagagttctgcctattgatgtttattctgatgaaacagatgaaccaagactaattgttagaaaaaaagagtatgatctttataaatattatatactgcaggattctaaagattataaacctgaaaagccatcggatactgagttagtattcattagcaacgctgaaacaattagagattatttgttgcggttatctgttgatgagttgaagttgcttgctaaatatattttgcaaaatgtatatatcgtatttgtgcaaactgatgatttcgcatcatcatttagactctttaatgtattaaatagtcgaggtttacctttaagtaatgcagatcttttaaaaaatgcactgtttgaatcagcttctacgcataataaaaaatcagagcaaatagaatcagcatggtcgcaaattgaagatatggttggagtgagacggcttgataaatttcttactcttcataagctttccgagaaaaagatcgtgacagggtgttacaaaaaggttttgaagcttttattgaaaatctccagcagcaatttgatggagatgctattgctatgtcactgatgttggttaattctgcaaaaaattatactaagattttagagaatgattttgaacacccttctatacgacgaaaaatagcatcgctaagtaatttaggggtagatgagtggattcctccggttatggcattcatgaatcgaatggctcgtacagaagattttaatttagatgatttttctcaatttattaccgcctttgagaaggtatatatgcatgggtggttaaaaaaacaaattaaaagccaaagagaaatggtttgttattcagctctggtagcaataaataatgatatgccttttgattctgtgataaatcagataaaccaacatgcagataattcaggttttatagctgctctggatgaagatttatatgagcctcgtccgaatcaagtgaacttaataaaagcaattttgcttcgcttagatatggagcaacaagatgagagcgtgattaaaacctatacggggagaatcacaattgagcatattcttcctcaagcattagttaatgaatactggattaatagattccaacctcaagagcatgtctactggctgcataaaataggtaatttaacactcataagtggttccaaaaattctgaagcacaacactatgattttatcaaaaagaaatctatttatgagaaacttaatagtaaaagttcttttgatttaacaaaagatgtttgtaattcttcagaatggggattggctgaactgaaaatgagacatgaaaaaatgaaaacgcaattgaagaagctttggttggtctgacatatctaaagagttccactcgtaataatgttgcggtggaactctcaaaaagttgatctttcccgaacttacttcctcaaccccgcaaacgcagcccgaatctcttcctccggcagctggatcccgataaacaccatcgtgctatgcggtttttcatcgccccacggcctgtcccagtcggcgctgtagaggcgctggacgccctggaacagcaggcggttaggttcgccgtcaatccacagcatccctttgtaacgtagcagtttatccgccgactccagcagcaggttttccatcacgcgggaaacttcgctgatatctaccgggtaatccagttccaccacaatcgacgaaatatcgttttgtttatctgcgataaagtggaaacgcggtttggtgctgacgacgttttcttccagcataaaaccgttggtgttgaacagcaggcccagatcgatgtcgccgtgggtgacggtgtagaccggtgcgcgggcgttgatgcgcgccaggcgttcatgcagtttttctgcttcgcctgcgacgtcggttttggtcagcagaatgcggtcggcgtagccaacctgtgactgggcgatggtgaactggttcatctgctcatcggcatgtaccgcatccaccagcgcaatcacgccgtccagcagataacgctggcataaaacttcatgggagaaaaaggtctgaataatcgggccgggatcggccatgccggtgcattcaatgaccagacggtcgaactgaatattgcccttgtcgagattgtccagcaggtcgagtagcgcgtcctccagctcgttggagcgcgaacaacagatgcagccgttggtcagcgttttgatctgcgtggcgcggtcgccaatcagttgatcatcaacagagacttcgccgaattcgttttcaatcacggcaattttgtagccgtgctgttcattaagaatatggcgcagcagggtggttttgcctgcgcctaaaaaaccggtgagtagggtaactgcaatcgggttcatgctctctccattaacaacagcgcataccgcctttaccatcgccgccgtagcgcgcgttctggcgttcgcggaagaattcttcatagctcatgtacggcttgtcgggatggttggtcttcatatgctcgacgtagttgtcgtagtctggaatgccaatcaacatcttcgccgcctggccgagatatttttttgcctgtcctaagttaccaaacattttgccttccagatatgcgtaaagcccggaaggtccgggccggggatttgccggatgcggcgtaaacgccttatccggcctacgatagacactttgtaggccggatacgcgcagcgcatccggcaaccggttagtggtgcgaagagatcttcacgccgccttccgggattggaacgtacggtgtttctttgtcagtacgtttgtcgctgtttcgcaccttcagccaggttttgaaaccgtagaagatgatgctgtacaccacaatcaggaacagaatactcagacccgcgttagtgtagttgttcacaacgatgtggttcatgttggcaatctgctgcgccgtcaggtcagtaccgttagcaatcttctctttgtactggcttgccatgtagaagaagccttccatctgcgggttggtgctgaacagtttcagacccagcgcccaggtggtgcagataagcagccatacagccggaacaacagttacccagatgtattgggtgcgcttcatcttaatcagcacaacggtgcccagtaccagcgctacggctgccagcatctggttggagataccgaacagcggccacaggctcttaacgccgcccagcggatcgaccacgccctgatacagcaggtagccccacagacccacacagcccgcagtaccgatgataccggcaaccagagagtcggtttttttcaggaacgggatgaagttacccagcaggtcttgcagcataaagcggccagaacgggtacccgcatccagcgcggtcaggatgaacagggcttcgaacagaataccgaagtgataccagaagcccatgtcagccatcggcagcactttgtggaacacatgagcgatacctaccgccagcgtcggcgcaccacctgcacggttcaggacagaaggctcaccaatgtctttcgcggtttgcaggatctgctctggcgaaatcacgaagccccaggagctgacggtcgccgccgcgtgtgcggtaacgtctttcagctgcgccatgatgagcggcgcgttctcgccacccatttcatgcaggttaggcatggtgatgccaaggcccgcaggcggggtattcatcgcgaagtaaagacccggttcgatgatggacgcagcaaccagcgccataatcgccacgaaggactccatcagcattgcgccgtagccaatgaaacgcgcgtcggtttcgttagccagcagtttcggcgtcgtaccggaagagatcagcgcgtggaagccagataccgcaccacaggcgatggtgatgaacaggaacgggaacagagcgcctttccacagcgggccagtaccgtcaatgtactgggtcatcgcaggcattttcagttccgggttcagcaccacgatacccagcgccaggccgacgataacgccgattttcaggaaggttgccagatagtcgcgcggtgcgaggatcagccacaccggcagcagtgcggaaacaaacgcatagccaatcagcgcgaaggtaatggtggtgtctttaaaggtcagtgccggaccccagtacggatcgtgagcaatcacgccaccgaagtagatagaggcaaccagcagcacgataccaatgacagagacttcacccacacgccccggacggataaagcgcatgtagatacccataaacagcgcaatcggtacggttgagcaaacggtgaagacaccccacggactttcggccagggctttaaccacaatcagcgccaggacggcgaggatgatgatcatgattaagaaacagccaaacagcgcgatagtccccggtactggtcccatctcttctttgatcatctcaccaagagatgcgccattacggcgagaggagataaacagcaccataaagtcctgaaccgcaccggccagcacgacccccgccagcagccacagcgtgccaggcaggtagcccatctgcgcggcgagaaccggacccaccagcggaccagcaccggcgatagcggcgaagtggtgaccaaacaacacgtaacggttggtcggaacgtagttcagaccgtcgttgttaataaccgcaggcgtcgcgcgcgtggggtcgagtttcatcaccttctgggcgatgtacagactgtagtagcgatacgccaccagatacaccgatacagaggcgaccacgatccacagggcgctgacgtgctccccccgacgtaatgcaactaccgcgaggcagaatgcaccgatgattccgagaatcacccagggtatgtgcttgaatatctttttagtatccatagtaaaacctggcatgtattgattaatagttggccgaagccgttctaggtttgcgttgcgtttgaggaggtaaattgaccgctatcctgtagtgatgttgccagagttacgcgcgcgtaaagtaaggtaaataactgagtggttattttagggatgtaagcggtcagttttgcggttgagcggcaaaggcgtcgtttaagtgacgataaatatgtgattcatatcacatatttatattgtgaataatttatgtaaataatggctttttaaattcagagtgtgaataaaattactcggcgtaatctccgcgggatattcataaagtttttcctttccaggccgaaaatcttgcatcggtccacaggaaagagaaactatgttaaaacgtatcaaaattgtgaccagcttactgctggttttggccgtttttggccttttacaactgacatcaggcggtctgttctttaatgccttaaagaatgacaaagaaaatttcactgttttacaaaccattcgccagcagcaatccacgctgaatggcagctgggtcgcgttgttgcagacgcgtaacaccctcaaccgcgcgggtatccgctacatgatggatcagaataatattggtagcggttcaaccgttgctgagctgatgcagagtgccagtatttcgctgaaacaggcggaaaaaaactgggcggattacgaagcgttgccgcgtgacccgcgtcagagcaccgccgcagcggcagagatcaaacgtaattacgatatttatcacaatgcgctggcggagctgatccaactattaggtgcaggcaaaatcaacgagttctttgatcagccgacccagggatatcaggacggtttcgagaagcagtatgtagcttacatggagcaagacgatcggctctatgatatcgccgtcagcgataacaatgcctcctacagccaggcgatgtggattctggtgggcgtgatgatcgtcgtactggcggtcatcttcgccgtctggttcggtattaaagcctcgctggtagcgccaatgaatcgcctgattgacagcattcgtcatattgcaggcggcgatctggtgaaaccgattgaggtggatggctctaatgagatggggcaactggcagagagtttgcgccatatgcagggagagctgatgcgtaccgtcggtgatgtgcgcaacggggccaatgccatctatagcggtgccagcgaaatcgccaccggcaataacgatctctcttcgcgcaccgagcaacaggccgcttcgctggaagagacggcagccagcatggagcaactgaccgcaacggtgaaacagaacgccgagaatgcgcgtcaggccagccatctggcgttaagtgcttctgaaacggcgcaacgcggcggcaaagtggtggataacgtagtacagaccatgcgcgatatctccaccagttcgcagaaaatcgccgatattatcagcgtaattgacggcattgccttccagaccaatattctggctttgaacgcggcggttgaagcagcgcgcgcgggtgagcaagggcgcggttttgcggtggtcgcgggtgaagtgcgtaatctggctcagcgcagcgctcaggcggctcgtgaaattaaaagcctgattgaagactcggtggggaaagtagatgttggctctacgctggtcgaaagcgcaggggaaacaatggcggagattgtcagtgccgtgacccgcgtgacggacattatgggcgaaattgcttctgcttctgatgagcagagccgtggtatcgatcaggttggcttagcggttgctgagatggaccgggtaactcaacagaacgctgcgctggtggaagaatctgccgctgccgccgccgcgctggaagagcaggccagtcgcctgaccgaagctgtggcagtgttccggattcagcaacagcagcaacagcagcgtgaaacatcggctgtggtaaaaaacgtgacgccagctacgccgcgtaaaatggcagtggcagatagcggggagaactgggaaacgttttaatcgccataaaaatgcccgataagcaaaatgttatcgggcatagggagtttaatctttacgcgggtcgttgatcggctgacgaaccaggaagatgtacgccagtgctcccgctgcggtgacgcaaccgcagatgattagtgccagacggaatgagtgggtggtatcaacaataaaaccagtaatgatcggcgcaaaagaggcgcagatgaagctggcaaagttctggatactgcccaccgacgccgtcatgcgagaagcaactgcgacgtggatcaagccccagcaggatgttccggcaaagtgaatacagaacagtgccatgccaatcagcagaaccgccgtcatggatgttgtcgcttgcggtacgaccagcgtaaaggcggcagaacagaacatcccggcaataatgcagatcttacggcttttaatcggagccattccccctttgaccagccagtcagtaacgtaaccgttgaccagcatcccggcagccccaaacaggaaagggatagccgccatcaaccctgtgctttttaaatccaggttataggctgtttgcaggtaaccaggaagccaggccagatacagccacgcagtgtagttgatgccactgaatccgagcatcattccccacattgtgcggttacggaacaggctgcgccattcggcaaaactgagcggatctcggcgggcattgacgctacctgcattgagataagcttgttcaacggcagtcagttctacgtgctcgcggttgcgatagagcatataccagccaatggcgagaaaaatccccagcacaccaatggtaataaacatcccacgccagcccatcaccagcatcatcgccgccagaatcggtgggcttacggcaacgccaatggtagaagctgcgttgaagaagcccatcgggcgtccgcgctctttgatgttgaaccagtcgttaatgacttttacgccacatgggttcatcggcgcttcaccaatccccataccgatacgcaccaacacgaactgcgtaaagctgtgcaccatgccagacatggcctggaacagtgaccagaagaacatccccagtcccagcatcaggcgtgggcctttacgatccaatagtgggccgcaaggaagttgcgcaatcccgtaagcgagtgaaaacacggagagcaaagcgccgatttcggtggcacttaatcccaattcttcacgaatcgttaaatttgctaccgacagcgaactgcggtcgagataattgattaccgccgcaaaaaataataacaacatggcggtggtttgaatgcgtttaattcgggtactgcgttgaactaatccatctggtggcacgggaatatctgccgacgaagatggagtaaatgaagaacgcggatcgagggtgatattttctttttccacgccggactcctgtatttataattttaattgtttacgtaattgtgcattacgcaaggttgacattaacggcaggttaaagttttaggactttactaccgctcacaaaaacatttttagtcgactgattgtgagcataggtaagcgggaatttcccggtatttatcttttgataaaaccgtgcacccgctaatagtttgctgtttttaatccgtacttaatgagcataacgcgtgttctcattaatggatcgaatcattgattgtttagctgaattcaaatggttacggagcgcaagggtggcatcaaggtcactgcggcaaatcagagcgctgagaatggtcatatgctcatcgacggcaatgatattgcgctgtttaagatcgctttcgtcccattgatagtgaaaatgaaagatgactgagatgatctcaagagattgatcaaaaagatattgtcggcagctgaaagcagtaaggagtgaaaatctctgtcaagttgcgagaacatgcgaaagctattgccgatgttgtcacgcagtagccgatgacgttcgagcatggttttcgcctgcagccagcggggatcatgatcaggcaggttgagaaagtgctgaagtgaatgtgtttcgagcatttcgcgtagttcaaacagctgctcggcgtaggattgatcgaattgcttcatgctccactggccgcgcttttcgctttgaataagattataacggccgaattttaaaagatattctcttactacaaccgggctgacacccgcggcccgagccagttgcagttcagaaaaagtttccccagggcgtaactggcgctggtttatcatcgtgaaaaaagcctgctcaaacactttgttttgttcactcattgaagcggtagtacaggcgaaaccgtcatcatggtcaggtttacgcgcaatcacatagtcgtttccaacctgcgttaagacgccgcattcgcgtaagtggctgagaatatgacgcactgtagtgcggctgatgttgtacatttccgccagcgcactttgcgatggaagtggggaagggatatgaccccgcgccatatcatcaatgacctggttaatcacattgtggcgtaaattttgtgaacgactcatattttcctccttgtgagtccattaaaacccgatttaaaacatttttatgcgtgtgttttcacaaaacagattttccgttccgctgccatttttcattttcattgatatctaaggcaacaaaaaatggagagccgaatcatgtctacgatgaatgttttaatttgccagcagccgaaagaattagtctggaaacaacgcgagatacctattccgggtgacaatgaagcattaataaaaattaagtctgtcgggatttgcggtaccgatattcatgcctggggtggaaatcaaccattttttagttatccacgtgttttaggccatgaaatatgtggggagattgttgggctgggtaaaaatattgctgatcttaaaaatggtcagcaagttgctgtgatcccttatgttgcctgtcagcaatgcccggcgtgtaaaagcgggcgtaccaattgctgtgaaaaaatttcagtcattggcgtgcatcaggatggcggttttagtgagtatttgagcgtgccggtggcgaacattttgcccgcagacggtattgacccgcaggcggccgcattgattgaacctttcgctattagcgctcatgcggtgcgtcgcgcagccattgctcccggcgagcaggtgctggtggtcggggcggggccaatcggtctgggcgcggcggcaatcgctaaagctgatggcgcacaggtggtggtggcggataccagtccagcgcgccgtgaacatgtggcaacgcgtctggagttgcccgtgctggacccgtcagccgaagattttgacgcgcagctgcgggcgcagtttggtggttcgctggcgcagaaagtgatcgacgcgacaggtaatcaacatgcgatgaataacaccgtgaatttgattcgtcacggcggcacggtggtatttgtcggcctgtttaaaggtgagttgcagttctccgatccggaattccataaaaagaaacgacgatgatgggtagccgcaacgccacgccggaagattttgctaaagtcggtcgactgatggcggaaggaaaaatcactgctgacatgatgttaacccatcgctatccgttcgccacgctggcagaaacctacgagcgcgatgtgattaacaatcgtgagttgattaagggtgtaattactttctgataaggcgagattattaaagttgccatgcagcgtccggggaagtgttgggcgctgtttttttttctgtttctcaatgatgttttgtaggccggagaagatgtgtaggtcgcaccttatgcgacctacacatcagtcagaaattacccttcacgttccacaactttaatttccaccatgccgatcccgagcttacgcggcgagtgtccgaggatattcccttcgttggttgagacaggttccggcggcacaattaccagtgtgtcggcatcggttgggttatcgaaatgcagtgtggtggtggtcacttcattgcccagcacaagagtttgttcttcattgcctacgcgtaccggaataggacggctggcgttattgccgtatgctttggcggtaatcaccaggtcaaatttcttcggcagcggatgcttgtactcgatttttacttcatcgcccagctgcgcgttggaccagcggccccacgactctggacgggaaatcccactaaactgtttcacctcttctggcgcaccggcgacgttgaagatgaaactgtcggctttgtagcgaatatcgttatcaacaattttcagcgtatcgacattgcctttataacgcgccatgtcgatgaccgtatctttaaatgccgttttgccctgccatgttgttttgtcaacatgctgaacaatttgctgaccgccaagctgcccttgcgagacacaccagtcggtggagagtgccagttccggagcccagagttgtgccatcttatagcaacggtcaacccagacgaaattgtcgcgtggagcgaaatcggccagctggaaacgcagcggtgctgagtattcgctttccggcagcggttccacgcgtttgtctgaaacccgcaacagcagcggcaaacggaaatggctacccgagaaggcaatcatgtttttctgctggtcgatggtgaactctttcatctctttagggaatttccacaggcggatgatatccggcttccacgccaatgttttctctttgatattgaggaagatttccgacattgactgcccggataaactgctacgaccaagtccgagatagttatcgccaccgagaatgtccagcaccgtcgcgccgttatccatcgtgttacgcttcactgccagcgtctcttgctgcggcttgtcgccacgaatgacaaaaaacaggttattgcgatcctgcttattgaggtatttccacgccgtgttgttcatcgctaaatggtcagaagagacgacgatgacggtatctttaaaccacggtgacgctttgattttgttgataaacgccgcgatattctcctggctgcaacttaccgcgctgaatgactggttcggcttaccgtcaaaatcatattttttgcggttacaggtacgcgagataaaaccatccgggtgatgggtatcgactgtcagggtaaacagtgagaatcgctgactagaacgggaaagctcttcaaactttttccacgcttcatcgagaacggtatcgtcgtagaatccccagtcgttgcgatagtgcgggtcggccaccacgcttttcagctcttctgagccgtataaatggtcgaaaccgtgcgacttcaggaacacatctttaccggcaaaacgcagattcgcgccctgcacgaaatagttctgataacccgagtttttcaggatatcgcccagacagatgttctgcgggaagaagctggaaacagaagcggaggcgttgccttcaaagggggcaaacagcggtatgccgcactgagaagccaccatgcccgcaatcgtgtaatccgttcctggcagctgctgcgtgtggctgaaatccaggccttcatttttcaacgcgcccagttcaggcgtgagatccgggaaagcttcgttatcaaaataggttcgctcgagactttcgccgtagatataaaccaggttgagtttcgggtcagggatagttttcgacggctctttataataagccgcaaagtccgggtcgccgtcgcgtgactgggatttcaccagttccgttatctgacgaaatgccgggctggcgtccaccgaacccagcgccagtaagagcgccagcaggctgtaaccaaaatggtgcggatgatgacgacgacggcgcaggatccagcccagcgcaccgaacaccgccgtcagccccagcacaatgccgatacccggcaggatgtatttgctgacgccagcaccggtcaggctattggttaaggtatagagaaccgcgtcgttaataccatcgccagtaaaatagtcgctggcaaacagggtgatatttaaaacgacaaatagccccagcaccgttaatgtggctgcaaaccaccaggtgttacgtcccgctttccatgcgtaaatcagcacagaggcgagaaaaagggcgaaagagagtagttctgacaacgggcgatcctcactaaaccgggccgtttagccaacgtttaagctttttgagaagcacaatgtaatggcgtcgccatattgctgcaattctagtgtcaaaaaaatgcgatgttgttaggaattagtttataaacagacttttttgatcgcggtcgcttcccgtgtaacagggggaaaaccgtccaggagcagggaaaagggcaggagagagccgcgtcagccgggtaacagctaaaacgcggcgtttcgcggttcaggaaatgaagttcagcccctgctttaacaccagatcgcaggctttggttttcaccttttctgccagcggagtcgttccgatgttatccagattgagttgctgaccatctttggttttcagcaaaccctgaatgccatccagatagttggtgtcttctttttgttcttcactgttcaggcccagcttttccagcacctggttcttgatgttttcggcatcggttaccgacgccagcttttgcttcgcgcagtattgcagaatgcctgcggcattgttcatgttatctgcgcttaaggcctggttcccgctgctaagcaagttagttaatgacgcgagcgaccaaccgccttcctgtgtcgtgctgttttggttgccaagttcgctggcggcgctggagagcgcatctttccaggacgcagcatgcaccccggtggaaattaatgcgctggcggcaatggcacagcacagaagatgtttaacagttttcatcatcattactcaaggtggaattgtgtcgcagtataccgccagaaacggggattaatactctttacctgttacccggctacggtagctatcccagttgaagatcacccacaaactgttacccaggcgcatacggtccatcacgcgttcgcccagcaacttggtcatctcttccatattactgttggtcagcatcccggttgggcgtttggaagaagagcggcgatcgacgatctggttgatgatcacttttcgtatttcgattcggtctgcacgccgatctcatcgatcaccagcagatcaacgttgctcagatcgttaagcagttgttcttcgctggtactgctattcctgaaggtatctttcatcgccgacataatatcggccacggtgatgatcaatacggatttaccgcgtagcagcagctcgttgcagattgccgccgccagatggtttttgccggttcctggcttaccagaaaagatgaagctggcgatgttgccgtcaaactcttcgacatactggcgcgctttgcttaacgcattcatctgcccttcacactcaacgcgatagttctcaaaggagcagttctgatgcagtggacgaataccggagcggttaaaggtgcgctgcattttcatcgcccgattttcacgttcgagagcggcggagcggatcgccccttgttctttctgccaggccagtagctcttcacccgttttgaatgcaggtttgatatgggcaggcatcattttttgcaggcgttgcatcaggtcgccaacgtttttcatcgttaccctctgaatcctggtggaatttggctgtcaggttcgctgaccgtattcacatctcgtttcggcagtccgccgttgctggcacgaccgatttgcaggctgcgcgccagtttttgttgccactgcacatggtgaaagactttaccttccgcctgccagtaggcaatgaatgaggccagttcttcggtggtcaccggctctcttagtgccacgccccatagcgccgccaggcggataaagtcggcatcgggttgccagtccggatacatggcgaatttccccatgggtacagcaacgggagcggcttgcggttcctgatagagttgatcgtccagagcgacatcgcttcccggacgcgccagcttttcttccagcgccagcagttcagccaggcgtgcaggcgtgacggcataaaacgccggggcattgttagcaaatacggcaaccacaccgccttcagcttttgccagaacggtttggtgatcgtgtaccagggcgtcaataccaacgacgtccggggtcaaaactctggaagacatactgtttctcaaatatggaatgatgaacgagaagggagataacttttatagtaacacacggaggagaggaggctgtctctcatccgtgtgcttaagcgaggcaattttatacgcgagggcgcttgcggtacaaccataatccaggaatggaaagaccgatggataacgcaccaacaatcgatgaagctgtaagaaagttggttaacagggtaatcatcaacggttcgctataacctaactggctgatttttaccgccgaaatcattgcggtataagccgatatgcccgggaacatagggataacggccgccacggtaaacactttcggatgcgccagataccagcgcgaccattgaataccaatggtgccgaccagcatagaagccataaaagttgaccactcaatattcagcccgctggtcattaagatcattcgtgaaccatggccaatcgcgccaagcagcgcacaccagcgtaacgcccgcacgggaacgttgaacaccatcgcaaagccgaccgctggaatggcggcgaggatcatatcctgcgccaatgcaaacagaaactcgatcacacccatccgcgtagcccccaaatcgtcagtgccatcaccacgccgacgcaggtagccagcgtcagcagactggcgatcgcccagcgtgccagtccggtattgatgtggcctttaaacatatcggcgacggcattaatcaacggaaagcccggcaccagcagcagaacgctggcggccatcgcaatggtgggtgtatcgctgaaagtggggagttgcaaaagcaatccggaaatggtggtggcggcgaaagcggtaaggcaaaagttgatctgtggatgaagatgacgttgtgccagcagctggcggatatacatcgcggtcgtactggcaaagaaggtgatgacggcaccatcccagccaccgttattgagtttacagaaacaggcgcaagaaaggccaaccattaaggctaccagccatcttgggtaacgtaatggctgaatttggctaaatcgtttctctacgcctttgtaatccagcagatgatgctccgcaagaatcacaatgtgctggacttcagtcaccacatgcatattaatgccgcgatcgtgattttttcgtgtcgatgtcaggcattgcccatctttaatagttgtcagcactatggcgttcgaagagatagaactttcgacgctgtccattcccaacgcccgacccagtcgtgaggaaagctcatcaaccaacgcgctttccgcaccatgttgcaaaagaaataatccacactggatacaaagccgcgttacggctcgctgttgctcagtttgcataactcgccctttgtcatagacgtgctgcgtattgttcagataatgagaatccatttgtatcatgaagcacggttgttttgcggtaggttaagatcaaaattgcgctgattaatcctggttatcgggacaagctcggtgataaaaagcgaattatctctcgccgcaaacaaactatcacatgaatattatcactataatgaatttattgttttagcctttacgggtcaggataatagatagctgggcgcgttttttagtgttaacaagttaaaatcatcagattttattgaataaatattgattgtgtgattcccgcattctgcgggaagggatatcatttaattataaattaaatgaatgtgatttctgtttttcattaagtattcctaacaacttaatgtagatattttaaatgtctccaggctatttcaccaggttatcatttgatgctaaccttctgacacatgcagtggagttgttgtgcagcaggagtatgctgatatgaaagtgaatgctaaggataatttattcgcttaatctattaatttgctggaaacatttaaggaatgaatatcctgaataaaccatcataatttttagacagtggatgtggaggaaatatgttgccaggatgctgcaaaaatggaattgttatcagtaaaatacctgttatgcaagcagggttaaaagaggtcatgaggactcacttccctgaatatgaaataatatccagcgcctctgcggaggaccttaccttattacaattacgtcgttccggattagtcattgctgatttagccggtgaaagtgaagatccacgttctgtttgtgaacattattattctttaatctcacaatatcgggaaattcactgggttttcatggtgtcacgctcctggtattcccaggcagtagaactgctcatgtgccctacggcgacgttattgtctgatgttgaacccattgagaatctggtcaagaccgtacgttccggcaatacgcacgcagagcgtatcagcgccatgctgacttctccggcaatgactgaaactcatgattttagctatcgctccgtcattctcactctttcagagcgcaaggtactgcggctattaggtaaaggatggggcatcaaccagatagcttcattgcttaagaaaagtaataaaactatcagcgcccaaaaaaacagtgcgatgcgtcgactggcaattcacagcaacgctgaaatgtatgcatggataaatagcgcgcagggtgcaagagaacttaacttgccttctgtttatggagatgccgcagaatggaacacagccgaattaagaagagaaatgtcgcactcatagaaaaatgcgtcatgagtagtatcggtattgagagtttattcagaaagtttgcgggtaacccttataagctccatacctataccagtcaggagtcatttcaggatgccatgtcgcggatctcgtttgcggcggtcattttttctttttctgccatgagaagtgagcgcagagagggattatcttgcctgactgaactggcgattaagtttccgcgtacccggcgtttagttattgcggatgatgatattgacgctcggctgattggttcattgtcgccatcaccgctggacggtgtattaagtaaagcgtcaacgctggagatttttcatcaggaactctttttgtcattaaatggtgtacgtcaggcgaccgaccgactgaacaatcagtggtacattaaccaaagccggacgctaagccccacggagagagaaatattgcgctttatgtcgcgtggctactcaatgacacaaattgccgagcagcttaaacgcaatatcaaaacgatccgtgcacataaatttaatgtgatgtcgaaactgggcgtcagttctgatgcagggttgttggaggccgcagatattctgttatgtatgcggcattgcgaagcaagtaatgtgttgcatccctattaatccgcatgatgccgggtttacttccccggcagtgctttcatttcagcgtacaatcgccacattgctgcacatccggtaagcgataacgctggcagcaagtgcggcgcaccagcaggccatcgcgcagtaccacggtacgccagagtggattatcttcaccgttcgtgagcgttttctcaaaaaagagggcatggcgcagcgattcaaccgtcgcctcgccgagcagctgcttcatctcagtgagataccagttgatcaaataaccggtattactccagataagtttgccgttgatctctccggtcgcttctagtgcctgcacaaccggaaccagcgcctggctgattaacgtttccattcgctgctgcggcgaatgtggtgttgcgtttttatcttcacacatatcgacccagaaacaggcgacgcgtccggtttcgtgaaactcagcatggaaatgttccggcgacacatctaatgccttttcctgcgtcagtagcgccagcattaatggtggcaccatcaggccgatataccattgtgcccatagtgagatcagcggtttgttctcgcggatcatcgttggttggttgcgatagatatgatcggaatagaccgcgagtagagaacttagcgcattcggtgatgaccattgcgccagcgtcatggcgttaagcggagcgggttcatccaggcggataaactcgagcaaatgttcacgatgtttggcgatcgtcgcacgtacggcttgtgcaagcccagcatcctgcggctggagatgcgttcgccagatgatatcttcatagagcggtgcggaacgataggccataatcgggatagtaatctaaatgataatgattgctaatcctagcgataggtttacccgatagcaagggatttctctggcttgcaaatgataaaaattatcatatgatattggttatcattatcaatgaaagagatgaaaccatgttgcaacgtacgctgggcagtggctggggagtgttgctgccgggattgctgattgcagggctgatgtatgcggatttatcgccggatcagtggcggattgtcattctgatgggattgatattgacgccggtgatgctgtatcacaaacagttacggcattacattttgctaccatcgtgcctggcgcttagtgctggcatcatgctgatgctaatgaatttgaatcagggatgaaaaatcaaggaagaaacaagaaaggaagtaaagataattggtgcgaggggggggacttgaacccccacgtccgtaaggacactaacacctgaagctagcgcgtctaccaattccgccaccttcgcacagtcatcttacttttttgatatcgcctcgtttggtgcgaggggggggacttgaacccccacgtccgtaagaacactaacacctgaagctagcgcgtctaccaattccgccaccttcgcccagtgcgagcaatatcaacgtggtttttggtgcgaggggggggacttgaacccccacgtccgtaaggacactaacacctgaagctagcgcgtctaccaattccgccaccttcgcataccatcaattcttaaaaagaattgctaccacggaggcgcattctagtggttttcagcttttcgtcaatagttaattatcgccggaggtgtaattgctggaaaaatgtccatcaggaaactaacgtgcaggtttggtagttttgtaggtcggataaggcgttcacgccgcatccgacacggtatttgggtgcagatgccagatgcgacgcgggcgcgtcttatctggcctacgaagggctaacgtgcaggttttgtaggtcggataaggcgttcacgccgcatccgacacggtattcggcgagataattaacctttcttcgcctggcgggtcataatggcgcgatacaccttgaaacgcccggtttgcgcaatcacttcatggaagccaaatgtctcatccagcacgtccgggtaaggcaggaaggcgttcgctacaattcgcagctcgccgccgctattaagatgacgcaccgcgccgcgaatcagcgtttgcgccgcatccaggctggtttgcatcccatcgtggaacggcgggttggagatgatcatatcaaaacgacctttcacctcggaaaagacgttgctggcaaagacttcaccttcaacaccgttggccgcaagtgttgcgcggctggcttctaccgctggcgcagagacatcgcacaaggtgagacgaattttcggcgaatggcgcgcaaaggcaactgaaagcacacccgcgccacagccgacatccagcactttacctttcgtgtgcggggttaacgtcgagagcagcaactggctaccgacatccagaccgtcgcggctaaacacgccaggcagcgttttgaccgtcaggccatcgacgctgtattcgccccagaatttatcggcatcaaataccggctgtttttccagacgaccaaaatagaggccacagcgacgagcgctgtcgactttattcaacggcgcataatctgccagcatctgctcggcgctgcgcacgccgctgcggttctcgccaacgacaaaaatatctgtccccactggcagcagagaaagtaaattcatcaactggaactgggcttccggtttgttcttcggccagtagtaaatcagcgtatcgcaatctgcgacgtcatccaccgtggcgaccagactgaaacgggcgttatcccccatctggcggcttaatacctgccagtggtggaattgctgggtatgagcacggctggccgcggtatctaaacgcgcgggcaggtcatcctgtaagtctccggcaaacagaatacggctttgttcgaaatcatcactgtgacgcagcaagacttcacttgccggggtaaatgcagacatggaatgctcctcaattgatactggcggcgattatagccatatgttggcgcggtatcgacgaatttgctatatttgcgcccctgacaacaggagctattcgctatgacatcccgacgagactggcagttacagcaactgggcattacccagtggtcgctgcgtcgccctggcgcgttgcagggggagattgccattgcgatcccggcacacgtccgtctggtgatggtggcaaacgatcttcccgccctgaccgatcctttagtgagcgatgttctgcgcgcattaaccgtcagccccgatcaagtgctgcaactgacgccagaaaaaatcgcgatgctgccgcaaggcagtcgctgcaacagctggcggttgggtactgacgaaccgctatcactggaaggcgctcaggtggcatcaccggcgctcaccgaattacgggcaaacccaacggcacgcgccgcgttatggcaacaaatttgcacatatgaacacgatttcttccctcgaaacgactgatttaccggcggcttaccacattgaacaacgcgcccacgcctttccgtggagtgaaaaaacctttgccagcaaccagggcgagcgttatctcaactttcagttaacgcaaaacggcaaaatggcggcgtttgcgattacgcaagtggtgctggatgaagctacattgttcaatattgcggtcgatcctgactatcagcgtcagggattgggaagggtgctgctggaacatctgatcgacgaactggaaaaacgcggcgtggcgacactatggctggaagtccgtgcctcaaatgctgccgccattgccctgtacgaaagtttaggctttaacgaggcgacgattcgccgcaattactaccccaccacggacggtcgcgaagacgccatcatcatggcgttgccaatcagtatgtaagacaaggtggaataatgaagtgggactggattttctttgatgccgatgaaacgctgtttacctttgactcattcaccggcctgcagcggatgtttcttgattacagcgtcacctttaccgctgaagattttcaggactatcaggccgttaacaagccactgtgggtggattatcaaaacggcgcgatcacttcattacagcttcagcacgggcgtttcgagagctgggccgaacggctgaacgtcgagccgggtaaactcaacgaagcctttattaatgcgatggcggaaatctgcacgccgctgccgggcgcggtttctctgcttaacgccattcgtggcaacgccaaaatcggcatcatcaccaacggctttagtgccttgcaacaggtgcgtctggaacgcacgggcctgcgtgattacttcgatttgctggtgatttccgaagaagttggcgttgccaaaccgaataagaaaattttcgattatgcgctggaacaggcgggcaatcctgaccgttcacgcgtgctgatggttggcgacactgccgagtccgatattctcggtggcatcaacgccgggcttgcgacctgctggctgaatgcgcacaatcgcgagcaaccagaaggcatcgcgcccacctggaccgtttcttcgttgcacgaactggagcagctcctgtgtaaacactgattgcctcccccccgttgatgggtaaaatagccgcaatttttcgttttcaacaagcgcggcgcgatgccgcttactcaagaagaaagaattatgacgttgtctccttatttgcaagaggtggcgaagcgccgcacttttgccattatttctcacccggacgccggtaagactaccatcaccgagaaggtgctgctgttcggacaggccattcagaccgccggtacagtaaaaggccgtggttccaaccagcacgctaagtcggactggatggagatggaaaagcagcgtgggatctccattaccacgtctgtgatgcagtttccgtatcacgactgcctggttaacctgctcgacaccccggggcacgaagacttctcggaagatacctatcgtactctgacggcggtggactgctgcctgatggttatcgacgctgcaaaaggtgttgaagatcgtacccgcaagctgatggaagttacccgtctgcgcgacacgccgattctcacctttatgaacaaacttgaccgtgatatccgcgacccgatggagctgctcgatgaagttgagaacgagctgaaaatcggctgtgcaccgatcacctggccgattggctgcggcaagctgtttaaaggcgtttaccacctttataaagatgaaacctatctttatcagagtggtaaaggccacaccattcaggaagtccgcattgttaaagggctgaataacccggatctcgacgctgcggttggtgaagatctggcacagcagctgcgtgacgaactggaactggtgaaaggcgcgtctaacgagttcgacaaagaattgttccttgcgggcgaaattactccagtgttctttggtactgcgctgggtaacttcggcgttgatcatatgctggatggcctggtggagtgggccccagcgccgatgccgcgtcagactgatacccgtaccgtagaggcgagcgaagacaaatttaccggcttcgtatttaaaattcaggccaacatggacccgaaacaccgcgaccgcgtggcgtttatgcgtgtggtgtccggtaaatatgaaaaaggcatgaagctgcgccaggtgcgtactgcgaaagatgtggtgatctccgacgcgctgacctttatggcgggtgaccgttcgcacgttgaagaagcgtatcctggcgatatccttggtctgcacaaccacggcaccattcagatcggcgacacctttacccagggtgagatgatgaagttcaccggtattccgaacttcgcgccagaactgttccgtcgtatccgcctgaaagatccgctgaagcaaaaacagctgctcaaagggctggtacagctttccgaagagggcgcggtgcaggtgttccgtccgatctccaacaacgatttgatcgttggcgcggttggtgtgctgcagtttgatgtggtggtagcgcgcctgaagagcgaatacaacgttgaagcagtgtatgagtcagtcaacgttgccaccgcccgctgggtagaatgtgcggacgcgaagaaattcgaagagttcaagcgtaagaacgaaagccaactggcgcttgatggcggcgataacctcgcttacatcgctaccagcatggtaaacctgcgcctggcgcaggaacgttatccggacgttcagttccaccagacccgcgagcattaattcttgcctccagggcgcggtagccgctgcgccctgtcaatttcccttccttattagccgcttacggaatgttcttaaaacattcacttttgcttatgttttagcggatatcccgagcggtttcaaaattgtgatctatatttaacaaagtaatgacatttctgacggcgttaaataccgttcaatgcgtagatatcagtatctaaagccgtcgattgtcattctaccgatattaataactgattcagaggctgtaatggtcgttattcatcacccatcgcttttgtgatggcgaccattgacttctgtagagggtgaagtctctccctattcagcaatgcaacctcgtgttgccaggctcaaattacgagcaaacatacaggaataaatcgatgactatgacaagactgaagatttcgaaaactctgctggctgtaatgttgacctctgccgtcgcgaccggctctgcctacgcggaaaacaacgcgcagactaccaatgaaagcgcagggcaaaaagtcgatagctctatgaataaagtcggtaatttcatggatgacagcgctatcaccgcgaaagtgaaggcggccctggtggatcatgacaacatcaagagcaccgatatctctgtcaaaaccgatcaaaaagtcgtgaccctgagcggtttcgttgaaagccaggcccaggccgaagaggcagtgaaagtggcgaaaggcgttgaaggcgtgacctctgtcagcgacaaactgcacgttcgcgacgctaaagaaggctctgtgaagggctacgcgggtgacaccgccaccaccagtgaaatcaaagccaaactgctggcggacgatatcgtcccttcacgtaaagtgaaagttgaaaccaccgatggcgtggtccagctctccggtaccgtagattctcaggcacaaagtgaccgtgctgaaagtatcgccaaagcggtagatggtgtgaaaagcgttaaaaatgatctgaaaactaagtaattcgtcgtaattcgtcctcccgaactttgtcgggaggcgcgatgtgcaccacactaaaaatatcgcattgagtgattttcacgctcatatcaagcggtgacattaactatggtaaaggagacgcttatgtttcgttggggcatcatatttctggttatcgcgttaatcgccgccgcacttgggtttggtggtctggccggtactgctgcaggcgcagctaaaattgtctttgtcgtcgggattattctgttcctggtgagtttgttcatgggccgaaaacgaccctagatttcagaccattaagaaaattttatccaaagccagtccagcggactggcttttgcggttttagcgaataataaattgcgttactttgtccttctttcacaacaaaaacaggaaggcagaggtggggcagcgaatacctgtaacgcttggtaatattgcgccgttgtcgctgaggccgttccagcctggacggattgctctggtgtgcgaaggcggcggacagcgtggaattttcacggctggcgtgctggatgagtttatgcgcgcgcagtttaatcctttcgatctttatctcggcacatctgccggggcgcagaacctctcggcgtatatctgcaatcagcccggttacgcgcgcaaagtcatcatgcgctataccacaaaacgcgaatttttcgatccattgcgctttgtccgtggaggaaatcttatcgatctcgactggctggtggaggccaccgcaagccagatgccgttgcaaatggataccgcagcgcggctatttgacagcggcaaatcgttttatatgtgcgcttgtcgtcaggatgactatgcgccgaattactttttgccaaccaaacagaactggctggatgtgattcgcgcctccagtgcgatacctggcttttatcgtagcggagtgtcgctggaaggcattaactacctggatggcgggatcagtgatgcgattccggttaaagaggcggcaaggcagggcgctaaaacgttggtcgtcatccgcaccgtgccgtcgcaaatgtactacacgccgcagtggttcaaacgcatggaacgctggctgggtgacagtagcctgcagccgctggtcaatctggtgcagcatcatgaaaccagctatcgtgagattcagcaatttattgagaaaccaccgggccagctgcggatattcgaaatttatccgccgaagccattgcatagtattgcgctcggcagtcggattccggcgctgcgtgaagactataaacttgggcgtttatgtgggcgttattttctggcaacggtcggtaagttattgactgaaaaagcgccgcttacccgccatctggtgccagtggtgacgccggaatcgatagtcattccgcctgcgccagtcgctaacgatacgctggttgccgaagtgagcgacgctccgcaggcgaacgacccgacatttaacaatgaggatctggcttgatttgccgttttatcgacacccactgccattttgatttcccgccgtttagtggtgatgaagaggccagcctgcaacgcgcggcgcaagcgggcgtaggcaagatcattgttccggcaaccgaggcggcaaattttgcccgtgtgttggcattagcggaaaattatcaaccgctgtatgccgcattggggttgcatccggggatgttagaaaaacatagcgatgcatcgctggggcagttacagcaggcgctggaaaggcgtccggcgaaggtggtggcggtgggggagatcggtctggatctcttcggcgacgatccgcaatttgagaggcagcagtggttactcgacgaacaactgaaactggcgaaacgctacgatctgccggtgatcctgcattcacggcgcacacacgacaaactggcaatgcatcttaaacgccacgatttgccacgcactggcgtggttcatggtttttccggcagcctgcaacaggccgagcggtttgtgcagctgggctacaaaatcggcgtaggcggtactatcacctatccacgcgccagtaaaacccgcgatgtcatcgcaaaattaccgctggcatcgttgttgctggaaaccgacgcgccggatatgccgctcaacggctttcaggggcaggctaaccgcccggaacaggccgcccgtgtgtttgccgtgctgtgcgagttacgcccggaacccgcggatgagattgccgaagtgttgcttaataacacgtatgcggtgtttaacgttcgtgggtagtctgcccttcgtaagccggataaggcgttcacaccgcatccggcagtcgacgcacaatgcctgatgcgacgctgacgcgtcttatcatgcctacaggtctgtgccgaaccgtaggccggataaggcgttcacgccgcatccggcagtcggcgcacaatgcctgatgcgacgctgacgcgtcttttcatgcctacaagtctgtgccgaaccgtaggccacatccggcatgtcacaaatacagcgccggaaatatcaaccggctcaccccgcgctcccgtaacgcatcagccaactgctcaacgtcttccggcgtggcactcgcccagctttgcgcctcgccatacacgccgtgggcatgaaacgcgttcaggcgtaccggaacatcgccaagtcccttgataaacgccgccagttcttcgatgtgttgcaaataatccacgtggcctgggattaccagcaaacgcagttccgccagcttaccgcgctctgcaagcaaacagatgctgcgcttaatctgctgattatcgcgtccggttaattgctgatgacattcgctcccccacgctttgagatcgagcattgcgccgtcgcacaccggaagcaatttttcccagccggtttcgctcaacatgccattactgtccaccagacaggtgaggtggcgcagttgcggatcatttttgatagcagtaaacagcgccaccacaaacggcagctgggtcgtggcttcgccgccgcttaccgttatccctccaataaacagcaccgctttgcggatatggctaagcacctcatccacgctcatggattgcgccattggtgtggcatgttgcggacacatcttcaggcaggtatcgcactgctcgcagactacagcgttccacgccactttgccgtcaacaatctgcaacgcctgatgcggacactgtggcacgcactccccgcaatcattgcaacgtcccatcgtccacggattgtgacagtttttgcagcgcagattgcagccctgcaaaaacagagccagacgactgcctggcccgtcaacgcaggagaaggggataatcttactgactaaagcgcatctgctgttcatggcttatcacgcgcggctggcgttccagaatacgagtgttgcgtgcggcctcttcgcccagccaggtggtattggtacgtgagccttcggcacgatatttttccagatccgacaaacgcaccatataaccagtaacgcgaaccagatcgttaccgctgacattggcggtaaattcacgcattccggctttaaaggcaccgaggcaaagctgtaccagcgcctgcggattacgtttgatggtttcgtcgagcgtcagaatgtcgctgattccagagtaataataagcatgatgcggggcgacggtttgcagatgggtaatcggatccggttcatcaccatatggcaagcgtgcgccaggcgtggtgccgatatcggaactgatccccgactgtgcgtgtagcatggcgcgtttttgccagccatatttcacgggggtattggcgacaaactccgccagttgtgcgctgatgcgataacccacttcatttgcagcggcttctttaccgtaacgtgcgacaattccttctttctcacacagtaagttaactgcttccgccagtccgtacatgccaaacattggcacaaaacgttcagggttaatcagcccttctttcaccaggaagctattctcaaagaagtgtgattgttgatagaggaattcacaccgcgcatcgatgatggcgatctgctgctggcagtagtgcggtagagtgcgcgcaaagaagtcatccagcgattcgctgcgctcggcaatggctttcaggttaaggcgtaccagcgtgctgccaccacccgccagcggcagtgagttgtaacagctcacaatcccgtagcccccttttgtgaaaattttatcatgcacgggaccgttggcgatgtgcggtttgctacattcacagatgttcttcgccacttccagcagcaggtcatcaggggtgatttcaggattgtagataaaggtcaggttcggtgaaacctgcttcaactctgcgtctgcacgtaagattgcgcgggtaatgggcgaatcagacgggccgatattggcgtgcataaaggcatctggcagggttctgtcgaggtaacgccagaaacgttttattcgaatatctatctcgtcttgtgttagaattctaacatacggttgcaacaacgcatccagttgccccaggtagaccggcatcgatgtgaccgacggtacgtggtggtaaagaatggtcagcagagagagtgcgtcatcaagatctttcgcgccttccagctccagccattcggaaccgttcgccagaaaacgggcgtaatcgggtaagacatagcgcggtttgtacggcgcatgaccttcaaacatatcgcagattacaccctcatccagcgcgcggcgggcttcggcaggcaacgccgggtaaggcagattgttttctgcttccagtgccagaaaatggcgcttctgctccgggctaagcactgggctggtgacaatttgcaggcaacgttgttgcagtgcattttcatgagaagtgggcatcttcttttccttttatgccgaaggtgatgcgccattgtaagaagtttcgtgatgttcactttgatcctgatgcgtttgccaccactgacgcattcatttgaaagtgaattatttgaaccagatcgcattacagtgatgcaaacttgtaagtagatttccttaattgtgatgtatatcgaagtgtgttgcggagtagatgttagaatactaacaaactcgcaaggtgaattttattggcgacaagccaggagaatgaaatgactgatctgaaagcaagcagcctgcgtgcactgaaattgatggacctgaccaccctgaatgacgacgacaccgacgagaaagtgatcgccctgtgtcatcaggccaaaactccggtcggcaataccgccgctatctgtatctatcctcgctttatcccaattgctcgcaaaaccctgaaagagcagggcaccccggaaatccgtattgctacggtaaccaacttcccacacggtaacgacgacatcgaaatcgcgctggcagaaacccgtgcggcaatcgcctacggtgccgatgaagttgacgtggtgttcccgtaccgcgcgctgatggcgggtaacgagcaggttggttttgacctggtgaaagcctgtaaagaggcttgcgctgcggctaacgtactgctgaaagtgatcatcgaaaccggcgaactgaaagacgaagcgctgatccgcaaagcgtctgaaatctccatcaaagcgggtgctgacttcatcaaaacctctaccggtaaagtggccgtgaacgcgacgccggaaagcgcgcgcattatgatggaagtgatccgtgatatgggcgtagaaaaaaccgttggtttcaaaccggcaggcggcgtgcgtactgcggaagatgcgcagaaatatctcgccatcgccgatgaactgttcggcgctgactgggccgatgcgcgtcactaccgctttggcgcttccagtctgctggcaagcctgctgaaggctctgggccacggcgacggtaagagcgccagcagctactaaggcttgatttgccggatgacgcagcgatgctcatccggttccccgattacctcgtctcttttccacgggaggttaccttgtttctcgcacaagaaattattcgtaaaaaacgtgatggtcatgcgctaagcgatgaagaaattcgtttctttatcaacggtattcgcgacaacactatctccgaagggcagattgccgccctcgcgatgaccattttcttccacgatatgacaatgcctgagcgtgtctcgctgaccatggcgatgcgagattcaggaaccgttctcgactggaaaagcctgcatctgaatggcccgattgttgataaacactccaccggcggcgtcggcgatgtgacttcgctgatgttggggccgatggtcgcagcctgcggcggctatattccgatgatctccggtcgcggcctcggtcatactggcggtacgctcgacaaactggaatccatccctggcttcgacattttcccggatgacaaccgtttccgcgaaattattaaagacgtcggcgtagcgattatcggccagaccagctcactggctccggcggataaacgtttctacgcgacccgtgatattaccgcaaccgtggactccatcccgctgatcactgcctcgatcctggcgaagaaactggcggaaggtctggatgcgctggtgatggacgtgaaagtgggtagcggcgcgtttatgccgacctacgaactctctgaagcccttgccgaagcgattgttggcgtggctaacggcgctggcgtgcgcaccaccgcgctgctcaccgacatgaatcaggtactggcctccagtgcaggtaacgcggttgaagttcgtgaagcggtgcagttcctgacgggtgaatatcgtaacccgcgtctgtttgatgtcacgatggcgctgtgcgtggagatgctgatctccggcaaactggcgaaagatgacgccgaagcgcgcgcgaaattgcaggcggtgctggacaacggtaaagcggcagaagtctttggtcgtatggtagcggcacaaaaaggcccgaccgacttcgttgagaactacgcgaagtatctgccgacagcgatgctgacgaaagcagtctatgctgataccgaaggttttgtcagtgaaatggatacccgcgcgctggggatggcagtggttgcaatgggcggcggacgccgtcaggcatctgacaccatcgattacagcgtcggctttactgatatggcgcgtctgggcgaccaggtagacggacagcgtccgctggctgttatccacgcgaaagacgaaaacagctggcaggacgcggcgaaagcggtgaaagcggcaattaaacttgccgataaagcaccggaaagcacaccaactgtctatcgccgtatcagcgaataacggtatactgatctgatcatttaaatttgaagcactgagtacggagaacatatgaaacgtgcatttattatggtgctggactcattcggcatcggcgctacagaagatgcagaacgctttggtgacgtcggggctgacaccctgggtcatatcgcagaagcttgtgccaaaggcgaagctgataacggtcgtaaaggcccgctcaatctgccaaatctgacccgtctggggctggcgaaagcacacgaaggttctaccggtttcattccggcgggaatggacggcaacgctgaagttatcggcgcgtacgcatgggcgcacgaaatgtcatccggtaaagataccccgtctggtcactgggaaatcgccggtgtcccggttctgtttgagtggggatatttctccgatcacgaaaacagcttcccgcaagagctgctggataaactggttgaacgcgctaacctgcctggttatctcggtaactgccactcttccggtacggtcattctggatcagctgggcgaagagcacatgaaaaccggcaagccgattttctatacctccgctgactccgtgttccagattgcctgccacgaagaaacctttggcttggataaactctacgaactgtgcgaaatcgcccgtgaagagctgaccaacggcggctacaacatcggtcgtgttatcgctcgtccgtttattggcgacaaagccggtaacttccagcgtaccggtaaccgtcacgacctggctgttgagccgccagcaccgaccgtgctgcagaaactggttgatgaaaaacacggtcaggtggtttctgtcggtaaaattgcagacatctacgccaactgcggtatcaccaagaaagtgaaagcaactggcctggacgcgctgtttgacgccaccatcaaagagatgaaagaagcgggtgataacaccatcgtcttcaccaacttcgttgacttcgactcttcctggggccaccgtcgcgacgtcgcaggttatgcggcgggtctggaactgttcgaccgccgtctgccggagctgatgtctctgctgcgcgatgacgacatcctgatcctcactgctgaccacggttgtgatccgacctggaccggtactgatcacacgcgtgaacacattccggtactggtttacggcccgaaagtaaaaccgggctcactgggtcaccgtgaaaccttcgcggatatcggccagactctggcaaaatattttggtacttctgatatggaatatggcaaagccatgttctgataatgggtgcggcttgatgccctcaccccggccctctccctcagggagagggtgaaaacatgtagataaggataaaacaatggctaccccacacattaatgcagaaatgggcgatttcgctgacgtagttttgatgccaggcgacccgctgcgtgcaaagtatattgctgaaactttccttgaagatgcccgtgaagtgaacaacgttcgcggtatgctgggcttcaccggtacttataaaggccgcaaaatttccgtaatgggtcacggtatgggtatcccgtcctgctccatctacaccaaagaactgatcaccgatttcggcgtgaagaaaattatccgcgtgggttcctgtggcgcagttctgccgcacgtaaaactgcgcgacgtcgttatcggtatgggtgcctgcaccgattccaaagttaaccgcatccgttttaaagatcatgactttgccgctatcgctgactttgacatggtgcgtaacgcggtagacgcggctaaagcactgggcattgatgctcgcgttggtaacctgttctccgctgacctgttctactctccggacggcgaaatgttcgacgtgatggaaaaatacggcatcctcggcgtggaaatggaagcggctggtatctacggcgtcgctgcagaatttggcgcgaaagccctgaccatctgtaccgtgtctgaccacatccgcactcacgagcagaccactgccgctgagcgtcagaccaccttcaacgacatgatcaaaatcgcactggaatccgttctgctgggcgataaagagtaattgtgtttcgctgaaaggcgattgtcgtgtgaagccggagtgggagactgctccggctttttagtatctattcatcaatagcaactgatttatagatttactattatttttcatatggatagaaaataaaatctattcaagtatctattcacgaatctattcatttatgttcagccgtcatccaggaagggcatatcagcaactctggtggacaaccataaatttctgccattttgcttttgatgtttgagctaaaccgttccgtcttttcgatctattttagagaattaatcgagatacctaacattttacttacttcagcaagcgataatttatgcctgatacgcacggcggctagccaggaaatacgctggcttaacattatattgataatctcccgctcctggttttccagatcgatcatattcccttcctttggtattttaatcagcgagttaccttaccgcccccgctatccacgtcgacaactcccgtagctctttttcctggtccgggaagtcaaccaacagcgcttcgcactcttgttgcagcatatccgcgcggtacaggccgccttgcagtcgcccggcgagggcttccagcggcgcggggttgaggctgtcggtaaacacctgggcgcgggtgatatggcctttttcaacgtcgaaatgcagttccacgccgccccagctaaagcgttcatccagcagatgcgagaatgccggagcctgaccgaagttccattcccagctactctgacgggcaaaggtttcggcgaagtttggcaagtctggcgttttgtccggggagatgatttccgcttctacacgctcgccataatgggcgaaaaaggccttggttatggcctcgcaaacctgctcatgggtgatccccggcagcagctcggtgaggttggtcacgcgggaacgcactgaggtaatgcctttcgccgccagtttctttttatccggattgagatagtttgccaggcggctaaggtcggcattgagcagcaaggtgccgtggtggaagccacgatctttggtttcgcgataggccgatcctgagactttgcggtcaccttcggcggttttcaccaccagatcgttacgcccggacgcttcggcgctgacgccaagcgcgttcagcgcattgagcacaatcgacgtggagatggttttatcgtactccggcttgccagccataaaggtaaagcaggtattgccgagatcgtggaacaccgcgccgccaccgctactgcgccgtgccaggcggacgttatcttcttccatccgccgggtattacactctttccacgggttctgcgcgcgaccaatcactaccgtgtcggcattgcgccagagaaacagaacgcgctgcgtggcgggcatctggcgaaaaatacactcctccaccgccaggttaaaccacgggtcgtaagagtcagagatgagcaggcgtaatgtggacataacgatttcctttcttgtagtaatgggtcactcttttttctcgctttcttcctcttccggcaccggtttgctggcggttaacaggaagggcgattgctgccagcgggtacgtttaccctgtagcagcgtgcgggtcagcactacgccgattgccagtgaaagcagcaacatcaggcgtaaaatgttagtggtgttatccacctgttgggcttcggtggcgagcgtatgggtgtcgagcgtcaggcgcagatagccgagcggtccgtttttcccggcaattggttcgacaatctgctggttaaaatagccgcccgcttttttaccgtcgagcgccagccggtcgcgcacttcgacgctttcgccagaacgtgcgataagatcgccttgttcgtcatacacacccgcgtcgaggatacggctttcatccgttaactgatcgaggatcgcctgaatgcgtttttcatccggtgagtcggtacgcatcagcggtgcaacgttcagcgttacctgacgcgccagggtgcgggccagttcttccagctgtggattacgttgtcgctggtggttttgactaaaccatgacgctccctgcatcagcgccactaacaaggcaagacagaacaggacaatcactgcccgatgcagccggaatttcagttttgtgcgagccatcttccaccctttgaaaatttgagacttaatgttgccagaagcaatggatacaaggtagcctcatgcgttattttccctgcttcgaacgattttacaggagccttaatgcctaacattacctggtgcgacctgcctgaagatgtctctttatggcctggtctgcctctttcattaagtggtgatgaagtgatgccactggattaccacgcaggtcgtagcggctggctgctgtatggtcgtgggctggataaacagcgtctgacccaataccagagcaaactgggtgcggcgatggtgattgttgccgcctggtgcgtggaagattatcaggtgattcgtctggcaggttcactcaccgcacgggctacgcgcctggcccatgaagcgcaactggatgtcgccccgctggggaaaatcccgcacctgcgcacgccgggtttgctggtgatggacatggattccaccgccatccagattgaatgtattgatgaaattgccaaactggccggaacgggcgagatggtggcggaagtaaccgaacgggcgatgcgcggcgaactcgattttaccgccagcctgcgcagccgtgtggcgacgctgaaaggcgctgacgccaatattctgcaacaggtgcgtgaaaatctgccgctgatgccaggcttaacgcaactggtgctcaagctggaaacgctgggctggaaagtggcgattgcctccggcggctttactttctttgctgaatatctgcgcgacaagctgcgcctgaccgccgtggtagccaatgaactggagatcatggacggtaaatttaccggcaatgtgatcggcgacatcgtagacgcgcagtacaaagcgaaaactttgactcgcctcgcgcaggagtatgaaatcccgctggcgcagaccgtggcgattggcgatggagctaatgacctgccgatgatcaaagcagcagggctggggattgcctaccatgccaagccaaaagtgaatgaaaaggcggaagtcaccatccgtcacgctgacctgatgggggtattctgcatcctctcaggcagcctgaatcagaagtaattgctcgcccgccatcctgcgggcggcacagcattaacgaggtacaccgtggcaaaagctccaaaacgcgcctttgtttgtaatgaatgcggggccgattatccgcgctggcaggggcagtgcagtgcctgtcatgcctggaacaccatcaccgaggtgcgtcttgctgcgtcgccaacggtggcgcgtaacgagcgtctcagcggctatgccggtagcgccggggtggcaaaagtccagaaactctccgatatcagccttgaagagctgccgcgtttttccaccggatttaaagagttcgaccgcgtactaggcggcggcgtggtgccaggaagtgccattctgattggcggtaaccctggtgcggggaaatccacgctgttgctgcaaacgctgtgcaaactggcccagcagatgaaaacgctgtatgtcactggcgaagagtcgctgcaacaggtggcaatgcgcgctcatcgccttggcctgccgactgacaatctcaatatgttgtcggaaaccagcatcgaacagatctgcctgattgccgaagaagagcaaccgaaactgatggtaattgactcgatccaggtgatgcatatggcggatgtacaatcatcgcctggtagcgtggcgcaggtgcgtgaaacggcggcttatctgacgcgcttcgccaaaacgcgcggtgtggcgattgtcatggttgggcacgtaaccaaagatggctcgctggctggccctaaagtgctggaacactgtatcgactgttcggtgcttctggatggtgatgccgactcccgttttcgcaccttgcgcagccataaaaaccgcttcggcgcggtgaatgagctgggcgtcttcgcgatgaccgaacaggggctgcgtgaagtcagcaacccttcggcaattttcttaagtcgcggagatgaagtgacctccggcagctccgtgatggtggtgtgggaaggaacgcgtccgttgctggtggagattcaggcgctggtcgatcactcgatgatggcgaatccgcgccgcgtggcagtggggctggaacaaaaccgtctggcaatcctgctggctgtcttgcaccgtcacggtggtctgcaaatggccgatcaggatgtatttgtgaacgtggtcggcggcgtgaaggtaaccgaaaccagtgccgatttagcgttactgctggcgatggtttccagcctgcgtgacagaccgctgccacaggatctggtggtgtttggtgaagtcgggctggcaggggagatccgcccggtgcccagcggtcaggaacgaatttcagaagcggcgaaacacggttttcgccgggcgattgttccggcggctaacgtaccgaaaaaagcgccggaagggatgcagatttttggcgttaaaaaactctccgacgcgcttagcgtgttcgacgacttataatgagagatacggagggagatatgtcgtcatttgattacctgaaaactgccatcaagcaacagggctgcacgctacagcaggtagctgatgccagcggtatgaccaaagggtatttaagccagttactgaatgccaaaattaaaagccccagcgcgcaaaagctggaggcgttgcaccgttttttggggcttgaatttccccgacagaagaaaaccattggtgtcgtattcggtaagttctacccgctgcataccggacatatctaccttatccagcgcgcctgtagccaggttgacgagctgcatatcattatgggttttgacgatacccgcgaccgcgcgttgtttgaagacagcgccatgtcgcagcagcccacggtgccggatcgtctgcgctggttattacaaacttttaaatatcagaaaaatattcgcattcatgctttcaacgaagagggcatggagccgtatccgcacggctgggatgtgtggagcaacggcatcaaaaagtttatggctgaaaaggggattcagccggacctgatctacacctcggaagaagccgatgcgccacagtatatggagcatctggggatcgatacggtgctggtcgatccgaaacgtacctttatgagtatcagcggtgcgcagatccgcgaaaacccgttccgctactgggaatatattcctacggaagtgaagccgttctttgtacgtaccgtggcgatccttggtggcgagtcgagcggtaaatccaccctggtaaacaaacttgccaatatcttcaataccaccagtgcgtgggaatatggtcgcgattatgtcttttcacacctcggcggtgatgagatcgcattgcagtattccgattacgataaaatcgcgctgggccacgcacaatacattgattttgcagtgaaatatgccaataaagtggcgtttattgacactgattttgtcactacccaggcgttctgcaaaaagtacgaagggcgtgagcatccgttcgtacaggcgttgattgatgaataccgtttcgatctggtgatcctgctggagaacaacacgccgtgggtggcggatggtttacgcagcctcggcagttcggtggatcgcaaagagttccagaacttgctggtggagatgctggaagagaacaatatcgaattcgtgcgggttgaagaggacgattatgacagccgtttcctgcgctgcgtggagctggtgcgggagatgatgggggagcagagataaccgcgatgaaacggctcaaaggcgaggtataaaataagttttttgatgagttgaaaacctctctggaagaggctgtcgagattaaacaaggtttaaaagaatcagcacgggtgacccgctacgaatttgcggatactaaggctgttgtaggccggaaaaggcgttcacgccgtatccggcattcggtgctcaatgcctgatgcgacgcttaccgcgtcttatcaggcctggagattcacaacgtattgaaatttcttggtttgtaggccggataaggcgttcacgccgcatccggcattttacgcattacttcgcaatacgcttgtacttgatacgcttcggctccagtgcgtctgcgcccagcgtgcgtttcttgtactcttcgtactcagtaaagttaccttcgaagaactcaactttaccttcatcctggtagtccaggatgtgcgtggcgatacggtcgaggaaccaacggtcgtgcgagataaccatcgcacagcccgggaactccagcagggcgttttccagcgcgcgcagggtttcgatatccaggtcgttggttggttcgtcgagcagcagcatgttgccgccaacctgcagcagcttcgccagatgcagacgaccgcgctcaccaccggaaagttcaccaacgcgtttaccctgatcaacccctttaaagttaaagcggccaacgtaggcgcggcttggcatctcggtgttgccgatcttcataatatccagcccgccggaaacttcttcccaaacggttttgctgttatccattgagtcacggaactgatcaaccgatgccagtttcaccgtttcacctaaagtgatggtgccgctgtccggctgttcctgaccagagatcatacggaacagggtcgatttacccgcgccgttcggaccgatgatcccgacgattgcccctttcgggatcgagaagctcaggtcatcaatcagcaggcgatcaccgtaggatttacgcaggttgctgacttccagcactttatcgcccagacgcggtccaggtggaataaacagttcgttggtttcgttacgtttctgatattcggtgctgttcagctcttcaaagcgtgccagacgtgctttacctttcgactggcggcctttagttccctgacgtacccactccagctctttctcgatcgacttacgacgcgccgcttcttgtgaagcttcctgcgccaggcgctgatctttctgctccagccaggaggagtagttgccttcccacggaataccttcaccgcggtcaagttcgaggatccagcctgcaacgttatcgaggaagtaacggtcgtgagtaatcgccacaacggtgccttcgaagtcgtgcaggaagcgttccagccaggccacggattcggcatccaggtggttggtcggttcgtcgagcagcagcatgtctggtttttccagaagcaggcggcacaacgccacgcgacgacgctcaccaccggagaggttagcgattttcgcgtcccaatctggcagacgcagcgcatccgccgcacgctccagctgtacgttcaggttatgaccgtcgtgagcctgaatgatctcttccagacggccttgttcagcggccagcttgtcaaaatcggcatccggatcggcgtacagcgcatacacttcatccaggcgtttcagggcgttaaccacttcagaaaccgcttcttcaatggactcacgcacggtgtgttccgggttcagctgcggttcctgcggcaggtaaccaatcttgatgtctggctgcggacgcgcttcaccttcgatgtctttatcaatgcccgccataatgcgcagcagggtagacttacccgcgccgttcagacccaggacaccaatttttgccccagggaagaaactcagagagatgtttttcaaaatatgacgtttcggcggaacaactttgccgacacgatgcatggtataaacgaattgagccacgttggacttcgcctctatgtttatcgtgatgatgagttttcaaaggcgaagtgtagcctttttccccgcctaatcccagttggtcgatcaccttcgcagtaaaagtaaaaaagtgtccgtaacgtggcgtaaacggcaatgactggttagcataaatctattacgcggcatgacgctgcattgatgtatttacacttagaggatgcgcttgtggaaaaagccaaacaagttacctggcggctgttggctgccggtgtctgtctgctgacggtcagcagcgtggcgcgagcgactcactggatgagcagcgtagccgttacgcgcaaatcaagcaggcctgggataatcgacaaatggatgtggtcgaacaaatgatgcctggactgaaggattatccgctttatccctacctggaataccgccagatcaccgatgatctgatgaatcaaccggcggtgacggtcactaactttgttcgcgctaaccccacgcttcctcccgctcgcacgctgcaatctcgtttcgtcaatgaactggcgcggcgtgaagactggcgtggcttgttagcctttagcccggaaaagcccggaactaccgaagcgcaatgtaattactactatgcgaaatggaacaccgggcagagtgaagaagcctggcaaggggcgaaagagctgtggctaaccggcaagagccagcctaacgcctgtgacaagttatttagcgtctggcgtgcgtcaggtaaacaagatccgctggcgtatttagagcgtatccgtctggcgatgaaagcgggtaacactggcctggtaacagtgctggcagggcagatgcctgccgattaccagactatcgcctcggcaatcatttcactggcgaacaaccctaatacggtactgaccttcgcgcgtacaaccggagcgaccgattttacccgtcaaatggcagcggtggcgtttgccagtgtggcgcggcaggatgctgaaaatgcacggctgatgatcccgtcgcttgcccaggcgcagcagcttaatgaagatcagattcaggagctgcgcgatatcgtcgcctggcgtttgatgggcaacgatgtcaccgacgagcaggcgaaatggcgcgatgacgccattatgcgctcgcaatccacgtcgttgattgaacgccgtgtgcgaatggcacttggcaccggcgatcgtcgcggcctgaatacctggctggcgcgtctgccgatggaagcaaaagagaaagatgaatggcgttactggcaggcggatttattgctggaacgcggacgtgaagctgaagcgaaagagattttgcatcaactcatgcaacagcgtggtttctacccgatggttgcagcacaacgcatcggagaagagtatgagctgaagattgataaagcgccgcagaatgttgacagcgccctgactcaggggccggagatggcgcgcgtgcgcgagttgatgtactggaatctcgataacaccgcgcgtagcgagtgggccaatctggtgaagagcaagtcaaaaacagagcaggctcaactggcgcggtatgctttcaacaaccaatggtgggagcttagcgttcaggcaacgatcgccgggaagctatgggatcatctggaagagcgattcccgctggcttacaacgatcttttcaaacgctacaccagcggtaaggagatcccgcaaagctatgcgatggcgattgcccgtcaggagagcgcctggaatccaaaagtgaaatcaccggtaggggccagcggcctgatgcagattatgcctggtacagcgacccatacggtgaagatgttctctattcccggttatagtagccttgggcaattgctggatccggaaacgaatatcaacattggcaccagttatctgcaatatgtttatcagcagtttggcaataaccgtattttctcctcagcagcttataacgccggaccagggagggtgcgaacctggcttggcaacagcgccgggcgtatcgacgcagtggcatttgtcgagagtattccgttctccgagacgcgtggttatgtgaagaacgtgctggcttatgacgcttactaccgctatttcatgggggataaaccgacgttgatgagcgccacggaatggggacgtcgttactgatccgcacgtttatgatatgctatcgtactctttagcgagtacaaccgggggaggcattttgcttcccccgctaacaatggcgacatattatggcccaacaatcaccctattcagcagcgatggcagaacagcgtcaccaggagtggttacgttttgtcgacctgcttaagaatgcctaccaaaacgatctccatttaccgttgttaaacctgatgctgacgccagatgagcgcgaagcgttggggactcgcgtgcgtattgtcgaagagctgctgcgaggcgaaatgagccagcgtgagttaaaaaatgaactcggcgcgggcatcgcgacgattacgcgtggatctaacagcctgaaagccgcgcctgtcgagctgcgccagtggctggaagaggtgttgctgaaaagcgattgattttgtagcctggtaagacgcgtcagcgtcgcatcaggcgcttaatacaccgcattatgaaacggactcagcgccaggatcaccgcctggtgatagacgctggcgcgagtgagtttcccggcggtaaacacgccgatcgccccttccttacgaccaatctcatcaataccggtataacgcgacattacgggaccaagtgcctcaccttcacgcactttttccagaatcaccgcaggcaacggcaaagtagccgaacgcgcctcgccgcgctggctggcgttttcaatcaccacccaactgaaagtgctgtcaccatcgatgccagcttcaatcgccacccaaaaatcagcctctggaagtaaacggcgggcatttgctacccgatttcgtgcgccagcgcgcgtttcctcactgccaaagggttgttccggtacaccgctctcgacggcaacggatgcaatatggcaggatccttcgccgaagatctcgtgaaatgcctgcagaatggcctgaattttagcgggattggtggtcgcacagacaacttggtgcataatcagcattactcagaaaattaacgttacagcagtatacggaaaaaaagcatgttacaggtatacctagtccgccacggtgaaacgcagtggaacgccgagcgacgtattcagggccagtctgacagcccgctgaccgccaaaggtgagcaacaggcgatgcaggtggcaacccgtgccaaagagcttggcattacgcatatcatcagtagcgatttaggacgcacccggcgtacggcggaaatcatcgcccaggcctgcggctgtgacatcatctttgattctcgcctgcgtgaattaaacatgggtgtgctggaaaaaagacatatcgattctctgaccgaagaagaagagaactggcgtcggcagctggtcaatggcaccgttgacgggcgtattcctgaaggcgagtcaatgcaggagctcagcgatcgcgtcaatgcggcactggaatcttgccgggacttaccgcagggaagccgaccgctgctggtgagccatggtattgcactgggatgtctggtgagtacgattctcggattaccagcatgggcagagcgccgcttacgtctgcgtaactgttctatttcgcgcgtggattatcaggaaagcctgtggctggcgtctggctgggttgttgaaaccgcaggggacatctcgcatctggacgccctgcattagatgagttgcagcgttaacgacggatcggaatcagcagttcacagcgcagattaattgggcgatctcccgctttggcgtcttctgccgggtagtatcgctcaatatcctgacctttacggcgcgtcaggttgagcattggcatgcacgttccgtataccgtaaggataaactcctgcacgccggttcccagaccttcataggtaaacatcacatattcgccgccctgcagcatcaccggatgccccgtcagtacatagccatctgcctgatcctgggctaacgcggtggtatagaatacctcttgttcgtcgtctttatcctgactcggacgcgtttcattcaggccgtagagcactggcggaatggtcggcgcgttgccgagaaaatcgtgccagaactgataacgcatttcatggcggaaatcagagatttgctccagcgaacaggagtagctctgggtaacaccaatcagcggcgtatcttccagggtgacaaatttgtgctctggcattgtgaattcacccagacgtagcggcgggcgaataccaaaggcgctccattcaggagaacggcggtaaagtgcaggagtctgggcaaactgcttcttgaatgcgcgggtaaatgtctgttgagagtcgaagcggtattgcagcgcgatgtccagaatcggacgcgcagtcaggcgtagtgcgaccgccgatttcgacaaacgacgagcacgaatatacgcgccaatagcatggccagtgacatctttaaacattctctgtaagtgccacttggaataacctgctttcgccgctacattgtcgagcgacaggggctgatccagatgaccttccagccagattaaaaggtcgcgaataatgccggcctgatccataaaatatcctcatcctttcaacaacgagcacctgacatcaggtaattggataatagcattttttgctgttttagcattcagtgtttttttcttagtagagtatgttttagggcttgacggaaataaaagtattgagattttgttcttaatcaatatgttatttaccgtgacgaactaattgctcgtgtaatagataaaaatggtaacaatatgaaatacaagcatttgatcctgtctttaagcctgataatgctggggccattggctcatgcagaagagattggttcggtcgacaccgtatttaaaatgatcggcccggatcacaaaattgttgtggaagcctttgacgatcccgatgtgaaaaatgtcacctgttatgtgagccgggcgaaaaccgggggtattaaagggggattgggcctggcggaagatacctccgatgcggccatttcttgtcagcaagtcgggccgattgaactgtcggatcgtattaaaaacggcaaagctcagggcgaggtagtattcaaaaaacgtacgtccctggtctttaagtcgttacaggtcgtgcgcttttatgatgctaaacgcaacgcgctcgcttatctggcttactccgacaaagttgtagaaggttcgccgaaaaacgcgattagcgcggttcctgtcatgccgtggcggcaataacagaggcgatttatgcaacgggaaacggtctggttagtggaagatgagcaagggatagccgacacgctggtctacatgttgcagcaggaaggttttgccgtcgaggtctttgagcgaggcttgccggtgctggataaagctcgccagctggttcccgacgtcatgattctcgacgttggtttgcctgatatcagcggctttgaattatgccgccagttactggcgctccatccggcgttacctgtactgttcctgacggcccgaagtgaagaggtcgatcgcctgcttgggctggaaattggcgctgacgactatgtggctaaaccgttttcaccccgcgaagtgtgcgccagggtgcgcaccttactgcgtcgggtgaagaagttctcgtcgccgtctcccgtcatccgtattggtcattttgaattgaatgaacccgcggcgcagatcagctggtttgacacgccattaacgctgacgcggtatgagtttttattgctgaagacgttactcaagtcgccaggccgcgtctggtcccgccagcaactgatggatagcgtgtgggaagatgcgcaggacacctacgatcgcaccgttgatacccacattaaaacgttgcgtgccaagctgcgcgccatcaaccccgatctttcaccgattaatactcatcgcggcatgggatatagcctgaggggcctgtaatgcgtatcggcatgcggttgctgctgggctattttttactggtggcggtggcggcctggttcgtactggctatttttgtcaaagaagttaaaccgggcgtgcgaagagcaacggaggggacgttaatcgataccgcaacgttgctggcggagctggcgcgtcccgatttgctctctggggacccaacgcatgggcaactggcgcaggcgtttaatcagctacaacatcgcccgtttcgcgccaatatcggtggcattaacaaagtgcgcaatgaatatcatgtctatatgaccgattcgcagggtaaagtattgttcgattcggcaaataaagccgttgggcaggattattcgcgctggaatgacgtctggctaacgttgcgtggtcagtatggtgcgcgcagcacgttgcaaaatcctgccgatcccgaaagttcggtgatgtatgttgccgcgccgattatggacggctcgcggcttattggcgttttgagcgtaggcaaaccgaacgcggcgatggctccggtcattaagcgtagcgagcggcgaattttatgggccagcgccattttgctggggattgcactggtgattggcgcaggcatggtttggtggatcaaccgctccattgcccggctcactcgctatgccgattccgtcactgacaataagcccgttcctcttcctgaactcggcagtagcgagttgcgtaagcttgcgcaggcgctggaaagtatgcgcgtgaagctggaagggaaaaactatattgagcagtatgtttatgcgttaacccatgagctaaaaagcccactggcggcgattcgtggcgcggcggaaattttacgcgaaggtccgccaccggaagtggtggctcgttttaccgacaacattctgacgcaaaatgcgcgaatgcaggcactggtggaaacgttactacgccaggcaagactggagaatcgtcaggaagtcgttttgactgctgttgatgtggcggcattattccgccgcgtcagcgaagcgcgcaccgtgcagttggcagaaaaaaacatcactctacatgttacgcccaccgaggttaatgttgctgctgaaccggcgttactggatcaggcgctggggaatttactggataacgccatcgattttacccccgagagcggtcgtataacgctaagcgccgaagtggatcaggaacacgtcacgcttaaggtgctggataccggtagtggtattcctgactacgcgctgtcacgtatttttgaacgcttttactctttgccgcgtgcaaatgggcaaaaaagcagcggtctggggttggcgttcgtcagtgaggtcgcccgtttgtttaacggcgaagtcacgctgcgcaacgtgcaggaaggtggcgtgctggcctcgcttcgacttcaccgtcacttcacatagcttcaaattcttcccacatagccttcgtatcctgctgccattgcaaaggagaagactatgttgaaatcccccctgttctggaaaatgaccaccctgtttggtgcagtattgctgttgttgattccgataatgctgattcggcaggtgattgtcgaacgtgccgattaccgtagcgatgtggaagatgcgattcgccaaagtaccagcgggccgcaaaaactcgttgggccgcttatcgctattcctgtgaccgagctttatacggtgcaggaagaggataaaaccgtggagcggaaacgaagttttatccatttttggttacctgagtcattgatggttgatggcaatcagaacgtggaagaacgcaagatagggatttataccggtcaggtctggcacagtgatttaacgctaaaagccgatttcgatgtttcgcgtcttagcgagctcaatgcgccaaatatcatcttaggcaagccctttattgtgattagcgtcggggatgcgcgtggtattggtgtggtgaaagcgcctgaagttaacggaacggcactgaccattgaacccggtaccgggttagagcaaggcgggcagggcgtgcatatccctttacccgaaggggactggcggaagcagaacctgaagctgaatatggccctgaatttaagcggtaccggcgatctttctgtggtgcctgccgggcgtaatagtgaaatgaccttaaccagcaactggccgcatcccagttttttaggtgattttttgccagccaaacgggaagttagcgagtcaggttttcaggcgcaatggcaaagcagctggtttgctaataatctcggtgagcgttttgcttcaggcaatgataccggctgggaaaacttccccgcgtttagcgtcgcagtgacgacgccagccgatcaataccaattaacggaccgggcgactaagtacgccattctgctgattgcactgacttttatggcgttctttgtttttgaaacgctcaccgcgcaacgtttacacccaatgcaatatttgctggtggggctttcattggtaatgttttatttgctcttgctggcgctttctgaacatatcggttttaccgtggcatggataatcgccagtctgattggggcgttaatgaacggtatttatttgcaggcggtattgaaaggctggcgcaacagcatgttgtttaccctcgcgctgttgttgctggatggtgtgatgtggggactgctcaactctgccgatagcgcgctgttgttgggaaccagtgtgctggtggtggcgctggccggcatgatgtttgtgactcgtaatatcgactggtatgcgttttcactgccgaaaatgaaagccagtaaagaagttacaatggacgatcaattacgtatctggaaataaggttgaaaaataaaaacggcgctaaaaagcgccgttttttttgacggtggtaaagccgattaatcttccagatcaccacagaagcgataaccttcaccgtggatggtggcgatgatttccggcgtatccggcgtagattcgaaatgtttacgaatacggcggatcgtcacgtctacagtacggtcgtgtggtttcagctcacggccggtcattttcttcagcagttcagcacgagactgaattttgcctgggttttcacagaagtgaagcatggcgcggaactcgctgcgcggcagcttgtactgctcgccatcagggccgatcaacgaacggctgttgatgtccagttcccaaccattgaacttgtagctttcaacgctacgacgttcttcgctgacagtacccagattcatggtacgggacagcaggttgcgtgcacgaatcgtcagttcacgcgggttgaacggtttggtgatgtagtcatctgcaccgatttcgaggccgagaattttatcgacttcgttgtcacggccagtcaggaacatcaacgcaacattcgcctgctcgcgcagttcacgcgctaacagaagaccgttcttacccggcagattgatatccatgatcaccaggttgatgtcatattcagagaggatctgatgcatttccgcgccatctgtcgcttcgaaaacatcatagccttccgcttcgaaaatacttttcaacgtgttgcgtgttaccaactcgtcttcaacgataagaatgtgcggggtctgcatgtttgctacctaaattgccaactaaatcgaaacaggaagtacaaaagtccctgacctgcctgatgcatgctgcaaattaacatgatcggcgtaacatgactaaagtacgtaattgcgttcttgatgcactkcaacacccntttcaattatctctttcggtgttttgaacttcagtgtctttctcggtctgttgtttagctgagcagcaaccagatctagttcatattgagtatattgggcaagacatgtctttttaggaaagtactgccgaattagcccatttgtgttctcatttgttccccgctgccaaggactctgaggatcgcagaagtaaactttaacgccggtgctgacagtaaattctagatgtctggccagttccattcctctgtcccatgtcagtgattttctgagttctgacggtaaactcaggaatttgtcggtaagagcctgatttactgagacagaatctttgnccctgagtctaaggatgatcgtataacgtgattttcggtctacaagtgtggctatatgagagtttttgtacctgagactaaatcgccctcccaatgccccagagagcgtctgttatcgatatttcgggaacgttcgtgaattggtgttccgttcactatgttaatcgtacctctttcgcctttgcgggtatgacgcctgccatggcgaaggctatgcgaccgtcgcagatgctgtatattcaggtggtgtagcgcttcacggctacgaaagtacagcgttttataaattgtctcaggtgatattcgcagcgttttttgacgtggttttgttcgccttaaccatcctgatatttgctctggagaccatttcatctccagcttttccagaacaagctttcgcaatggcaaatttgatccagtaagcacggttttggccttttcgccattctgttggctcggttattagcatcaacagctttgtaatagcgtctgccccgattacgctgaacttcacgtgagatcgtcgaaggactgcgattcagcgcagtagctatcgcacgaatgctcattttggctgacaaaccagctcgtatctcctcgcgctcagacagtgtcaggtgagctacagcccgcttacgctcatggggttttatgccgccagtatcccttaacatagtgaagatcgttccgggttttgaacccaggatattcgctatttcactgaagcctgttccgttcttccatagttcaaaaacagaggctttttcctctgctgtaaatgttcgtctcattcaaaaaacctccgcaaccccatgttttcacataactgttgcgttgaccaattgaatctacgtaattgcgttcttgatgcactttccatcaacgtcaacaacatcattagcttggtcgtgggtactttccctcaggacccgacagtgtcaaaaacggctgtcatcctaaccattttaacagcaacataacaggctaagaggggccggacacccaataaaactacgcttcgttgacatatatcaagttcaattgtagcacgttaacagtttgatgaaatcatcgtatctaaatgctagctttcgtcacattattttaataatccaactagttgcatcatacaactaataaacgtggtgaatccaattgtcgagatttattttttataaaattatcctaagtaaacagaaggatatgtagcattttttaacaattcaaccgttagtacagtcaggaaatagtttagccttttttaagctaagtaaagggctttttctgcgacttacgttaagaatttgtaaattcgcaccgcgtaataagttgacagtgatcaccctgttcgcggttatttggtcaagaagagtggcaatatgcgtataacgattattctggtcgcacccgccagagcagaaaatattggggcagcggcgcgggcaatgaaaacgatgggttttagcgaactgcggattgtcgatagtcaggcacatctggagccagccacccgctgggtcgcacatggatctggtgatattattgataatattaaagttttcccgacactggttgaatcgttacacgatgtcgatttcactgtcgccaccactgcgcgcagtcgggcgaaatatcattactacgccacgccagtagaactggtgccgctgttagaggaaaaatcttcatggatgagccatgccgcgctggtgtttggtcgcgaagattccgggctgactaacgaagagttagcgttggctgacgttcttactggtgtgccgatggtggcggattatccttcgctcaatctggggcaggcggtgatggtctattgctatcaattagcaacattaatacaacaaccggcgaaaagtgacacaacggcagaccaacatcaactgcaagctttacgcgaacgagtcatggcattgctgacgactctggcagtggcagatgacataaaactggtcgactggttacaacaacgcctggggcttttagagcaacgagacacggcaatgttgcaccgtttgctgcatgatattgaaaaaaatatcaccaaataaaaaacgccttagtaagtatttttcagctttcattctgactgcaacgg

SEQ ID NO: 217 - DNA, 15245 bp, Escherichia coli
ttccacatattccagaatggcggcaaccattaattgctttgttattacccgaaaaaccagaaattgcacatgaaattgcccagcgtctactggggcaaaaaaattaccctcgcttgagtggttaaaaatagtggcgactgatgagcacattcttgcctcattagaaaaatatcacgagccatatgccatttttgatgattactattgtggtgcgatatggtcagccaccgtattacaggagcaaggtgttgcagccctgccccgatttgctccctatgccgcaagtgactactgcgccgatgtgttgcgtcatatcaatcatccgttcgcattaacactgcttatacgtgtagccgggcatactaaacgctgtcacgatcggatgacgaaagccattgctgcgttcccacatgcagcaatggcggcactgacggaacttcttgggcaaaaagaagagaacagttggcgcattatgctaatgacaatgcttatctcacaaccagcactggcagaacaggtcattccctggctctcgacacccgcagttgccgtactgaaatcatgccagcaacaactgacacagccctcaaaccatgccagcgccgatctactgccagccgtagtagtctcccctccctggctttcgaaaaagaaaaaatcgccgattccggtgctggatttagcgccattaggcattgagccaatctgttatctgacagaagaaatcagtaatcaacttttggcgaaatatatctggtattcaaaacacatcacggttagccatgaagaaagtactaccaacctgttggcaaggatgggttttcaacgacggatcgctggtacatatattaaagctcccgaagcggtagttgaggcatggctaaatgaagattattcaaccttactaagtgaatttaaggtgtttcattcacctaccgggcattattggcagttggggattttgacaacattgccgctggagaaagcagtaaaagcatggaatgcccttaccctatctccacataccgataccgaatacgccatgttacattttggactcaaagggttacctgggttagtaaactcacttgcacgctatccacaagaagccttgcccatcacgaattacttcgcagcgagtgagctggctcctgccgtcgcccgtgccttcaacaaactgaaaacgctacgcgaaaacgcccgtagctggctgttgaaatacccggaacatgcccttaccggcctgctgcctgcggcgctcggcaaagccggtgaagcacaggataacgcccgcgctgccttgcgtatgcttaccgaaaacggtcatcagccattactgcaagaaatcgcccgacgttataaccagccggaagtaaccgatgcggtgaacgctctgcttgcgctcgatcccttagataatcacccgacaaaaatccccactcttccggccttttatcagccatcgctctggacgcgcccggtattaaaagcaaatgcccaatcactgccagatagcgccctcctccacctcggtgaaatgctccgcttccctcaggaagaggctctgtatccgggattattgcaggtgaaagacgtctgttccgccgactcactggcgggatttgcctgggatctgtttaccgcctggcagaccgctggcgcgccgtcgaaagagagttgggcgttcactgcgttaggcgttctcggtaacgatgacaccgcccgcaaactgacgccattaatacgcgcctggcctggtgaatcccagcataaacgcgccaccgttgggttggatattctcgctgctatcggtagtgatatcgcccttatgcagcttaacggcatcgcccagaaactgaaattcaaagcattacaggagcgggcaaaagaaaaaattgccgacattgccgagagccgcgaactcacggtggcggagcttgaagatcggttagcaccggatctcggtctggatgataacggttcgctgctgctggattttggcccacggcagttcaccgtcagctttgatgaaaccttaaaaccgtttgtgcgtgatgtttccggcagccgcctgaaagacctgcccaaaccgaacaaaagcgatgatgaaacgcgggcgaacgatgcggttaaccgctacaaattgctgaaaaaagatgcgcgtaccatcgccgcccagcaggtagcaaggctggaatccgccatgtgcctgcgccgccgctggtcgctggaaaacttccagctcttcctggttgagcatccgctggttcgtcacttaacccgccgtctgatttggggcgtttatagcgccgaaaaccagctactggcttgctttcgcgtagcagaagataacagctacagcaccgctgacgatgatcttttcaccctgccggaaggcgatatctctatcggcactcctcacgttctggaaatatcaccaacggatgctgccgcctttggtcagctttttgccgactacaaactgctaccaccgttccgccagctcgaccgtaacagctacgccctgacagaagccgagcgcaatgccagtgaactgacccgctgggcaggcagaaaatgcccgagcggtcgggtcatgggactggcgaataaaggttgggtgcgtggtgaaccgcaggatggtggctggatcggctggatgatcaaacctctgggccgctggtcgttaatcatggaaatcgatgaaggctttgcagttggtatgtcgccagccgaacttagcgccgagcaactcttaagcaagctgtggctatgggaaggcaaagcagaaagctatggctgggggagtaattcaacacaggaagcgcagttctccgtactcgatgccatcaccgccagcgagctgattaacgatattgaagccctgtttgaataaggaaagagcatggacaaggaattaccgtggctggcggataacgcccaactggaactgaaatataaaaaaggcaaaacaccactcagccatcgcaattggccgggcgaaccagtgcctgttatcactgaaagcatcattcagacactgggtgatgaattgctacaaaaagctgagaagaaaaaaaacattgtctggcgttatgagaatttttcactggagtggcagtccgccattacgcaggccatcaacttgatcggcgaacacaaaccctcaatcccggcccggacaatggcggcgctagtctgtatcgcgcaaaatgacagccaacagttgctcgacgaaatcgtccaacaagagggactggaatatgcgactgaggtggtgattgcacgccagtttattacacgatgttatgagagtgatcctctgctagtgacattgcagtatcaggacgaggattatggctatggttatcgctcagaaacctataacgaattcgatctccgactgcgtaagcatctctctctggcagaggaaagctgctggcagcgttgcgccgacaaactcattgtcgcactaccaggaataaccaaagttcgccgcccttttattgcgctgatcctcccggaaaaaccagaaatagccaatgagttggtaggccttgaatgcccgcgaactcattttcattctaaggagtggttaaaagttgttgctaatgaccccacagcggtgagaaaactcgagcactactggagccaggatatatttagcgatcgagaagccagctacatgtcgcatgaaaaccacttcggctacgcggcctgcgccgcccttttgcgcgaacaaggactggcagccattccgcgcctcgcgatgtatgcccataaagaagattgcggcagtctgctggtacaaattaaccatccgcaagtcatccgcaccttgctactggtggctgataaaaacaaacccagcctgcaacgtgtagctaaataccataaaaacttcccccatgcgacgctcgccgcactggcagaactgctggcgttaacagaaccaccagcccgcccaggttatccaatcatcgaagacaaaaagctgcctgcacagcaaaaagcacgcgatgaatactggcgtacgctgttacaaacgctgatggcatcgcagccacaactggcagaagagatgatgcagtggttaagtactcaagccagggcagtgctgaatagttatttatcggcaccgcccaaaccggttattgatagtaccgataacagcaatctgcctgaaatcctcgtttcaccaccgtggcgtagtaagaaaaaaatgacagctccacgtcttgatttggcaccgctcgaattaacgccgcaagtttactggcaacctggcgaacgagagaggcttgccgccactgagcctgcccgttatttcagcacggaatctcttgcggaacgcatggaacaaaaaagtgggcgagttgtattacaggaactgggttttggggatgatgtatggctgtttttgaattatatactccccggaaaactggatgctgcacgcaattcactcattgttcagtggcattactaccaggggcgggttgaagagatcctgaatggctggaactccccggaagcacaattagcagaacaggcgctccgcagcggtcacatagaagcgttaattaacatatgggaaaatgacaactactcacgttatcgtccggaaaagagtgtctggaacctgtatttattggcacagttgccgcgtgagatggctttgaccttctggctgcgtatcaatgagaaaaaacatctgttcgcgggtgaggactattttctcagtatcctcgggttggatgcgctaccaggtctgatgttggctttttcacatcgtccaaaagaaacatttccgttaattttaaatttcggcgcaacagaactggccctgcccattgcccgcgtctggcaccgttttgcgggccagcgtaatctggctcgccagtggattttacaatggccggaacatacggctactgcacttatccctcttatcttcaccaaatctagcgataaaagcgaagctgcattacttgccctgcgtttactttacgaacatgggcatggcgaattgctacaaactgtagccaatcgttggcagcgtacagatctatggcctgccctggaacaattacttaaacagagtccaatagagatttacccggcacgcattccaaaagcccctgatttctggcatccgcaaatgtggtccaggccgcgccttatcactaataatcaacctgttaccgatgacgctctggaaattatcggcgaaatgctgcgctttacccaggggggacgtttttatagcgggctggaacaactgaaaacgttctgccagccacaaacgctggcagcttttgcctgggatctcttcactgcgtggcaacaagctggtgcccccgtaaaagacaactgggcatttctggcgttaagtctctttggtgacgaaagcacggcacgggatctaacgacacagatcctcggctggccacaagaaggcaaatctgcccgtgctgtcagtggcctgaacatccttaccctgatgaataatgatatggcgctgatacagctgcatcatatatcgcaacgggcgaaatcccgccccttacgtgataacgcggcggaatttcttcaggtggtcgcagaaaatcgcgggctaagccaggaagagctagcggacagattagtcccaaccctgggccttgatgatccgcaggcgttgagttttgattttggtccccggcagtttaccgttcgcttcgatgaaaacctcaacccggttatctttgatcagcaaaacgttcgccagaaaagcgttccccggttgcgcgccgatgacgatcaactgaaagcgcccgaggcactggcccgactaaaagggctaaaaaaagatgccactcaggtgagcaaaaacctgctcccgcgtcttgaaacggccctacgtaccacccgacgctggtcgctggcagattttcattctctgtttgttaatcatccctttacccgtctggttacccagcgattaatatggggggcttatccggcaaatgaaccgcgttgtttactcaacgcctttcgtgtggccgcagagggggagttctgcaatgcgcaagatgagccaattgacctgcctgcggacgctctgattggcattgcccacccgttagaaatgacagtagaaatgcgcagtgaatttgcacagctttttgccgattacgaaattatgccgccttttcgccagttggcgcggtgcacggtgctgctcacacctgatgagtcaaccagtaacagcctgactcgctgggaaggtaaatccgctaccgttgggcagcttatgggaatgcgatacaaaggctgggagtcaggctatgaggatgcatttgtctatgacctgggcgagtaccggctggtccttaagttttcacccggttttaaccactacaatgttgatagcaaagcgctaatgagcttccgttctcttcgagtgtaccgtgacaataaatccgtcacttttgccgaacttgatgtgtttgatttgagtgaggcgctaagcgcacctgacgtcattttccattaaaacacagcgggcagtgatgcgactgcccgttatctacacgacttaccagcggggaaagcgatgatcgtgcaaaaagagctagttgctatttacgattatgaggtccctgtacctgaagatccgttttccttcagacttgagatccataaatgctctgaattatttacaggttccgtctatcgactggagcgattccggctacatccaacatttcatcaacgtgatcgagaagatgctgacccgctaataaatgatgcgttgatttatataagagatgagtgtattgatgagcggaaattacgaggtgaatcacctgaaactgtaatagcaatttttaatcgtgaactacagaatatattcaaccaagaaatagaataatatactctagataattaaagtcgcagcacatgcaacttgaagtatgacgagtatagctttcttaaagggggaaacggtattcccccttagatgcgtttcaatttgcccgttacttcaacaaatcaatcaaccgtaacagagccactaataactccagtacggcaatgagcacggttaacttttgtgtcagcgtgtccatccgctctccttattaaggagcgcaacaccagcaccttacccttacactgcctgttgatactggtttacgtatgttggtacgaaacgttgctctccggatcagggcaccgcctgcggcaccacccgtccggcagccaggacttaaaattggtccgatccggcacaacctcccaacgggcaggattataaatctcactcactgaattgcaatggagtgtggatatggttataatttattcgttggtacgaaatgttgcacaatcagcaagttagcgtcactgtagtaaataaaagaacctgcctcaccagcaggtttttttattttctgcgatctactttccagatattttttgccaatagcccaacataaatattcacatcccggtcaaatggtgcgttgaatataaaatcgatgaatttataaataaaaatgagttatatgatgaattaataaaaacagtaatcattttattaaagggggaagcggttttcccccttagatgcgtttcaatttgcccgttacttcaacaaatcaatcaaccgtaacagagccactaatagctccagtacagcaatgagcacggttaacttttgtgtcagcgagtccatccgctctccttattaaggagcgcaacaccagcaccttacccttacactgcctgtcgatactggtttacgtatgttggaccacgatgttgcactccggatcagggcaccacctgcagcaccccccgtccggtagccaggacttgaaataggttcgatccggcgcaacgtcccaacggtctggattataaatctcattatcttaattgcaacggggtccagccgtggttataattcgttcgttggaacacgatgttgcacaggctgtggtgttaggcctgaaaatagtaaataaaagaacctgcctcaccagcaggtttttttatttactgcgatctgctttccagatattttttgctcaaacaactaatgcgccaaacatttattgcgcgtaaaatatcgtttatttcattaatacatttcagggatgaatatatgtcaccgcagaataatcatctgcagcgtccgcctgctgctgtgttatacgccgatgaactggcaaaattaaaacaaaatgataacgctccttgcccgcccggttggcagttaagtttgcctgcggcccgtgcttttatccttggcgatagcgcgcaaaatattagccgtaaagtggtgattagtccctccgctgtcgaacgtatgttagtcactcttgccaccggacgcggtttgatgttggtgggggaacctggcaccgcaaaatctctcctgtctgaattactggcaaccgctattagcggcgatgccgggttaaccatccagggcggcgcatctaccactgaagatcaaatcaagtacggctggaactacgctctgcttatcaatcatggcccatcaacggaagcgctggtccctgccccgctttaccagggaatgcgcgacggcaaaatcgtccgttttgaagagataacgcgtacaccgctggaagtgcaagactgtctgttaggtatgctttctgacagggtgatgacggtgccggaactcactggtgaagccagtcagctctatgcgcgagaaggctttaatattattgccactgccaatacccgagatcgcggcgtcaatgaaatgagtgctgcgctaaagcgtcgcttcgattttgaaactgtctttccgattatggatttcgcccaggagctggagcttgtcgccagtgcttcggcgcgtttgctggcccatagcggtattccgcataaagtgcctgacgcggtactggagttactggtccgcaccttccgcgatctgcgtgccaacggcgaaaagaaaacgtcaatggatacactaacagcgattatgtccaccgctgaagccgtgaacgtggcccacgccgtaggcgtccgcgcctggtttttagcgaatcgcgcaggtgagccagccgacctggtggactgcattgccggaaccatcgtcaaagataacgaagaagatcgcgctcgtctgcgccgttacttcgaacaacgagtcgccacacataaagaagctcactggcaggcttattatcaagcccgccaccgcctgccgtgaggaaagatgcatgagcgagccgttaattgtcggcatccggcatcatagtccggcctgcgcccggctggtgaaatcgttaatcgaaagccagcggccacgatacgtattgattgaaggcccggctgattttaatgaccgggtagacgaactgtttttagcccaccagcttccggtagctatttacagttattgccagtatcaggacggtgcagcccccgggcgtggtgcctggacgccatttgctgaattttcgccggagtggcaggcgctacaagccgcacgtcgtattcaggcacaaacttacttcatcgatttgccttgctgggcgcagagtgaagaagtggacgattcgcctgatacgcaagaggaaagccaggccttgctgctgcgtgccacccgcatggataacagcgacaccctgtgggatcacttgttcgaagatgaaagccagcaaactgcattaccctctgcactggcgcactattttgcccaactgcggggcgactcccccggagatgctctcaatcgtctgcgcgaagcctttatggcccgctggattggatgggcgatgcagcaaaataatggcgacgtgttagttgtctgcggtggctggcacgctccggtactggcaaaaatgtggcgcgaatgcccgcaggaaattaacacgccagaattgccgtcgctggcagatgccgttacaggttgttatctcaccccctacagtgaaaagcgccttgatgtgctggcaggatacctttccggaatgcctgccccggtctggcaaaactggtgctggcagtggggcttacagcaggcgggagaacaactgctaaaaacggttctcacccgtttgcgccagcacaagttgcctgcttcgaccgcggatatggctgccgctcatctgcatgcgatggcactggcacagttgcgcggtcatacactaccgttacgcactgactggctggatgccatagcaggatcgctgattaaagaagccctgaatgcgccgttgccgtggagctatcgcggcgttattcatcccgacaccgatccgattctgctaacgttgatagacacattagcgggtgacggattcggtaaacttgccccttctacgccacaacctcctctgccaaaagatgtcacctgcgaactggaacgtaccgcaatctcccttccggcggagcttaccttaaatcgctttaaccccaatggactagcgcaaagtcaggtgttacatcggctggcaatactggagatcccagggattgtgcgccagcagggaagcacactgacacttgcaggcaacggtgaagaacgctggaaattaacccgcccgcttagccagcatgcggcattgattgaggccgcctgctttggtgcaacactccaggaagccgcacgccataaattagaagccgatatgctggacgcgggtggaatcggcagtatcaccacatgtcttagccaggcggcgttagcgggtctggcgtccttcagtcaacaattactggagcaactcacattattaatcgcccaggaaaatcaatttgccgaaatgggccaggcgctggaagtgctatatgccttatggcggctggatgaaattagcggtatgcaaggcgcgcagatattacaaacgacgttatgcgcggctatcgatcgcacgctgtggctatgtgaatctaacggcagaccagatgaaaaggagtttcacgctcacctgcatagctggcaagcgttgtgtcatatcctgcgcgatctacatagcggtgtgcaactccccggcatttctctttctgcggcggtagccttactggagcgacgcagtcaggcaattcatgccccggcgctggatcgcggcgcggctcatggcgcactgatgcgtctggaacatcctaacgccagtgccgaagcggcgctgacgatgctggcgcagttatccccggcacaatccggcgaagcgctgcacggtttgctggcgctggcccgccatcaactggcctgtcagccgacatttatcgccggtttcagcagtcatttaaatcaactaagtgatgccgattttatcaatgccctgcccgatttacgcgcggcgatggcctggctaccgccacgagaacgcggaacgctggcgcatcaggtgcttgagcattatcaactggcgcaacttcccgtttcggcactgcaaatgccgttgcattgtccaccgcaagccattgcacatcatcaacaactcgaacagcaggcactggcatcgctgcaacactggggagttttccatgtctgaactgaacgatcttctgaccacccgtgagctacaacgctggcgattaattcttggcgaagcggcagaaacgacgctttgtgggctggatgacaacgcccggcagatagatcacgcgctggagtggctgtatgggcgcgatcctgaacggctccagcgtggtgaacgctctggtggattaggtggctcaaatctcaccactcctgagtggatcaacagtatccacacgctgtttccgcaacaggtgattgagcggctggaaagcgatgccgtactgcgctacggcattgaagatgtggtgacaaatctcgacgtgctggaacgtatgcagccttcggaaagcctgctacgcgccgttttgcacaccaaacatctgatgaatcccgaagtactggctgccgcccgccagatagtgcgccaggttgttgaagaaattatggcgcgactggcaaaggaagttcgtcaggctttttctggtgtccgcgatcgccgtcgccgttcatttattccactggcgcgaaactttgatttcaaaagtactctgcgcgccaacctgcaacactggcacccgcaacacggcaagttgtatatcgaatccccccgctttaacagccgcattaaacgccaaagcgaacaatggcaactggtcttactggttgatcaaagcggatcgatggtcgattcggtgatccactctgcggtgatggcggcctgtttgtggcagttacccggcattcgtacccatctggtggcgtttgacacaagcgtcgttgatctcacggcagacgttgccgatccggtagagttattaatgaaagtacagttgggcggcgggaccaatatcgccagtgccgtggagtatggtcggcaacttattgaacaaccagcgaaaagcgtcattatcctcgtgagcgatttttacgaagggggttcatcatcattactgacgcatcaggtgaaaaagtgtgtccagagctgcatcaaagtgctgggactggcagcgctcgatagcacagcaacaccttgctatgaccacgatacggcccaggcgctggtaaatgtcggcgcacaaatagccgccatgacaccgggcgagctggcatcatggcttgcggagaatcttcagtcatgaattcactacgtccggaattattagaactgacaccgcaggccctgacggcgttaagcaatgccggttttgttaagcgcagtcttaaggaactggaaaatggcaacgtcccggaaatcagccatgagaacagcgctttaatcgccaccttcagtgacggtgtccgtacccagctggcgaacagccaggcactgaaagaggctcagtgcagctgcggggccagcggtatgtgccgtcatcgcgtgatgcttgtgttaagttatcaacgactttgtactaccgcccagcctacggaaaaagaagaagcgtgggatccggcaatctggctggaagaactggctaccctgcccgatgccacccgcaaacgcgcacaggcgttggtcgctaaaggcatcaccattgagttgttctgtacgccgggcgaaattccctctgcccgcttaccgatgagcgatgtgcgtttttattcccgcagcagtattcgtttcgcccgttgtgattgtattgaaggcacactttgcgaacatgtcgtactggctgtgcaggccttcgtcgaggccaaaactcagcaagcggaatttactcatttaatctggcagatgcgcagcgaacacgtcacatcatctgacgatccgtttgccaacgacgagggtaacgcgtgtcgtcaatatgttcagcaattaagccaggcattatggctgggcggcatcagccagccgcttattcactacgaggccgctttcagtcgcgcgcagcaggcggcggaacgctgcaactggcgctgggtgagtgaatcactacgacagctacgggcaagcgttgatgccttccacactcgcgccagccactatcatgccggagaatgcttacgtcagcttgcggcattaaacagtcgattaaattgcgcacaagagatggcccggcgcgacagtgttggtgaagttcctcctgtgccgtggcgcacggtcgttggctctggcattgccggagaagcaaagcttgatcatctgcggctggtgtctttaggtatgcgttgctggcaggatattgagcattatggtttacgcatctggtttaccgatcccgacaccggcagtattttgcacctttcgcgcagttggccgcgaagtgaacaggaaaactcaccggcagctacgcgtcggctgtttagttttcaggctggcgcactggcgggtgggcaaattgtttcacaagcagcaaaacgcagtgccgatggcgagctgctgttagctacccgcaaccgcttaagcagcgttgtgccgctgtcgcctgatgcctggcaaatgttgagcgcgccgttacgccagccgggcattgtggctttgcgggaatatttacgccagcgtccccccgcctgcatacggcctcttaatcaggtcgataacttatttattctgccggtcgctgagtgtatttcgctcggttgggatagcagccgccagacgctggatgcgcaggtaatcagcggcgaaggtgaagataatctcctgacgttatcccttccggcatctgcctgttctccttttgccgttgaacgcatggcggcgcttttgcaacaaacagacgaccccgtgagtctggtttctggctttgtcagttttgttgatgggcaattgacactggaaccacgggtgatgatgacaaaaacccgcgcctgggcgctggacgcggaaactgcgcctgtggcaccgctaccttctgccagcgttttgcctgtgccgtctaccgctcatcagttgctgatgcgctgccaggcgttacttattcaactgctccataacggctggcgctatcaggaacagagcgctattagtcaggcagagttgctggcgaatgacctctccgcggtcggtttttatcggctggcacatgtgttgggacaatttcgtaatacagaaagcgaggcacgggtagaagcaatgaataacggtgttttactttgcgaacaattattccccatgcttcagcaacaaggatgaaatagtgctttttactaagagttctactccagttccggactgctcacgtcacggtattaggcatattctatatagcccctggtgagagtcaccagtttcttgattaaataaaatggagttttacatgaaggctttcaataagctgttttccctcgttgttgcatctgttctggttttctctcttgctggctgcggtgacaaagaagaatcgaagaaattcagcgccaatctgaacggcactgaaattgccattacctatgtctacaaaggtgacaaggtgcttaagcaatcttctgaaaccaaaattcaatttgcttctattggtgcaaccaccaaagaagacgctgccaagacacttgagccgttaagcgccaaatacaaaaacatcgcgggtgttgaagaaaaattaacctatacagatacctacgcgcaggaaaacgtgactatcgatatggaaaaagtggattttaaagccctgcagggtatttcaggaatcaacgtttctgctgaagatgccaaaaaaggtatcactatggcgcaaatggaactggtgatgaaagccgctggttttaaagaagtgaaata

SEQ ID NO: 218 - DNA, 3729 bp, Escherichia coli
caattaaactatataatataattcttttttatctttataagaataattatagggatacccgttagggagtctaacgactatcccttaatctattggcattcgccagaaccttgcacaagttagagtgttagtcgttagactgcttgtcataacacatagtttttgtttgttgatgttagttagtagatctatgttcgctaatgccgctcacaacgaatatgtaatctactatgtgcaaatagcctacggcttgcgtaaggctaaatagtcttgcgctgtgcgcttcaatagttccattgatgaggcttacgccaatctaacgatcatcaatctatttaagagaaaatctattgtgcaatactctgacgagtgcaataaccttgtgtgctacgcgttagcgatgttagcacatagacacagacaacaaccaacaacaaacaaaaaagaaagaatggttttagtagttgaaggttaaataagtttctaccgcttaaatcaagccgtaggcgagctaaacgtatataaggcagggaaaccttagcggtaatagattagctcattatagagcttctgaggagctttacaggtattttataaggtgtctgaaattagagtttatctatcatctccttttcatatacctaacaaatacaaaataagccccttaaataaacctctggcgagctaaactgtcattacataagggaatgtattgtttttatcaaaacctcgttagaacgcgttttagagaataaggaagaatagcatcacacagaagagcacgaattgctaagcaaaatcataacatactgaaaaatgatcaatattttatgggcggggttgacaaaagcctttagttatggtaaagtaatattaggggcaggaaaacattcctatcctctaaataattaaaccaatgcaccgcactttgaagcccaagaggcttgcaaggtgtctttttcttttaaccaaatagaataggaggttaattagtgaagtatttcacttctcaagatgtagttgaagcctggaaacgtggtgagatcaaccgctttagggtaagaatgaataggaacacagcgcgacgctgtggttatccagagcgtgaaaaatgttttgacgatgcactaaaaattattgatgaactgcgtaaggcaggagcagagaaagaataataacaggagaaggagaaaaccaaatgaatattaattttgattctgcaacttataacgcgttgttaaatcgtgcaaaggcagaagggaaatcaattccaaaacttgttaatgaattactaattacagtccttacaaaggaggaactaaatgatcaaaaatatcaaaaacaattgccgaagcgaaagccaaatgtctaaatcagaaagatggtaaacaaaaatatgtagtcgttgagcagtggttgaagatgtttaaaaagtggttctcaccgtcaggtaatgaatacaccgctacactgccagccgttgaaatctatagctatatagctggattcaatgaacaagggcaagaatgttacgccactcaaaaaacattatctaatattggaatggttagtgatcgccaggttcgcaatattataaatatgtttgttgatatgggagttctttctgtagaggctcgggacgggcaaacatcactctataaagcattaccattcacagatgcacatattactccccctggcttttcccctggagagtcatcactacctgatccttctgagaaagaagacgaatctaatgaaatattgaatgtttccgaaatcatcgttgaagaagaaacacaagagccagagttccctgagcggcccgaaatttttacttggcttctttcccttgataagaagaaaccaccgcacgaagaaacagaagattttgtaaaacgagcattagattcaaagaatatctatctttgtgaaaatgattttgactctttgataattgatctcaaaagtgagagcacaatatatgattcactacccttctaaggagaataaatgacttataacatcactataggaaacaaaactattgaaataactgaaagcggatacaacattttaaaagctattttggacatagagttttcaccaccgacagtggttagcttttgtagtttaggcggctacagcgcacaacacgtaaatcattggttaaatcattttacatcgttcggtgtgctggattatgaagggattaacagcactacatttcgtcttttgaaattaaacaaagattttgaattgtttctcacaaacaatcaataacaacagatcgggcaatacatatggcaaatgcatttatggcgatattcatcgtaacaatggcgtccagtttttataatccacataaaaagagggaaaaatgggaagaaagaaaaagaacaacttaaaacgtattgaaaaaaacagtaatttcaattcaaaaagacaacgtccaccgacacacaccaataacgaaattccaggggaagagataatctttattcttgaaacagaatcccctgaattaagtgatgaagaattagaaataatccaatcaatgccaggcgtttactttcgcccaagaacaagaaaacaaactatcatttctgatggcactctgaaacgttggcagcttttagggtttagctcctatcatcattttttgggatttaacgctttcaataattgtgtaggtggtgcatcggaagtcgatctgatggctcatttagaagatacattagcttctaacaaacgttctaactaataaaatgatgggtgtatgtataagcgcccaatgaaaatattcaaaaaaggaaaaataatgattggctatattcaagaaacacaattatttcagatgatcctgtctgatgcaaaaaactatgcagagttaattcggctggcaaaagaaacagaagactacgaagcattagagcgttaccgtgatgaagtgctgacgctcaagacaccttttaacatcgtattgaatatgattaatgatgcattacaaggagaatacgcataatggaagaagatattagcaatgcaatggaacaacttttagatctgactatctcactacaaacaagaataaatcaagcctattcagatttatgcgattacacgctctctcaatgcgttattagcttaatgaaggtgaatgtaagccttgacgattttatctctctggtgagcgtatcagaggacgatgcaaaacagtgtaatcaaatcatcacagacatcgccaccacgttaaaggttgcaagtgaagagattcagcaattagtagatgatttagccaaaaagtgtctattttctctaaatgataatgaaaattatttgcatttataatgattttgttatataataatttaggggtagataaaaagattttagttggtgttaatccttctactgtcataaatccctgcatatggaaggtgatagcctcaaaggttgagtggcattaacctctaacaaatattaccttccatctctcaagaagttttagaataatcataactccctctttgattgttgattgttgattgtttctacgttgtgttgatgaatgttgttaggcattgtgcttaattttgataaaagcgggtaggtgttatctccttgcccttcccgctcttatttttcatctatgcttatcctaaagctccttattttgtcagaaaacattaaagagccttacactgatagttatattttataactatt

SEQ ID NO: 219 - DNA, 6693 bp, Escherichia coli
aatatatcctttttgtttaaaacagatagaagatccatttataagtgtgtttttatgttcaacactttactgatgaagatatgatttacagtcgttgataaataattttttaatttatgtgtaattaatagagttttactgtaataaggaagaagctgtcaggacacttacttgctcttttatgaacactcttttatgaaaattgaaacggagaatactgccagatgagtcatcagtgttcactttctgaactgaatgaaaacctggtgcctttcactgccaggcagatcaaggcctcattaatctggtgtgcagaggatgtcagaaatccagacgagctgcaaaatgcctgcagttatattatcgatcctggcagtacagcttctgccaaagtgttccatgcagagcgctatggtggcagtggtattcagcgtaatggaggtggtgcacgttgtgggtttgatggtaactaccaggttaaaggaataggaagtaatccgttggttggcgaaggtactgacgaacgtcattctaatggtgcactcggcgctgttcatgcaatatatgaggctttgtggggagaagtactggctcaaatattaccttatagtgctgtgcgggttcgggcggttttacttacagatctctatactgaaaaggcatttgagcgctccggtaggaaatcacgaagagccctgttggtacgtgagcctgttgttcgtccggcgcattttgaacgggcaccttacttccaagtaaaaccggagtattccagtctgttaattcacgatgcctgtcgggttagatctgtgatccacaagctgccaggatatctacctgtaccaccggaagaaattgatgctgaagcacgaactgatccccggatttattgcattgaggggttatgtgaactggcacgtcgtgaggcctggcaaatggcattttgtcgaacacgtttcctgagattgacaacttctccttctaatattgcaatggatggcagattaatggattttaacggactcagttgtctgtttccgggagattccccagctgattttgggtataaactaagattagctgaactggcaaaagaaccgatggtacttatgcaagggctgtctgatctctgcttgtatatcggaaaatatatgtttgaccctgacttcactcttgcagcccgtttgaaggttgaggagatatttcagaaaacttttcatgaagcatgttattactgttatctagaactgttgggtattcctggagaatttataacacaaaaagagatacctgatatattgaaagaactggttaacagttttgttgcattactcaatcaatactgcgagaaatcacatgcccaagatattgtcaatcaggatggttcaccattgcaaaagttggttgtgacgctaattcatcataggcataatcaaaagcaggcactgaatagtagcatcaagaataatgtttatttcaccgttgcacaacagtgtttttcccaggccatccactggctgacgcaaggcagtaccagacgtcagataaatgcctcattactcctgaaagaaattgaacatcataccatgaaaaggctgcaacccagggaagagctgaggaaagaaaatatgtgcgaaaaaattgccatcctgctggataatcatggcgatgatcccctttttttacaagaagcaatttctgatatgaaaaattttatgcttaagttttccagagatgcatttggatatcttgaaccgataagaaacacagtgtaaaaaatatataagggaaatagtaatcatgtattatataagggaaaccatcagaggaaaagatgaatggactgtttatgaacagatcggttttgcagtcagttgtatgctctacaatcgtaattacagtctgtatccggtgttaaccattcaatactggactgaatatgcgatacagcataatcagattaaattcctgtttgattcacgaggttttccactggcgtatattacctgggcatatcttgaggctgatacagaagcgcgcctgctcagggatccagaattcaggttgcatccgtctgaatggaatgaagatggaaggatttggattctggatttctgttgtaaaccaggctttggtcgaaaagttattgactatctcatacagcttcagccatggggagaaggagaagtacgatggttaagcaggcgaaagaaaattgtgacatacatccctgagcggctgcataaaacgtagtacctctgaagatacagagataattgtaaattacggggtaaatgcatcgctgatactattttgacaggactctgtattttctggctttgattatagcatttcgcttaaccagtgaaggtattacaggaaaagtgtgagtaagaggagctattttgtttcgtcaggatgctttagaaaacagaaaaatgaagtggcagggacgggcaatattacttcccggaataccactatggttaatcatgctgggaagcatagtgtttattacggcatttctgatgttcattattgttggtacctatagccgccgtgttaatgtcagtggtgaggtcacaacctggccaagagctgtcaatatatattcaggtgtacagggatttgttgtcaggcagtttgttcatgaaggacagttgataaaaaaggggatcctgtttatctgattgacatcagtaaaagtacacgtagtggtattgtcactgataatcatcgtcgggatatagaaaaccagctggttcgtgtggacaacattatttcccgtctggaagaaagtaaaaaataacgctagataccctggaaaaacaacgcctgcaatacacagatgcgtttcgtcgctcatcagatattatacagcgtgcagaggaagggataaaaataatgaaaaacaatatggagaattacagaaactatcaggcaaaagggctgattaataaagatcagttaactaaccaggtggcattatattatcagcaacaaaacaatcttctcagcctgagcggacagaacgaacagaatgccctgcagataaccactctggagagtcagattcagactcaggctgcagattttgataaccgtatctaccagatggaactgcaacggtacgagttacagaaagaactggttaacactgatgtggagggcgaaatcattatccgggcgttgactgacgggaaagttgactccctgagtgtcactgtcgggcaaatggtcaataccggagacagccttctgcaggttattcctgagaatattgaaaactattatcttattctctgggtcccgaatgatgctgttccttatatttcggctggtgacaaagtgaatattcgttatgaagcctttccggcagaaaaatttgggcagttctctgctacggttaaaactatatccaagactcctgcgtcaacacaggaaatgttgacctataagggagcaccacagaatacgccgggcgactctgttccctggtataaagtcattgcgatgcctgaaaagcagattatcagatatgacgaaaaatacctccctctggaaaatggaatgaaagccgaaagtacactatttctggaaaaaaggcgtatttaccagtggatgctttctcctttctatgacatgaaacacagtgcaacaggaccgctcaatgactaacgggaatttcagacaaattataaatcagcttgatatgcgctggcgacgtcgtgttccggttattcatcagacggagaccgctgaatgtggactggcctgcctggcaatgatatgcggtcattttggtaagaatattgacctgatatctcttcgccggaagtttaatctctcggcccgtggaacaaaccttgcaggaatcaatggaatagcggagcagctggggatggtcacccgggctctttcactggagctggatgaacttggtgccctcaaaatgccgtgtattctccactgggatttcagtcacttcgtcgtgctggtcagcgtaaagcgtaaccgttatgtactgcatgatccggccagaggcagaagatatctcggtcgggaggaaatgagccggtattttacgggcattgcacttgaggtctggcccggaagtgaattcctggcggaaacccagcagacccgcataagtctccgttcactgattaacagtatttacggtattaaaagaacactggcgaaaattttctgtctgtcagttgtaattgaagcaatcaatctgctaatgccggtgggaactcagctggttatggatcatgcgattccggcgggggacagagggctgctgacgcttatttctgctggcctgatgttctttatattgctcagggccgcggtgagtatgctgcgtgcatggtcctcactggttatgagcacgctcatcaatatacagtggcagtcgggtctgtttaaccatcttctcagactgccgctggcgttttttgaacgccgtaaattaggtgatatccagtcgcgttttggctcccttgacactttgagggccacctttaccacctgtgttgttggggcaatcatggacagtattatggttgtgggtgtttttgtgatgatgctgttatatggaggatatcttacctggatagtgctcggttttaccatggtttacgttcttattcgtctggtgacatacggctattaccggcaaatatcggaagaaactcttgtcagggggcccgggccagctcctattttatggaaagcctgtatggtattgccacggtaaaaatccagggtatggctgggattcggggaacacactggcttaacctgaaaatagatgcgatcaattcaggtattaagttaaccaggatggatttgctcttcggggggataaatacttttgttgccgcctgtgatcaggtggcgattttatggctgggtgcaagccttgtgatcgataatcagatgacaatagggatgtttgtggcatttggttcttttcgtgggcagttttcggatcgggttgcttcgctgaccagttttcttcttcaactgagaataatgagtctgcataatgagcgcattgcagatattgcactacatgaaaaggaagaaaagaaaccggaaattgaaatcgttgctgacatgagcccggtttcactggaaaccactgatttaagctaccggtatgacagccagtcagcacaggtattcagtggtctgaatttgtctgtggctccgggagaaagtgtggctataactggtgcctccggtgccggaaaaaccacattaatgaaagtattatgtggactgtttgaaccagatagtggaaaagtactggttaatggcacggatatacgtcaacttggaataaataattatcaccgtatgatagcctgtgttatgcaggacgaccgactattttcaggatcaattcgtgaaaatatctgtgggtttgcagaagaaacagacgacgaatggatgacagaatgtgccaaagcaagtcatattcatgatgtgataatgaaaatgccaatggggtatgaaacgttaataggtgaactgggggaaggtctttccggcggtcaaaaacagcgtatattcattgcccgagctttataccggaaacctggaatattatttatggatgaggctacaagttctcttgatacagaaagtgaacgtttcgtgaatgctgctataaaaaagatgaatatcacccgggtgattattgcacatagagagacaactttaagaacagttgatcggatttttagaattacaaattaggataatatatcactaaaagcagcattgctgcataataagctatgctgctttagaaattaatcaacttccactactagaagaggatgttgatgagttaaatcctgagtttaataaacctccattgtagtttggattaaaacttccaagtcctatacccggattatagttaataccgtttgatggtattgttattgtcctatttgaaccatcagcaataactcctccaatatatcctccaattgcacttcctgctatatccgcaccagggatttttgttgctttacctaaaaaaccaccagccgcagtacctattgcaacggatgcatctttatctaatcctgcaccatgtattaaagcaagttcatcggttgttatatttctcatgttatttcctctttttattaaagaaagataaaacaaataaaaacagtacactcgcaagtaacgaaagaattattttctttatgagaagataaagggttaatgtgtctaagtctgaatttacaagttgtattataaagaacaacgagaaataaaaaatagtttcattattaaaccatccctatacatgagtctttgagtgcttatgaaaaacttagaaataaagactatagaaaccaaggtagcaaaagtttttatttatccgaatatttttacttcttgctgtttgtatatcttttttattgttgtaaaatagttcgtgcaatagataaaataatagtaataccaacgaattataccaattgcttttactgcaaaccgtgatttaaatcacatttatatagatgtattataagtttcaagtctctttctacgagaaaaggcgaagatatttgttcacctttgagtaatttataatccattatatcttaatcagatgtatatcataaacaaatatgagattatctaaatatattagta

SEQ ID NO: 220 - DNA, 6241 bp, Escherichia coli
cgccgcagcatggctacggtgaattttgggcataaaaaaacccagccgaggctgggtcgttgcgttggttatctgtcagtagttatgtactgaaggaggtaattctttattcttaagtctcatccatgcggaaagattcgttggtccgtctggctcattaatatcaacatctcgtgtgtgattgattaaaacgtctctcgccattccgataacatacgagaactcatggccatagtcgtagcatctgccggaatagttcgattgaatttgttttagcgccagatacagttcgcggaataatgcctgtgagcggttggcataatcccataaccatacaaggctgtttgcttcttttgcagaaagctcgttggttttcttctcttgtttgccgataaattcaccttcaagcactaccctgtggatgtactctacggccagcgggatttgttcaattgaaagttcatcaatgctgtcaataccaaaacgctgatgaaccatattgtatgcatcgtcatagcgaagtcctttctttcctaccagcatgtttactgcatcgcgtagcggtgttctttgctcaacagtggttttcttgcctttcacatactctccatgtttgcgaatcgaaggcagaacttctgctgttacccacttgcggaatttgtgcgggactgaacctttattgacagcatcgcggcagcgcagaaccaatgtatacatacctgattcgctaacaatgcttagattctgctcaccaccaagggtgtaacttaaagttactcccttttcatcgtcatcaagtgcagtaagcgccttgcgtgagttagtcagagttaaagcatcacaaacatcttttgccacaaaccacggctcaccgcacttgttgatgacgcggatttcactgtcgccgaatttgaagatggtgaaatcgttttgtgcctttgctatacttttcatgtcaatatttcctaatccgatttgttgataccgaagccctgactgttcccgcagttggggcttcactgttttgatttctttgccgcatcaagcatcacttctgaaaacgtgcgcttgccactgaatactctttctcttctcaatttttcgttcgtgccaaatgattcgccatgaacaaaatttggtctcaaaatggtaagcgcaatctctttgactactgcatccaagcaaatcacactgttaccccctccctcttcaggctgtccagcacccgtttaattacttctgcgctgaatgagcgacactcttcctttgctttttcttcaagaattttttctagcttctctggcatacgcagtgtttttaccttcattgcatcctccgttgtatgtggtacgcatacatagtatttaggtacgcattgatagtcaatagatacctacatatcctgtggtaaaaaattattcaggatgcgccgatgtctgatcgtaagtacaaaaaccctcaagtgaatctgaggcttcctgtagagataaaggaacgtcttattgaactggctgaggctaattctcgttcattaaatgctgagatggtagcagcacttgaggcatggactgaaaaaaataaacatattcaagcactagatcttgcaactatagcatcgcggttgatagagcttgagcatgaggttgagaagttaaaatgtatgcatggcaacagtgaaaaatgaaacgtatcgctattttgttaatattgttcttctctacaatagttttcgccaaaccaaaatcagataatggcgatcttaaaggcctgcaagaactcatgataacttcgaaatttgctggcatgtgcggcacaatcaaacaaatggcaacatttcaagaatcaacaaaaatgcctggcggagatgagttcttacagcgttttctgaccacagagcaagcaagactaggaatgaatccacaggaatttcttgaagcatgccagaagtcaatttcagcttataccaattattacaatctaacttctgataaataatagaaaggattttataaataactttatgaaaaaatcactattaattatcccgcttctgctggctggatgcgcaaaagtaagtgactaccaagcaagttgcgaacaacgctatccaaagcttagtgatatggctaattgccttgatgccagcgtgaagaacgactcacgcatggcatcagcaccaacacctaagctgtatgtccttgctgcgaagatgctcgggcaaggtgtcgatcaaggcaagataagtgacgcacaggcaagacttgagctacagaatctttatgttcaattacaaagccaagaacaagcccaacaaatagcacaaagccaagcattccagcaggctttattgaattatcaggctgtaaacacaatgcaagcgatcgagcaaaaagcgcgccagcctgttataactcaacattacccaacacgcgttgacacatatacaaactgcaattcaggatttggaaacacggtaacatgcaacagtagcagtaatatcaggtagttatatcttatcttttattgctgttctgctgtaatttggcttgaaagtatagggcgtatcgcatttgcagcattatttagcgctctttcataagctggcgttccagttttagtgtttgccaggcgtaagagagcattccttgctgctttggactcatacaagcgcatcattgcaccaaaaccagcctcaagccccattgatacgccaagggtcgcagttgcgccaatcgtccttatcctgttggcttgcgattgccccgtctgagttactacatttgcggtgtctgaccttgctgtttgctgtagaacttcatgaagagcatcaagctctttcatgtgctttccagaaaaaatagtgttgtaaatttcaccgcctgactgagatttcagcttattaacttcagtgatgaacttggctggagagtcccctgccttttccgctattttgctgacgtaagctgcacgcatagcatctttccccttatcatccagtgcgctccagattcgtttcacgtcagatggttttctgcttaatacaacggtatttataagttcaggactggcttcactgcttgccttgttgagcttgttggcaatgtttttattaagcaccttattataaacgtttgcataatcggaatttgctttaaggtattttgctgcgtctgatgcaccgaggtttttagcaactgcgttacgaaggtcttttgacattgcattctctaccatattggtagctgcttttgcctggttggggaagaccatagcatctccctgaacattagatctaaatgctgttctgtgctgacgcaagagatcaaacgtaacatccaaatcagttgcagggtttgctaattcttcacgtaggttacgcaaggatgtaagcaggctttgattggcagacgtcccaagccgttcctgtcttgcgatcgctgtattcagagcattcatggtatttgtggtatcaactgcggcattacccattttattggtgacgtcattgataacagcgccagcggcatccttccgcccccttaacgtggtggtaagagatttcaccacatcatcagggttgtactcaccaaaacggtcaaaataattacttaccagcttactacgcgttgcatattgctccgctcgctttgagcctgtcccgagcaaagccccctcggcatcctgagttaggccgcgagtaaaagcatttttcggccggataacatcagatgtcattggtgtcacgcccatcgattctgatgtggcaattttcttcgccacttctggcgcaatatcaccttttatagccgttattccacgccctattccctttgctgctgcggaaagaacaccctgagcggcaaggttaactccggcatttttagctgcattttgtgcgaaatcgcctttctgatttgcggcctctgccagtgatccaatagccatgcttcctgccgttccaactcctggaactaaatacccaccaattgtttctccagcttgcgcataagggtctgtcggtcgatcgacagggcgataaacatcatccaaaaccttggggccaccaagaccctgactgattgcattaatcagacttgcgccaccctgcaatacgtcaaatggtatgtttaccagaccacgaccagcctgttctgcaatttgccctgcactttgaccaccagtgagccaatcgccagcttgttgcatcaatgatggttcttcacgtgctggttcattattggcctgattaactgtttgttgctgaacagcctgaccagcaaaatactcatcaatggcggtgccaatatcttccgtgctcgtaccatcagggaaggtaaatgtcttaccgtttgcagttactttcatcattccaccgtaaattgaatgcctgattttgaggtatatgatccggattgactctgctgctgttgggtatttgtcggttgttggctattgctctgttgttgactatttgcagcacttgaaaccaccaaagcatcataaacgcgaccagactgaccacgtaatgagttatattggccctgcatttttcgcatttttgtttcagtagcagccttggaatcaccgggctgaggcaggtacattttggaatactcctgcatctctggcagagtaattgctgcacctgtttctgggcgcaaaattgcatacaaggcgtctctcgcatttaccatatattgctgctccgctggtgataggcttaaatttgcaatagtcccatcaccaagagagcgatttattaatgcaactcgcttagggtcaatgcttttactaagctgattcattgagtccattgaatcttttaatcgcaaagcaaatcctgccgccttcttggaaccctcattagccttatctatgatgctttgcgcttgtggcaagctaattggtttaatgccatcaccagatataggttggtttagttttccggcttcctcgctgccatcggtgtaatacttagttaccgagccatcaggattggtttcaaccttaagtaatttcttagcattgggattaattcccgccgctgccgcaaatgccgctgcaccatctggatccgcctttaacatttgcgcgtactgattgtaattctgcattgcggctgttggtgcatatgctgacgttaacgcatttgctcggctaatatcctgccctctcgcctgaagtgcttcaccagcctgattgctgcggattgtctctgccagcctgcctcggtcaatatcacgaccagccatcttgtcctgaacattgaagtaatcaatcggaccaagagcagccattccaaggtgatcaacaaactcaccaaatcctgaaggattctgctgatacatctgagcaacgctgttagggtcaacaccgacgcgagtcagttccttggcgttgttttgcagcatgattgcattgcttctggagacgatgacgcaaggcgtgcgccagccgctaaggtgccgatagaattgcgctgctcttcatcaatgaatcccatgcctttacgaacggattcaatctggtctggatattgagtagccaactgacgcaaagcaccgcgatcaccagacgcataagcattagcgtatgcctgctgaaattctttctgccgctgagcctgcttttcctgctgaaccccccccgcaatacctgaaaggccttgcaaagcagtcagcccaacattgttagcgcctgaacgctcaatatcattgttctgcctgataagctgaagcgtattgccgatgtcatttacgctcggagcgtttgagttgacgccgccgataccagccaacaatccgccatttgatccttgccaagtagccatgattaccccttaaaacaacgaaccaagcaatccgataccagcaccaatgccagcgccccaaggtgttgatgttcccaaaaggctggcaagacctgcaccggcaatcgcaccagacgttccgccactaattgctgtctgaagacttgatggtttgttggcattagcagcggcaagagctgcgctttgctgtgcaatgctgctcatgttgttggcgtacgtctgcccggcgtttgcctgaccttgcagagcaccaagcccaacgtttgccagattgttgtaattgctcatctgatttgataaccaagactgaccgagtgtcggcgcgatcgtagccagttgattgcttgtggctgtcgaaccaagtccacccgtcgcctccgcagcagcaagactctggtaacgcgcctgacc

SEQ ID NO: 221 - DNA, 5399 bp, Escherichia coli
ttttgctaatggttagcaaaattagcagggtatataaagattattggcccaaaacacactcagatgaattcacgacagctcaggagggttattcctgatgtcatcttcacaaataatggttaacgcatcatatatcattctgcgtctgttcctgttttcggccttatcgccatacaacatcatcacatttttaatttcatcaaccggtgatttcacatagtgaactaatacaccaagcttctcaacacattgcagtaaagtatatttcttactgcctgtgaaaagccctatcatagtttctttacgttcgcgactggataatactttgttttccataatgacttcagccagcgtcttaccatcataaacatactctttatctatcagaatatttatcttatccagcaccttctctacgtcatcaagcaaacctgtaatatatgggggcgcaatatatggtttcgtactgatcttttcaagcatacaattatacatcttaataacacgcatcagggtaaaattgttcgcatcatactgtatttcaccctccttatatacaggatcaataagtggtattgtttcaataaatgcatcctgataggcttttacatggtcaagccaataaaacaacgagccatactttatattttttctatttactttaacctccagtgctgtccgaagcaacgataatgcccccctgacatatcctgaaggtaattcaccaaacaatccttttctttccatgtcatcataatgctgcagcacatcattaattttatttttccttatcagacaaatgtacaccgcaagtgtttcgtagcagctggtcacatgaacagcctcattctgcaactgcccaaaatagcttataatctttttcagatatgcgtcatcacaaccattcttatcattaatattaaatacaagatctttcagacggaaaatatattcctgagatttatcatcaagtgaaacactataacgagacaatgttccttctgcactgttttcaaacttataaaatatttccagtaattttttgcataaggcgttgtatcaaagctggtaaagtcataaagatattgcgcagcgtaaccatacaaaccatgaatccagagtccttctctcaccaacactctgagataatatgcaaggctttgaagtatcttcgtctttcgttgtatatcaagtaagacacttaatgaataaaatgcattatagaatttatcaatattcctgagcactttctccagttcatccttatccagcttcttctcccggtaatcctttttatattcatttttgatagccatgatatattgttgcatcaggctcttgcttttcccgttatccttccgtatagttcctgtatatttccccagagcatacagctttccattttcatgaaaatcttccttgttgaatcccagttcagccagatattcccgaagataacgtttaacagcagcttcatcgctttctgtatcagcgtgatcaagacaaggacaatacgatttctgtaaaaaattataaatatgataataaaaagcagagtcattctctggtctgtatgtattatacatatctacaacaagaaaaataaccccaaaagtgcgcagacaatagctgcgaaggaattcaggttttagtgtggaatgcactggataagaattcatcatgtaataaaaatgttcatatcgggcatatatgatccgccgtcgctcctgactgaataccccttcagcatcaataatacgactgatctcattataacgttgatcccagaatttttgatgcatttcaaaattggtactcttccgcttgtgtgccggattctcgccttccttaaacaaccccaaaacagtacaaatatcatacaacagatttgtaaatgtgcgcatatgctgtgctctccggttggtttgcattttatcgcagaggacattctgagcttaacgtatcaaactgacacaacgacatgcaatgcatatggagaacaatatgtcaaatcaaaccggacagctttacacgccttcacgcatcctgcgtatggctgaacttacccgactgctgggtatatcaagatctactatttacgtgaaaataaatccggcctcgaaataccacgaccctacctttcccaaaccaataaggcttggtagtgcatccgtaggctggcgggcatctgccatcgatgagtggctgatgttacatacggcaccagcctggtctgaacctgaaaacaaacgaaaggaacttaatgatgacgacaaaactatcactccctgaacttgacacaactaaactgcctgacaggtaccaggcattacttgatgaaatgcatgaagaaacaggaatacgccgtgaaatacttctgtctgttatgctgacggtcaaggctgcctcggtccaggatacgcatgaagttgaactttccggagggcaacgtacaagtcttcagatatttatgtgtctttcatcagcatcaggcagtggaaaaacctctgcctgcgcaaaattaatcgctcctgttcatgaaacagaagaagaactacatcaggcatatatcgacgataaaaaaaactatgaccgaatgatggaaatgtggacaacagataaaaaaatcctggagcggagatataaaaaggaaattgaaagatccccggaaaatgctgctgctgcacgagcagcacttgaaaagtgtatagcaaataaacccgaacctcccgtacaacaggttctcatcgtgaatgacgcgacaccagaagggatagctttgaaactcagccagtcaccctctcttctgttgctgtctgatgaaggaggtactattctggataagcgtttcgaacgcaaatcggcactgtacaacacattatggagtgggcaaccagtcaacgttgaacgggcatccagacccggattccggctgaatgatgtccgtctcactatacttatactgactcaaccggtaatatttaataagttttttactctcactggcgatcagatccggggcaatggctttctggcccggttgctattttgcgaacccggagcaattaaaataatgacgacagaaccgcatactgccactcctgttgtgacgcaacaatgtgcaagctgttttcgtaagaaaagttttggcagtcagatcagagactctctgagagcatccagagaaagacgtgcaaaaagtaaagagcgcatctgcatgacattatcaaatgcagcatcccgcgcactggagcgctttcacaaagaaaatatggatactgtcagacagaatcctcatatgggtacttttgaagacattattgtcagaaaaagagagcaggttgtcaggatagccgcaattctggaactggagaaagatccagactcgacagtaataacgctggaaagtactaatagcgccatttatctcattgaattttatttcaagcatcttatatataaacttgaatcccttcgggaaatatccccggctgagaaacttgataaatggcttcagaaaagaattatcacaacagcaggttacatattccagaaaagttatattttacaatatgccccatatgctctcaggaaaaaatgtgttctggatgaagcacttgacatactggcggaacaaaggaaaataaggattgatgataacctggttgtttatataggaaacacgattacaccatccgaactggcaaaaaaactaaatattcctgcattcgatgccggagttttcatttgtgatcatcaaaacatactgaagtatcaccgaaacagactatagatactatcggacaaaaataaattatcacaagtgtattattcgttataataatgaataatcgttatctgagtgcaatgccaggttttcattacgaactggcattgcatttatttttcaaaaaagaaagcagtaaccatttggctactctgagtatgccagtccatgaaactaagcgaattccttagtgtttttagcaagttgagacatcacataatccgcccatgcctgcatcatcggtacacgctgctccagtagatcagtacgatgatatgccgcctcaaccttatttttcagcgtatgagcgagcgccctttccgccagatcccgcgaatacccctgttcactacaccagtccctgaatgttgagcgaaaaccatgtgccgtggcaactcgccccggtatatcactgatggctttctttttacgcagaaaactcgtcaacaccatatctgaaaggatctgctgctttctgggagaaggaaacactagttcatcatgcaaaccacgtatattttccagaatgtgaatggcctgccgggataaaggaacacgatgctgtatcctggctttcattctttctgcgggtatagtccatatccgcttatgaaaatcaatttcagcccagcgcattcccctgcttcgcccgagcgggttgctgtaagtatcaccattaataacagtgcccgggtaacattataaggttcatctgtatacacactggtcgccacaaaaagcggtaactgcctccagggcattgcgggttggtgttcatcacgtcctcttgtctgatgaggaagcaaatggtcaaccacatcaacagggtttgccacacaaaaaccgtgcgcccatccccactgcataacaacatgaatgcgctgtttaacccggcttgccgtttctgacaaggttaaccagactggacgcagtgtttctgccacgtccgcagccgtaatcgaatccagcgtttttgctcccagttgaggaaacgcgtaattttcaagcgtcgataaccactgcctgacatgctttggattttcccatcccggtgacaattcagcatgtacacgcctggctgcatcggcaaatgttgggataacaactttttcagcttcagcctttttaatctccagtgggtcatcacctgcagcaagttgctctcgcattatccgggcagcacgtgcagcttcagcaatactgacctcaggataagttcccaatccagcattacgccttttttgtgtcaccggacttacataacgaaaaacccatttaccccgcccttttactgaagaaggatgaagagtcagtcctgtaattcccccatggggcaatggtttgtcatcaggtttgatatgccttgctttagtatccgtcaatactgccatacgctaattcctgttactctggtatgccatccagtatgccattagtctctcgcttcactaagaatacattagataatatcggacagcaaaaagtgtaatacattgtttataatgaaattatataacacccccggattaagtcagatttatttcaggcggtccccctcaccgccatatttaaagaagagctcgtacgaaagtacgggctttttttcgtatat

SEQ ID NO: 222 - DNA, 2483 bp, Escherichia coli
aacgtcagcgtctgaaagagctggagcgtgaaaatcgtgaactgcgccgcagtaacgatatccttcgccaggcttccgtcggaaacaatgatctggcagcctgagttcacagataaaacactctccaagaaacctggggcggttcactatgttaatgttatctccatcaggtaacaggcatatatgggataataacaatggcttgaggaaatggataaaaattttatactagatattgcagtaagtactactgatccccggaataataaagagtttctttggattagttatagtatgaacaatctgagtccggccaaatgtgaaagagcatattggatgactctggaaaaaagatgtctttctttatttatggaaaacggatatgatcttcagacaggagcatggttctgtcttatttcagccaatctatatagctgggaaggactggcgctttcctcatggaaatttgcagattcatttgtaaaagaaaaatgctggcctcatgttacggccactcagatgcggacgaatattcttatctggtatattaaaaatgttattcctgctatgcaaagtctgcctgatgatgagaaaacctactcgtcattaaccttgctggaggatgcattaacattattggctgatctcgaatacaatcttctttctggcaaattttttatcgtttcagatatgctggctgaactcaagagacaaaagagtgatgactcagaaagtactgatgccgcacatcatgattcaggatcacatgatgcgaaagatattcggtcttttagcagtggtttacctacgaatattgactccaattatactgctggaccagaacacaatacgttaattaagaaagataagaaactgcgcatatattataacgtcgtttctttcatatcgggtgctctaataaccgttgtaatgaactatgctggcaggccggaaacagtactgaaacttaggggcatcatacctgatagctttattactgaaatggttatgaactattctggatgttcagtctccctccctaattcagcagactcctggtctaagcttggaaagaagattgatgattttacggaaacactgaatgtaattgaaaatgatggggggtatattactatatctaagttgaaaacgattgcttacgatctgaaaaatacctttcttgagtatgacatgcctgtaaatataaaaatatcagacttatataataaccagaatatgagtaaagttgatatcaacagagagcttgaaatgatacagcataatattaacaagttcaattgtgagattggctatttaaggctgagaaatgagggactattaaaggataaggttagagaaaagtgagatgtttctgtctatcgggcttttcataacgaactcctcttattgagtctgaatgtgtttatcatagaggccgttttgtcttactcagcaatagtgagcacatggctaagtgagtactctatcagtggtgacttatatgacagagactgtatcatataattatctcagatataatgatattaattgttttatgacgataattacaggtaatgataagcagtgattgtcaggctgcttactcgatattacttgggggcgtcggcccgcttgttgtggacagagggtattgttaaatcttgttgtttatggtatttttgtgactgtgtttgttattactttttatgtcggcatgcattatgaaaatttactcgttaacaggagcagttgttattgataccgagtcggtttgtttattatctgactcatctgaaaaaaacagatttatttacagtgagaaaacataacaatcattataactgtcgtgtgagaggtgttgtttgttcatacagattagtcaaggccacggttgatgatagtcctgataagacatttaatgcgtattaccttccttatgtgagaataaaaattacaatatgtggtggacccatacatcccattgaaaaatttctcggtatagaatataccaatgctgaggagttccctcttacatttctaaaggataattatcatggggccttaaacttggtccaaaaccgattgctaaatcgacaggaaaaccggatcaacgccgacgagataataaagatactcctggcaacactccgggactaaaaccgagtaagtctacaggtaagtaaataaaaaggatataaataagcatttataccctgactacatatccagtctactgaaggtgtttctgcagccagatgctcgttccttctatatcatacgcctttgctccataccctttcgcaagcaaagactctggtaaatactcgtcatatttatccagatgcttatcaggaacaactgcagcaagctcaaactctgatggtaaacctgacaataacagtaagcgtcaacggagcaccgtattgacgcttatttattggtgagtactacgttccatggcaggagttcatcaactcggttgg

SEQ ID NO: 223 - DNA, 4210 bp, Escherichia coli
cccgtgtccggcgcacgatctccacctcacccgtggagaactcctcaactacaaaccccgtaaggagagtgaatttatgacacaagaagaaaaagtgatgtttctgatgcggctggctgtcgatacctacaacacacaattcagggagaaagatatacctcaaaaggcagttcctgccgcggtagataagggcggtgctattgccgtattttacgatgcatttgaatcattttttgatgaaaaactcgacgctgttagcgacttcggaacatcgagtaataaataacgttcattacggttcttaaacaacaatcagtgggtttgatgttgttcttttcaagctcacttgccatcacttccattattcttgcacttacacgaattatttggtggctgtaagcgacgcaactgtcgctgatattgctgtttatttctattacttcattttcactggcggcgctaaatttggatatgccgtttccattgtcctgtttcagtgctttttctgccatctggatgcgtgtcagcgttgcggaatttgggctaagtcgataaacctgtctggcatcttccagaagcagggcgataatgtgcttcagttctgtttcattcatagttaactccggtagttgcaatttattaatatcaggcggtcagctctttaagcttctgaactgctttattcatttcatccatacagtcgatgaattcgtccagtttaagctgcatttttccggcggcctgaagaatttcaagttttaagggcgcaagttttttgttgaatgcatcatcttcctggcgttttttctccgcaatttcggcggctttcagcaattcttcagcctgttttctgagtatttctggtgaaggtgaaactgctttgaggttattcatttcaggttcctgttgttgcagaattaatttgttgcattctctgcgtgagcgtttcattgcagattcgcacttcttgcaataaatggctctcccgtcacgcttgctggcatctgaataaaaatcattgactgattttgtctgcccgcatctggtacataattttgattgaaggtccttaatgattgtgacgtttccttcccgtttgggatatccatattttttgtggcggaaaaaggttactccgttaccagaaccttcttttctgaccttaaatacaatgatgctttcccgtttatcgataaaatctatgagctggtttctctcctttcctgacagttcggcaaatgtcttaacttttttagtaacttccgtaaggcgaactccatcaggcattttttcaacgaagtttttaatctctgcaagcggacgccataatttttgcggcaaaactgaaggcgtggtcatcaatcacctcgccgtcagttgttttgatttccggtagcctgccgcgtaaatggctacgtttggaagacatacaccagtttctggttgcttatgtccaaactcattcgcgtacacaatggctgctcgctccagattgcgtctgtattctttctgttgccagatcacgtcctgtgccatgaacttaattggcttagcgtcttctatgcgctcaggcgtttcgtgagtacctttagcctgaatctgcgctctgcttagagtagggcggtgtaatacttctgaacttattgcttcttcgcgggccagcacgccgttagctaatgcctttgcctttaaacgctcacgacgatgagagcgtgaattgcctttgaactgagttctgcgtgtcatatagacctcctgatgaactttggtggtgtggtaggtgggagacccatttcgacctgtttcggcctacttcaattcggcaatagtcccgcaggccccgccgctttacgtgcgacatattcccgtccatgaacccttcaccacaccccaaagttcactttggttattgcgctttgtcagcgccgtagattcatatttgaatcgttgtatattcaccgccctggtgagtagtgcgtcctgctgatgtgtttagtatcaccgccagtggtatttatgtcaacaccgccagagataatttatcaccgcagatggttatctgtatgttttttatatggatttattttttgcagggttgagtggcttgggaggtgatcgagagatctgaattgcgatgtttagtgagttgtatctatttatttttcaataaatacatttggttatgtgtctttaggtgggggggtgaggcaaagaaaacccggcgctgaggccgggtttttctaggctaccagagactcaatccaagagtctctggtatggaatggcaacactcgtgcggtatcattaaatagtagtgatagttgctgtagctcaggtgttaacccatcgctgtcaactattacaaatctattgtttatgtcaggaacgacctgacttaagtcaacaatcttcccaactgttgagtgggcagtattccatcccttactgctggcaaggcttaccgtaaacccgcgttttggtggtattagtcgagactcattccttagcgttaacggaacagtaatgttatgcccactaatacctttcactttttcctttaaggctagtcgcttcccaagccctgctgattttaagtaactgattacacatttttcgaacttatcgtctttgacctcagcataccaatcagcagtttgggcggatgcaagaatcccaccacgaataacatttgcagttacctgtccaacggacgactcatctgcccacgcagatatctctccagagtcatttaatgaaattccttgcgaagcgagtgatgacctgatcagatcaattttctttttagtcaggtggatgccgcgtgattcaatattcatcaatgtatcgcagtagtctgtaaccctatactgaccactcatctcttgaacgaatacacttatctgctcacaatcatcgtagtatgtgaatggactaataacgcgcagcaacgtgtcgctcattgggtggcattcaaacccgagcttagatatgactgttgaacacgttacatttcccatgataactgacctgatttatcttgattaggtaaaggtgggctgccttcatatatgatattaagcgcctcgcaaaaataattccagtagccaaaaaaatcatctggcttgatgttcgtttcaagcttaagtgcaatttcttccccagctgattcgaagtacatgtgatagtgaggacctcgagccacctcaacaaaatctggatggttcactatagatttattacggtgtggcttgttatccgcagggtacggatcaagcgcgtaaatgcgcctgtcatgaagaaacatcacaaatgaaatcttcactatatccaccccttcaacgataggaggacgccagtgaagcataaatcttatgcctgtgattgggttgccaatttcatcaaaagctttgagatccaatttaaaccagattggggttcgtccctcacttccggtccatgtaactccgctaaaagttacttttttcaagcgagtaatagcttggtcaacctctttctgggtaggcttaaagtcgccttttttagccactgattcgtatcaccatgaaagctattgttaatacctgtgcttcttgtcacccaaacgtctcttcaggccactgactagcgataactttccccacaacggaacaactctcattgcatgggatcattggatattgcgggtttagtggctgtagaaacatctgaccgctatccctgatcagtttcttgaaggtaaactcatcaccaccaagtctggctatgcagaaatcacctggctcaacagcctgctcagggtcaaccagaattaacatcccgtcaggaaaactaggtttggatcctgttggcgcggtcatggaattaccttcaacctcaagccagaatgcagaatcactggcttttttggttgtgcttacccatctctccgcatcacctttggtaaaggttctaagctcaggcgagaacatcccggcctgaacatgagaaaaaacagggtactcatactcacttctaagtgacggctgcatactaaccgcttcatacatctcgtagatttctctggcgattgaagggctaaattcttcaacgctaacgttgagaatttttgcaagcaatgcggcgttataagcatttaatgcattgatgccattaaataaagcaccaacgcctgactgtcccatccccatcttgtctgcgacagattcctggg

SEQ ID NO: 224 - DNA, 31391 bp, Escherichia coli
ggacagatcgtcaggattggttgcggcagacacaatatcctgataggtcactgaagccattgccggcagtgaggatatagcaaggcctgcacagagtgcgcgaagtaaaattttcacagtaactccggaatagaattgcgtatgggcaaaggccacacaggatttaattaagggggatggcgacatgccagtggtactggcatctggacgtgatcagtattgtttactggttacggcaattaacgtggcattgcgccagccattgcgggtgttcagaaaatcacgaaaagtcccctgctcgggttcgctgacttttcgttcatgcaactgccagaggcggtatgtaacaatcagtgctctggaagcacaaagagcgacgcctgacagtatcagcacaagagtgctgatggcgcgtaccagagtcgtaagaggtaatgaagaggcggcaaagagcataccactgagaaacaaagcgatggccagcagactccagcaacagaatcgccatactgttctgcgccggcggaaacgacgatccagatcgtctactgacatatggctggcctgcagagcttcttcccacgtgaggtggagttgcgcctttttattatttacctgacgaaatctgtccagcctgcgtttttgttgttccagcatatgctgtacagaattcgttatcaggcgagtctccatcagaggaacaaaaatgttaataattccccgggtggctatgcgggttatggatagtgattttttgacgtttttcgtctggtctgaattttccggtaacttattcatttttcagtcctgttctgacgtcagctttcaacgtgcgtttgcctgattgattgttttctcaaggctaccgagttgtttttcataatactggcgggcagtcagagccagttgctggccagagataacattaccctggcggatctgttctttcagatcgttcagctgccagttcatttgcgcagtgattcttaccagttcacggagcaggttatccccctgcatttcctgtaaatccaccaggtatgctgtgttggcgtagcgccggccagcctcaaaagcttcaaactcacgggtactcatatatccccgtgcttttgcttctgatgaagccacctggtcgaagtaagcggccgctgagtctgactgcagtgtttcagccagtgctttacgtgtgctttcattaggcgtgctgtcagcaatcagcgtcagttggggattcgacgcagaatcaatgatgccgttgtattcgttctggagtccgacgtaggttcgcccactctgggtattcacttctcctttacccagagcacgaccggcagaggggcgggaagtgtttttcatgtaagcagtcgctgcatctatttgcttctgatcccatgtcagtgccgcaggtgtgtccgctgtacctgcgccgtggtaaatcgagcgtacctgactgtctccacctggtatttcgcccacagaaggacaaacggcggttcctccaaaacgtgcatattctgcttctgtacagtaactggcgtgtatggccgcgccatcataagcttcccgcacgggagagtttgctgcgctggccagacggtcgcggaggctacggttgctcacaccgccacctttactgagttttgaggctgcggatgctgaggcacttttgctttctgttgcaatccctgatgcggattcactgcagatggagtccggcacggtgaagcttttccgagcctcctcgaggcgctgagtttcattactgaaaatcatctgctgacgtgtcgcctgtccgttctgggcaatgacacttgccagcttttcagagttctgattgatagcggtacccgtggctgtctgggtactcagtatgttgccaaggacatctttgatggcttccattctggggatgacctgctcttcaacaggccggctggcgacgacggtgactgaataagcatgagcctggcatgccgttccactcagggtggctataagggctgcgagtaatgtttttctttgcattttattgtctcctgctcgggatggagcacaaggtcaggaaggctgtcgtattttctgtcttcaggtagtggggccagtgggaaacactgatatcgcctggtgatataacctttcctgttccggttatcgatgatgctgaaagaacgacgtctgacgcgccgtaaggtggaagggtcagtatccataacaggccagtcaccggcactcagtgccggcgttccgggaacggatggccataaccaggtatcatcggacatcagcgaagccagcggtgaagggagtatccactggatgacatgctgaacgtcgaatggtgcttcatccgggacagaaacctgccatattgccgttgttatcagctcatctgtgctggacggcaacaacagccgcatgcctgtgacctttccctgtgttctggcatccgaggcgtatatcactctgtgattgggggccggatgtaacctgaagacacgtgacggcagagtgaatgagaaactgtcaccttttacctcaagttttttaagaaatacctgccctctggcaggtctccggcagcgtggggtgatatgaattgtacacatcagagattgtatccctgttttcggatgagctccgaggccagttcttcaataacattgtcactgttatgttggcccgcccggtgctcaattaatgacgttgcagaacctctggggaagttttcggccagaatcttacgtgcccgaactgaacctaacttatttgtcagtgttttacgcagggcactgtcttttggcgatgagttcagcgcccatagctccagtggaccgacggtaaatttgagtattctcgcaagcgtgccactttttaccctgaatactcccagaacaggaacaccactaccatctggtgccgggccttccggcattttcaggaagcgtttcagcataaattcaggcacgttgaagttatccctcagtacggggatatcttcgggtttgtagcgcagtaaccagagagtatttgctgacttaagaacgctttccgggtagtccctcagatactgcgtactcagaaccgtgcggatagcaaacttgcgttgctcacgctcctgggtatccagattttcccagatgaagtcaatgccccgggcgttatgcagttcatcataaacttttgtcttaacctcctgatcaagttggttaatacgtttaagagcgatttcatggtattcccgtggaagctgctttaacacttcatccctgtattgtggcagggtgaagtcaccaccggcgatctgacctgcaagcaggtacatgatgccggttttaagcctgcctgcaggcgttttgtcaccggcaacattattcagatcgacagcgataacccgggtttccgggttgatcataaaccgggtatacccggatatcatggggtagtcgttatgtccctgctccagggcgcggcggatgtagtccagcagaagctcgtttgaaccatcacgctgaacagtaccgaaaacatccctgagactgstatggcccagcatcgaggacacttcgggaagctggggcattgcctgataatgtgcccgctgagccgccatgatatacccggcattgtggagcatatcccggacttcaaaccaggttgatctggcccaccaggctgcatcatgtttttcatacagtcccgagtcctgcagtgctgaatccaccagttcttccgttgaggcgcgataaagtcgcggattattttcaccgtactctttaaaagccagctcgataagctggttgataatttgtcgggtgtctccggggttacagggttgaccggtaccggtatcgacacagagagcacacagcaccgatgacatgaaattcttttccggcgtaataggctttttagcgccgtacatcacgtcaaaaaggttacgggtgtagtccggatcattgctcagaataataccgacagcttcgtcttttctttcctgaggaagactgtcgcgaataagctgaaccagtccctgagcactgtatcccttatcgatataggcaatgaagggcaggtttttctgagcagatgatatctgtatttccgacaacgtattaatcagaactgatttacccagtcccggatcgcctggtgccagttctgtatgtttattttgttgggatgacgccagaccaacctcaaatgcggaaccgtcttctgtatgtaacatcagattccctttgcctcgccagacagagcctgccctgttaagcgggaaaagcgagatggcatgtgacaacgggggatacaggggaaccgggccggagcctccggatgccgcgagaatggtattcacccaggcgcgtcggggatcgccaaatgttgtcgtggtgccacatacgccccagccttcaatggctgatttcagaatggcctggtttcgtgcgcatatttcacgtgtttttccccacgtggaggccatgatggtcattatgcagacaggttctttttcatccgttgccgccagggtcataacggattcatacattggacgaacggcagaaatgaagctgctgtaagtcagaagcgttttcttcagattaagagccttcatcccgccgggcatcagatccattctgatgcgccaggggactgcgcgggggacggcacggaccagttcgttaaacgtctgcagattttgcggaggtaaagtaatcgataccattccgtgccagagtccgcccgcctgaaccaggttgccctgtgtggtcacctgcgtgttgaataactgcaaatgcaatgaaggagcatgtagtacggattcatcgtcagtccagcgatatcctgctggctgggcatcttcaggcaggtggggttgccagttacgcggtgtgctgtaccgttctgtctgacgacgtatttcacgcccgacttcgtgtatatccagaagccggagaatcaggccatcagatgaatgtctcagtgcctgttccacattatcaagaaaagcttcgtggcggattttcagtgcagataaggtccactgccagggggactgggcaaagcgtgctttcggtacccgttcagccagtcttctgacaagctcatcatgggcagtgcgatcgctgttgctgataaggtcgggtccactccagatcgccagccagcaacgctcccggaccagccatggggacagtgttgtgactttctcatcgaccacatcctgtaactggatacctgtattagccagtgagcgtttttgtggggcgaccatgtcttcgatttcctctttccccatttcagggtcacgctcgaaaacgcagctgattttatgaccgctgtttttatatgccgtattcaggctgtcactcatgctggtgatcagcgattccagtgaacctgagccagtctggtcggatgcttcatccatttccctgaaagcaccgctgacttcaaagacagagagatattctccacgctttgtggctgcaatatagggcgaattcagccatgggcgacgttcacgatcctgtctgtccagaccaattacagtacgtaaatcgcaatactcaacaaaactgcttgcgacagagaaacgggatagcgtgttcagacagtcttcgatagtgaagattaaacggtttatgttcataggtgagggaactccggacttacaggagggaggtttgtgcagtttgatttttttaatgccaccccgcgctggagtggcatgaagaaaaatcaatcaacgtattcttttttgatgaatgaatctggtgtcagaatcagggcaataccgttcattttttcacgcagaggcgaacgaccggaaggggggtagcgacgaaaaacgtcagcgaaatcggccgggcggaaacttcggaatttatcctcaaccgccagtctgttttgcatcagtgcagagagcgcttcccgtcctcgccggacccggaacttatcattactgaaaacttcctgtaatgaacgacggttaagggccacgaccgtggatggatgaaggtcgggtagccacaccataacgccctgtgctgcggcataaccattcagtgaatgccaggcgtggcagaaagcacataagctgtaaggcgggccgtcttcatgaaacagctcctgctctttctctgacaacggctctgtactggtgatttcagctttctgtacatggcggagtgaaagacgtctggcagacagacgggcatgctcaagcgcccgttcagcggcttttactgccgtgttgtacttttcctttttgccggttgcgactggttcaccacgcctgattaacttaaccagatgttctgtggccttattaagacgaactcgtgtgttactgattgtgtcggtaagctgtctgagtggccatgagtcatccagtctgaaacggtgcctgacgtttgccggcagcagatacatcgaccgggcgttgttaattccggttccggtaacagtgcctcctgagtatgaaccacatcaatttctggaaagggatacaaccacaagtctttaatgctgtgttgcatgagcaggctccgtactggtgtaacatttcacggcttccagaatgatgtttgcgatttcatcggaacagcattctgcaaaaatgaattcctgatcgtcccgactgtcgtgggcaatcacattgccgttttctgttcgtcgtaacgttatgtgctccgggctccaggcagacatatgtgcctccttgtattgccgaataggaagggcaccggataaatgccagtgccctggacaagattagccaatggaaattgaggaaatccccaactgtttctggctgcgactcatcatttcaggtccggcgacaagtaccgccccaatgacgatagatacaatgcaaccagccagtcccatccccccttgtttcccaacttttttcaggccaatcaggcccccgagaaacagaattacgccgatgaactgcgcaatagtgattgatgatgactgtgctgttttagcaccttcaccaacattgcgaaccatatcggcaagatctccatcggcaagaacggctttgggcagcaacatcatgggaatgagcagcaggtacttagtcagtttgctccggcatgacattacaaacagttgtgcatggataaatgcggcgtacagacgggccgccacgacacgaatacgtgacatagtttctccttaaatggatatatcagtggtttatatgaaggtgaaaaaaatcagaagacgattccaatgcttgccagcagggcattgaggacacgatcgataaagaccagcaggacgccggcaataaatttgacgtttcccttactgacggattcactggcactcagtgcggtatgtccatcgagtccggccttgcgccagatggatatcccgttcatgacaaatcccacaccggccagcttggccagcgacagaactgcatttgctgcgccagcagcagcgccaaacgtctgaggttgtacatatgcaatcgggccaaatgagtcagccctgaatcccatttgtacgcctccggcgttaatcattgccgggagtgatacgagcatgcagctggttaacatccccgcaataaattttccgggagacatttttaccggaccggctgaacgggcgcgggcaaacagggtaatcatgctgatcaccccgatgaattctccccaggtaaacaggaaatccattccggcactgaaaatactgctggcaaagttctcaatggcggtcagggcatccatgttcatcagcgtaacgtccctgcactggtgatgatgtgtccgggtagtcggatcaatccgctggatcaccacattgcccagcgtctgaccttctctgacagcccaggtactaccctgccagcgaatccaggccataccagtttccatcgacatgattttcattccgttaagaacagacgacgtttttttctttgctggatgcggtgtggaagaggattcagtgacgcttttctgtgtcattattccgttcaggcggctccggatatcatccagctgacggcgcgtttcctgtgcgtattcttcatccttttttatagcttcgcccagcttgttaatgctgtcgtgaagcatattcagtgttgcctgaattttttcatcgcggttatccagctctgtttttacatcccgggcaagctggctcatatcttctcctgtccggacagtcatagtctcagtggactgaacagaaggtgatgattcttgtgtggtttgccaggtctgtacgccagcatccgcatcattaaacggaggcatgcctgtttccgatggcgctctcaggaacagataccatatggctgcgagcaacacgactgcacatagcccccatgttgctacagatatcccccagacggaacgtttccagaagggggcgggtttctcttcgggttcaccgaagctgccggtttcatctatttctgtttcaggtttcattatggtgtctccggttgttcatcataccgacgttgcatcacagcttttctttgctccatggctgtctgcattcgtgcctgcgagcgttgttccgcctgtgatgtacgattaactgaaggggaaatgccactggaaagggaagatgacctggcgtcgtttgtcattaccgggtcaacaaacagaattgatacgacttcatgctgatacacttctacctgtttatagggctcactttctgcctggcgggttaatatctgacttcctctttccgccataccaccggcaataacgcccgcaacagcttcaccactgggcattcccacgcgtccggtaaccgtgccatagttaccctgaataacctgcgtgttggcatctttataaagtgtgccaatactgcccacacctcctaacactgacggcagaatgatatgtttaaaccagcgtgtattcacattgctggccacggatgacatcaggttgtcttcccgttgagcatatgcattgaccttaaggtccatgccgttccagctcatccggtcgaaatggatctccacgccgttacccaccagtttgactcccggactgaacagcgttgcccctgcccaggggccagcgggaatggttgcgataaccttggatgacgggttatcagaatccactgcagtatcaatatatgccggtatacgggtcagagcaggtatcagttgtatccctttttctgctacaggcgtggacaggctggcattctgtaatgcgaattgctgcgtaccattctgccctgttgtttctgccggagatttattccacatagtcgttgctatggttggtgtactaccggcaggatgctgatcttttattcttacaatcagcttttgcagccgctccatacgtttttcactggctgctcgatcctcctgtggtgtgccggaagcctggcgatgagcatagttttccggttttgctgcaggctgttgttgcttttccggagtgtccggaatatcaagcccctgtggaagactggcaatgaacgtctgattattgcgggctgcagctgcggcccctcgttcattatccgctcttaacagttcacgatagtgaggcgtttcggtaacgctgcgcgttccgccgcttgctgcactgttaatgttcacggctgactgcatatcgctgttactccctgatagtttggaaaacgcgatatagccgccgccaaataagatgatgctgcccagtccaagcagggcagccagtttctttccggatttaccggcatcctgttcagcactcatgattactccagttctggtgtcacgtgaacggactggccattcacagagaaagtcagtagtggggtgacgggaagcttccagagatgagttccgtcggcagaggacaaggtctgttcaaattcatcgcgcaacatcgcccgggaacgaaccagaaggtcatcgccgtgttgccagatcgttgtatccgggacattacctgtgaatttcagcctcttaactgaagggtcccggggaggaataccatccagaaatgcctgtaatgttgcatcatgcagggcgatcttatccgtcgggatggagacaaccgggctggttggtccctgccgtggtattcgcagatccagacgactgtccatttcctgactggatgacggcgtatctgtttcgccactggttacgttcaggatgaccggtaccgacagacctttcaggtagacagaaatatttccggatgcccatggccgcaatggtgtgattgtcaccatgttctcgttgtactgcacatcaaagagttttggtgccgcgttataaggaggatcggattgtggccatggtgaaccgttgatatcggtaaatgtcaccacgctcaggttgttcatggctgtgcgaacaagaggaaggctggcaccgggggacagattaactgtcagagagctgatacggggtacaacactggtgatgggcgcattgatggcccgctcgttatccgccatgagactgcgtagtgagcgaatctcatcggcggagagctcagaatcaagccttgccgcatcctgtaccagcgggctggcctgcccgggggcaggcagctcaccttttaccagcgttgccggaacacctccggtgttttgggaggcgttctgaacgtgatcgctggcagaatcgtcgtttgtggtgtgcgtgcgttctgccatcctgcgttatcggcagacgtggcggcgctgcacaccaggagcagtgtgctcagtaaataacgtgattgcatattacttatctcaggagttcggtccggcgttacgggagatcatctgccggatttccataccggatggtttcagtctggggtcaacacgctggatggtgatttcgaaaacaaaagactgttctggcttgctggttgtctggccgaccagacgcatacggacaggatactggaatgtccagaaccatacgccgtcggacatttgtccctgtcgtaccagaacgccagcacctgtcgtggcggtcagattcatcttctctttcttgatcgtctccagaatgttagatgcctgtaatgcattcacatatccgacaaaaccttcgtcagaaaaacgcggagacagggaggagatctgtgaacgatagtgcacaaaatccaggttgaatgcggtcgccagtgcctggctgccaaaggccattgcatcattctgactccatgctggctgacttgttggtgccagcctgaccagacgaccattgtctgtagcgaaatattcgcgctccacattcgttgagtgccagtactgaatggcgttaccagtaatactgataagaagacatgtgcccgtacataaaagcgcttttatcagcgcagggacattatttgcccgctgttctgactgcttcatagccctgattgtgctcttcagtatttccgggtcaggtgccggatgtgatggcgaggatggctcggtattttcggtcataggttgtagtccttccagggatcaatattccccggcagcttttcattcaccttgtccacgaccgcgtcgcagacctggttttccagctgcgacagaatgtcgtcaaggctggggaactgggggaggtttatgctgattttttgattcgtgacagacaggactgcagggatgaggaaacatcgttttcacgttgtgaccatgcatccgcagctgcacgcgctcgctcatatcctgtattactaccggcctgtgccgcgctacccgcacgacaggttgcagcacttgccgtggatgaaatcaggataaggccgagcacggcaaccagagacttatgcatgttcatatggcttccttaccggctcatcggccggggctgtgggagagatcctgatgcagagttttttcctgcctgtcctccggcttttggctgttggaccactgctgccatgactgctcgaagcccaggttccggtacaacgcatcaggttgtttttccggcgtgtagacagcagcaaaaagcggttcttcccgggttttcagatgaaactgcataagctccggtgcggggcgattcgtgctgtcagcatcgtggtttaccgcttcaccataacctgcaaagcgtaaacctttgtcggtcagcgcattgataaccagctgactgttgtcggccgatggggtggccagtgccggatacaatgtgccgttcagccggaccacaccctgcagatgttcatcggcactctggacaagtagcaggttgagttcacgcgtatccttatccactgatcccagaacaggtgtcagcttgtcaggggctgcgctggttatttctgttacctgatttgcgttctgtggcgcggagaccggatgtcggtcttcaccgataaacagatgtgagccgacgttttctggcatacgtaacgctttcatctcttcgggccacccctggctgatttgcgcagccactttcataaaggtttcgaccggaatcgcctgaatacgctgacctttatccggattatcatgtgataccgagatcccgttggtaactgactccatggaccacttattccggaaacgtgctttttgctctcccgggaggatgaattgttcgcggttctgaagtgtcagtgtcaccacgtcacctttctgatggtttttgaccagactttccagttgttccccccagtagagtttgctgccactgcggtttttaagctcaacaaagaaactttctcctttgccgggtgcatattcagcacgaccaaaattgtgcagtacggcagtcacgctctctcccgggcgaagttttcctggtggttcttcacctggtgctgcatctgccgttttgcctggttcagtcggtgatgatgcaggagcggtgctgacggttgatgattcagtggcagcaggggacgccggggattgtgtggcttctttttcctgaacggggtcagggacagctggttgttcaggggtattccggttaagttccggtgttggctgatgggtgacaacagcatccttactgacagccatttccttgcgtaatttttctagttcagcccgttgatctggcaatttcatccggacatcgatgttgtgctcgataatcaactgcattgctttttgcttaaaggcatcactgcccgtcagctctatgacgcccccataaaatttggtggccacagcaagtgcggccagaacgctgcgatcgtcattgctggcaccgttgaccatttccagccggtttacccggtcaatgaaggcaggtttgccatccagtttgtacaggacggttctgtctgctcgtttttcccagtcaagctctttaagaatttcgtccatgttgagcgatatcggtgcatcagaacgttccggggcgtagacaatactgtcaggtatcggtggagtcgtcgtggtttccgctgagggcgtgggatcactgttctcatgcgcctgtgaatccgtttttttacgcgtaaaaaggccacgcgctttgtcgagaaacgatgaagtattatcagaaggtgatgtgctctgaacaggttgctgcggagtgggttcatcccggacagccggttctatagtggctgttgtggcctgaagttctgactcatctgcctgaacgtggcctgtgtccggttgcgacggcatatcactgttttcctgtagatgctcaggattttcattgttcatcagctcctgatatgcgctgtagtcttcgtattcttcagggccatctgactcaggaaggaacggttctggctgaaggggaatgtcttcagttacatggctgaccgcctcttcccggggagtatccggagatattccggtgctttgtttgtcatcaggctccgtcatcacggtcatttcctctttgactgcatcaggggaaggtgatggttcggttgattcattcatggtttcagatgaggggctgtcttcaggggcggcgggggcagcaggggccggtatttctggtgaagtgccggactcctgttgtaactcgttttttccggttgtgacagttcggcttcaaattcacgccagtctttatctgtggccacagagacaactttttccggaggttccgccggatgagcgagttcatcaggggcagacgccgttgtactttccggggatgccggtgattctgcaggggcgtcctgaactacagagctttccgtttgcgcctgaacgttatcagggtgccgctcatctttgccgttattttcagtggcgtgactggtaaatggctgtgtttcatcagcaatgttaccgctggaagcagcaggttgtacctgctgcgtggcggacggcagagaaggtccctggtcatggctgtgccctgtatcgggtgatgtttcaggatattctgtcggagtcatggttttttcctcagtgtggaccggtgtaaaaacgaggttgccgatcaccagtgcctcccggatttccggggtgttactgttgggggtggaaacccgatatgttctaactgggcgttgatgacatgcagaaaagcggcccgtccccggctggcatccaggtcattgaaatcggtcagcccctgcgctttttcggcatcggtgaacgcaggaaagatgaccgatcctcctgtcagttctgcggcttttgttgcactgacgatacctttgttaacctggcgtgcatgatcgttgtcggcacagaagataaaggggctttgcttccatttttgccgggcctcttcggccacaataatcatgttgcccgcatccactgtcatcagtaccggaaggcctgtggcttcgtgcagggaggcggcagtggcgtagccctcggcaaacagtaccggctggccgttgcgcggcgtgcccagcgcaaaccagttaccggttttctcggaatctttcaggatgcgggcatccttcccgccggtgaccggaatgcgctggtaggagcgtattgcgccgttacggttgctgaaaggaataacaagctcatttttgtcgtttattcgcacccccggcgcagcctgaatgcctttccgggtcaggtattcatgtgccgtggcctgcggccatttgctgacatagcggcgggcataggcagcctgtcggttgtactgtgctttcagttcccgctccgcgtcttccctgcgttgcatcgaatgcgctttcaggtgaagtcttgcgcggggatctgtctgctctccgccggagaaagtccaggtgaccggcgaatcatccgcgctgcggtaatccctgtaccagccggcaggtctgccgtccaggaagccgcgatatgcgccactttttgtccttttttgtcaccggcggtcgggacacggtggattttcccgtccatgaccggcagttctttcagaaccagcccggcattttccagtacctgggcaaactcggtgaccgggtcactgccgttcatggagacttcctgcggccggggcagccagcggtccagcatggacaggtccgcccccgggcgggcaaaccagagtttgtggtccttgtcccagagaacgggcgtgtgcccgttcatcgggggatgtgcttttttgagatcttcgatttcatctgcaggcacggcaagccaggtgcggtatcgggatacagacggcatgagtgcttctcctgaaaaaagacggaaaaaaaccaccgccggaaaccgggggtggctggggggatagaaaaccgggggagaaatgtttgtcagggtctccagtctgtacccttattccagcgatcctgccagtgttcaagatattgtgcggctacatccggcatattcttaagcacaacgacattctctgaattcttgcgtgcagcagcacgagagaagttataggagccggtttcaaccgtgtttccgtcaacaatgatgactttgtcgtgatggatggggaagacatctacagtccgcagaggaatgtccagcaggttgatatatttcatcgcttcccgacttgcccggttcgtattccccttgtcatcaacaacaatacggacgtcaactccgcgttttttcgcttttgccagcgcatgcattacatccgggtcggtgaaagaatatgccatcatcctgatggagctttccgcactgttgattgtgtcaagcaccagagcggatgcacttccttcaggagaaaagccgaccttcacggatggcgtgtcgatcattgcaaacgatggtgtcgtgaacagtaacgggcatgccagtagtgatacccggagcagagtaacgatagtttttttacctgacataaagactccagaatttaatcgaggccagtccagtctcgtggtgattccgtatggtggcgataccaccatgggcgaccggaggcgatggcccctctcagaatgctgaaaatacgtgtacagatagtcctgacagtccagcctgaacggtcgagaatgacgaaaaataaaatgatgccggtgcaaatccagaaggttgtttcggagggaaaagggcatataaacagataaatcatggtgaacggcagaggtacgccctggatgttgactggaggtgttgcatatcgccagaaaccttctcttttcatgaccgtaactcccctggcgggataaaaagaatcgcttctcttcggtcaacttcattccggatatacatttccagaatctgatcccggatacgacgtttttcctgccggattatggcatcaatgtgatgcccccactctgcatgtggcattccggaaagattgtcgcgaagctcatcgttaatgacgatatattcccggacggctttacggccaccgtcatttgttctgaccagaacctgaaccagaatgaactgcaacagtgacaggacagcccaggccatcgaatccctgatgacagggggaaacagcccaagaagacgtgccagcgtttcaccaggagatttcgtatgcatggtgctcaggcagtaatgtccggtgttgcctgcctgtaccgctgcgtcggcggtttcgttatccctgatctcaccaacaccgataatttcgggattacgtcgtacagcagaacgcagtccggcagcaaaactgaccacatcacgcccgatttctgcctgatgcggtgggagcagatcgttttcatttcccaggatatattccaccgggtcttcatatgtcacgattttggcgtcggggaaattgtccataatgtaacggtacagtgctgaacacagcgttgattttcctgacccggtttcaccacatacaaatcccagaccgcttttgcagaccattgcttcaagcaggtctggttcaatgttcatggagaggatgtccggtatttctgtcgggatgacacgcatggttattgatattgctttctcctccgcaccagatgtgccctgaatgaggtgagagcgtaaccggatgcgttctccgcgtttaagaccatagcgaccggatgcatccccgttaatctgtatcgtcctgtcaaccggattgcctgccagaacgcggggaatgacttcccgaccgaacagttcatcaatcagggaggacatgagtgtggttggtaacgttgcactggaacaacgcacccgtcggccaaagcgactgacagatacaggtgacccaccggtcagatccacatcactgactttatgtgcggcacaccagacaaagaaatgccgtagttcatctgcagtgaaacgctgaaacggaaaaagaccaaactcatcaggaatattcatcgggagcctccttcagtgcctataagcggacgccagtgagatttctgaagattgaattccgcatgatttttaaggcgacgaacacgatctccagtgaccagttttttcccgtcacctgtaacggtttgcatttgatcagaaacatccggacgggtgatcatgccctgacgccagagaagtgagtacagcatcatgccccggtaatcacgggtgagggttttctggttggcttcaagcgtcaggtcggcgttttgtcttccttcctgccatccctgccgtaatgcggtttcccacacttttcgttgcacgctgtcttctggaacgacgctgccttctgtacccggagtggctgttgttgaaagcccccggagaagccagtcacgccagcccggtggattgctgacaaagcgttcagggcgaatgatggtccagacccgggaagaggtccggatttgatctggcgtgatatgagctacgtcctgtgcttcatcaataaccggtggtagccagccttccgggctaatcagtggccggaaatcgtataaggcattaagtgtgctttcccgggcgttgagtgcctgaatcagctcccatgagcgctgagccttgccaccacgaaatccaagcgttttacctgcgtcggtcagcattttccagcgtgtttctgacagactatccggcttttcacttcgtggtttaagccatgcattaatgtcaggtggtggcgtattgacaccacctggcgagatggtaggggaagaagaacaaccagtaagcagtattactggcaaaaggagagaggtgagtgctttcattttttccggttctccggctgcatgaagctgacctgtaacaagcccggatattgatggattgttgctctccaggctgtctgggcttcaataagtctcaacgtattggaaaacgtcatatcccggacgtgaaggttgactggtaacggcaggcggacaccattgtagttaaactgcatccccctgactctggccagttcgttcagtaattcaattgcatcaccttcccagtcaaaggaaaggcgatcgctgttagctgtcagaagatgagaccccgttgaaaccggaagttggccggaaaacacacctttgtcccataatgtgtactgagtgtgccgggtaaccgccacatcagaggcagcaccgtagttacgcggaacaggagtatgctgagaaggggagttgcagccagccagaaaaagggcggcaagacaccccgcaggtataatacggttcataataattcctgagcagttaaatcagaatgggatataccggtgctccggtacagacaggatgatgtttgtttccggctatacttgcgttaccggaaataaatgccagtgtggccaggtaaatagcctcatagtttactgaaggtgattattcctgatactggctggttgatgtgtcgtcagacataaaacgaatatgagcgtaatctttaacgctccgcgccgaatcgatccatgatggatgactcgacgatttatgaatcgaacgtaccggcgcttgtccctgaaacagttcccggccctcgtccggataacctgcaattcagacaggcacatgtgcccgtacactcttgtatcttactgagtatatcagaatttatgtaaattcaaatatcctctatgcctctttgttgtattttccgtcaagtatgagccgggtaccatcgtaatgcatgatcagggcatcaaggtacgccggtttgaatttcttgccgagcctatctctggccagaaatgataaacaatgattatgtgtcattattactatgttccttttatgagattctcttgcgattgattcaagcgtcttataaagatcattattgcagtctgataaactgtccataacgacgggttctttaccggagaagaattttgcagtttgtatggttcttaccgcattgctggagtaaatatcatattcactgaagattgttgcgaacttaataccttcctgctgtgctttctctgtaccggtaatagtgattccgcttttatccgaatagcatggcatatctgaacggtcgcaacgttctccatggcggaaaaggaaaataacggtgttatcagcattaatttcttttgcctgttctagggtgatatcgggaagcgagctttttgcttttgtcactgccgctaccaggaaaacagaaaataaaagaatgaatgctgtttttgaataagaagagcgtggtttcatcatgttatttaaactgaatataaaaatacccccgggtttagtgccgggggcggggacagtaatcagaaagtgaactgaagttgtgccattgcaccgtaatcgtggtcagttcctaccaggccggaaacatcgatatgtacgacgtcaaatggagagataccaacgccagcggtgaaggcgcttccggagtttgatgccatgttctgacgataaccggcacgcaattgcgcccatttccatgcgttaaattcagcaccaacacttgcaaactgacgtttgctgtcagaagtgaagccactggcaggagtcagatcaacgtcaagagcagtggtaaacaggtcattatgccaggatacaccggcggttgcctgtggacgaactttgaaggtttctttaaagccattgacgactttagtatcaatactgcgtggaatgatgttctgggcaacaagaccgacagtccagttgtcattcaggtctgtataagcaccaatatcggcgttgaatccgtttttcgtgttgtggtacttgtcaccgtcaaaatcgtctttgtcgtaatcacgaaccgttacgttgtagttaaacaggtccacacgctgatattttggtgtgacgccaagagaccatttttgtccggccgtttccagttctttggcaaatgaaattccgacgtcggtaattacagctgcacgcccgaatgcgcgtgaggtcagggcattcttatcgacgtcggtaattgttccattggcaactttgtccagataatccaggtctgcatcgtttacttttccgtttacgctgacagttccgtaagacttgaccataagggcaaacggcagagtgtcatttgccatggctgctacagctgatacacctacctgagcatctgcattgatattgcggaattcctgcagacgatgtttaagatttgccgctgcctgttgtacgccatgctggttatctacagcactgtcaaacaaatcccagtcatctttaacatcatcagctttatttgatacatcattaggatcagcaacttgtgccccaacagacggcagaagaaggctgaaatcatcattgctgttgtgctttgtcagtaaagccgggtttgccagaggtgccacaccataatgggaagatgctaccccggtgccacccattgcatcgttacgcgcttcaaaatatgacgtcgctgctgcagcgttaaaggaaaataatacagcagatgcaatgatggtgcgggtaatatgatttttcttcatcatttaatttcctgtttatcagaatttagacaaaacaacgctatgacacggatgtgccgtaattttttactttggtactatctggtatttaccagggtaataaagacgtattaaataagctaacaggtagtatttgccctgtaataaggttctcggcaaggccaggtctcaacgtgacgcgtcgcaaagacattgttgtattctgcctggttgtatattcagttaaccattttcttttttcatcgttcagaagtgttggtgataatgatagtgccggatatattacagagccatttatttctttttcctgtctcaatattaccccgcaatattctcttttcgtgtttcctgcgaaggggaaactatgccagaaaataacttcagtgttgctgctatcattaataagcattctgaaattatcagcagtatctggccattcaccggacaacgctatcggatagttttcatggccattcagccagtccggattgagattaaaacattcagcaagatgttcgagagcgtcagctgaaagatagtctgcaagtctggccgggtcctgtataaccgtggagcggatattccatggcgacagcaatgttgccagtaatggcgcatttatatcatgcgacagcatgatgtattcaattctgcttattatgtttcctgtggtgttatccgcaggcataaacatattatgaagagcatcctcaagcaggattcgggttaaatcagcggtggatatggctaattgttcgctcattatccccagaacttctcttaccccttgtgggtaacggacctgcagaggtgtcgggtttatctgacgaccgttgatgagtttttcgccgattgcttttttgtccagcgagagcatcattcgggccgcaataccggtcgtattcagtctcattgttcctccgactgagaaagtcttttcagctcatgtggttattgtatcttcggtgttttttctggtgaaacgaataatttcgatcatgcagatcgaatgtgtttggcgagttgttgcaactcgcctttctgtatgtgtcttgaatgatgtttacagcggggtgctgcccgggttcagagggcaaatcataatgtagtcagggtcgttaacaggtaacgctccgggagatgggacacgttcgcctttctgtgctgcaatggccagtgtacgcaacaaaacctcactggcgcggtgaactgcttcctctttcgttgtggcagtgacgtgaaggttatcaaaatcaccgatctcaatacgatgcgctttctgcccattttcttcatcgatggtcgtgatatgggcaggatacggcacaaaccatgctgccactttttgtgtctgccgccggcgggcatcaagcttactgaccagtagccatgcacgaagatgagtataccgtttcagcatattcatggaacgatgtcctgatattgcagcaatctccattacattcaggctacccagttcgaagaagcggcttattgcttcatgccgtagatcgtgaaaatgcaggtcctcgatgcgaagtcgttgtgtggctattctccaggcatttttaaagccggatgcggtgtaatcaaaaacattgccgtggagattaacgggcatcatctgaagaaagttacgggcacgtctggacagaggaacatcccgtgagtgaccgtttttggtttcaggtaaatgagccacaccgtggcgcaaatcaatgtgttcccaacgtaaggccagtatttcgccctgccgcatggctgtttcaagggcaagatggaaaatgacatacaacatcagatttttttcgcggaaatagcgagaaaggcgacgttcttctgaagacgttagccggcgatctcgtcccgaggatactttcggcttgcgaaccagttcaaccgggttagtacgacaggttccccattcaacacgagcaatattgaacagagatgacagaagggcgagttcaagacgtacagtattacctgtaatgggtttacccgttcgggggttgatttctgctaaacgaacgtctctgtatgtagcaatatcaacggttgttatttcgtccatattccgaagggcaatgggatatcgcttgataacattgctccggtaaaactcctgttgatgccctttcttgtgaacagaaactgttttcaggtacttatccagtgcgcgtgacagggacattttacggatgcgtggagacggcatgctaacctcaaaagaggcaaaaaataatgccaacaatcattctctgcaagcgtgccaatccgggacgtggaaatcatcatcagcgtcgatatggacgaatataaaaacatttacgttatatcccaaaaacacacaggtcttagggaggtttaaactgtgtattaacacctatcgtattgacgggcgtgaaatggcagaaacagaagtcgttcctattgacatgcctgactctaacggcgagatgacttggcaagccaaaaactacacacagtattcgtcctactttatgaagattacttgcttgaaatagcttattggcaaatggcatatacagttattgaaccattctgatcttcggttgtatcgcacgcagccgaccatgagttattggctgatgggaatgacctggtaagccatatgtaaccagttcgtgaggtgcatattccgccgccacctgtaacacgttttccagttggacaggtagctgttgctccaggaaagcgccaacctgtggcctgtgctgtagcaatttgaagctcaccagatcctacctttctccaggtaccggattggcacgtaggccagtgccaatccggtacttggcgtaaaagcaattctggtagtacggtgataactggtcgtatagcaaatggtcagcaaataccgctgccaacagggttttctgccagtcagtgctcatggagtgtgagcaatgcagaaaaccctcaaggttggaagccgaattactttgcaggatcagttgcaacttatgatgcaaatcgaattgttaaatgtggtttttatgatgaatacaatttccataaagggacatttagagctgatttaaccggaaaatgtagttatgtcgtcgcgtgtcagaactgagattaaattgctggcgctgctggcctacgtgccaatccggtcggtggtcagggggtaataaaattaattactcagcatgtaattggtacaaatcatccgtagcaatgaatcactttatcggcggtaagagtggtggttcgatctattacaagccgattcaatgtccgactggatacattatgactggaacacgcatgtacggtattggtgatggtgttgatgaggaacatgtcgatgcctactgttgcccctttaattaagctccagcaccaggaagattgaggcatgtgactgatatggtcccaccagactcataatttccccaagcataattactcacataccaaacgttgttttggtcggaatatacctgttgaaaaccaccaaagggtgagccattcaggtaagtccatgagcaatatgcatggaccccgagccttaaattacgagtgtttttagctatgttgtaggtctgcgttgtgaattgaattttaggagcgccccaggtaccggattggcacgaaagtattgcccctgtattatcgcggcctacaaggccgttaggcgaacatgatgcgccagcaacggcagttctttccagttgtaagtattcaccagtataaaggcgaccatcagcccgaacagtaccgcctttcacctgaccgccggtatagatgcctttgttgtttacacttcgaacccatgatccgtcggacatataaaatccgccaccgtgagtttcattgagccagcctttgctgttacgagtaattaaccaaccattattacttctgatatcaccgccagcggtgacatttacgtcaaagtttccgctattgccttttacctgaccgctgaaagtgccatttacaccattcacattgccgctgaaattaccagtctgggcatttactgccccaatgttattcaggttatttgatcccatatcaatggccgtgtgcattttgtttaagtcagggcgaccattgacctggaatctgtaaagacgatcagtgtcctctgctgcaccactaagttcatctgtcgataacagtacggcaatatgcccgttaccgcttttggcaccataattacttaaagctactgaccaggaacgtaatgcacctgtggctgttttgccgtcctggatatatccaccaagaccagtggtaatatccttagccatctggataagtgctttcactggataaggggtgccaccactggatacaaccattgcctgtagtaattccgggttttgggcgtttcgaactacatatgcctgtaaccgctgcccctcgctgtttgtctcaataaagccgctggacaaaaagccggtatttttcagcatggttgtcgtgataacggcaggggttgatgtggtactacttgcctggagagttgtgtagtttttccctatataagagcgggctgcactggcccagttgctgacaagacgagcttcagcctgccaacctttggtttttaaatagtcctgccatatgcctgctccccaggcaactatgatcataacaatcaataaagccgcgccaatttccagcgatgcccagcctcggtcatatttttcatcagattacccatagtggttgataaagattatccagtagcaaaaggacatggccaagacacagccatggacccagtgggccttctttatgtccttttatgcaccatgttgaatgccataagacaaatcctcctgcgcccagcaacacactccatatggcgttatatagccctgaccatgcggtaatacctgcaataagccacaggtctcctgtgccaatattaagacgatggcggttaaccagtttatgcagacagaataagacaattgcggcagagacaatttctgttgcacggagccaccatatatcagttgtgatttgtgataatattccagcgattaaaaaacgcctggtgaatgtaccaggtaagaggcctgttagtgcatccgttactgccatttgcagcatgaacgaaagaataagaacagcatgaatacggtagagaagttgggatggcgataaaataattaatgccacagctatactatatagccatattcctgacagaactgcagtgtgtgtcttataccagagatgttctgtatcagataaaaaataacgaactctgaataacagagttcgtccaataatggaaaatatgaacatcaatgggaggatataaacaggggagagacttatgcctacgattgtctgcattgtctgcctccctgcccgggaaggcatatccctttcatgtcacgataaattctccatactttattagcatattgctctcttgtttcatgtctgtccttacggaatccggcattgtatgatccaaggcaattccagctgacgccacatatctgaaaatgtcttgccagtatccagcttcctatatggatattaagacatggtttggtaattaaatcctcagactttttgattacgcccatctttataagctttggaatatgggttgagtttatttgcatcaacccataatccgtactactggctttgcctgtttttctgtccttatttatgttaattgcgcccggcttcaatgaagattccccggcagaaatggccttcaacaataatggttcaatttgatagcgtgcgccggcggcggcaaagcaattgtcccacttgttagtccagatttgtttgggggcgatgtatgaagctcgggcgggataaataagagaacaaagcaggattaatgaaataagtctgaggggcactttacccccggacattaaaactccttagccattgatggtgaagattagtttgtttgtaccggtgctgccattatcagctgtgcattgcgcactggcttcttcagtagtgacttttccatcattgtgagtcgtactgttcagggtaataccgttagttaaaccagtacgactgatttgtgtggcaatctggatacaggcatcctgtgggactttttcataggtgacggtaaaaccattgttgaaacctgatgttgaagccggagcaacagttacggcaccgccccatgagttatagagcgttgctgtacctgatgatggagtaccacgcactgtcatagtcttgggtacgccacccatctgaatgagagcacccgtcattttggttccactggtaaacgtatatccatcgctaccttttagcagcccctgagtacttgtgatgattgtctgtatgttcgaactttcatttgccacaccggttcgtgaacgcaacatatacaatccaccaaaaacaagggcaagtacgataattacaacaagtgctattgcaccctgttccataataccccagcctttgtcatgagacgtttctttctcatttttcttcagagcgttaacatcaatattttggattaacataaatacctcgttttatttaaagattacccatactgttgtcgccaatagactgaatgtctacaacggccatgaccagtaacaggagtgacatgacaagaaatatcagcataattaaacgcacaacagctgctcgtttttttactcgctccagcgtttgtacaagccaccgttggccataattgccgattagctccgttgcgccatctccctgtaataaagacaggaagttggctgcttccctggatgggaactgataaccgcactgacgcaaagccagcccaaggtgatccccctggcgtacgcggtaaataatgctgtcaaggcgtgtgcttaaccatggtgatgcaaagtcctgaagaacgttcagtgagttgagcgttgtcattttggctttcagaagtgcagccatattcaggaggaatgctgccccctgtatatccttataaatactccatggcattatattgtcagccaaagagcggcttttccagtttttcagagaccatgatattacacctgtgaccactgcaaaaagaacggcacatatagcgccgtaattatcgacaaacaaagataatccatagagaaaaccaagagcaccactccatgaatcaggggagcttattttgctcagtacaggtattagctctgtattaagaacatataatgtccccgtcatcatgattaacaaccccaccgggtaaatagccatttgccatatggcctgatggagttgctttttggcatctgtaagtgtggtggcaaattgtaatgcatccacaatggaaccacttcttattccggcactgattactgcagcctcttcctggggaacccataaaccaagagtatattccagagagttttcgccactgttttcacgaagagactcaatacagtctgtggccagttcagcaaagggatgccattttcgtccaaagtctgtccaggcatcccgcatctgttccagtgcggtctttaatggctgtttattttccagcagaaaacgcagagcttcgtaaaaactgcaccctgtagggggcgctgaaacgtttttctgacaatgaaacgtctcagccgttgactgaaattcatttcacgcatgttgttctcctgttaggcatcatcgatgctgaggcgttcgtcttcgtccagagggatgattctgtcggcttcaagagggtccaccaggccttcattgatacggcgaagaagatgctctacacgactgatgccatgcatgttttcaagccagtatttacgtgctgcaactttgccgcgtgttttcagaatctgaaataagcgattatcaggttctatcacttcagcaattacggtcctgccggtgaggcctttacctatttcaccgcgctttctgccgttaataattacgtcgtgattacagtcggagcatccgtgaggatttcggaaccagatattatctgtactgcagagtgaatctttattgcagtgccgctcaaggtaagcgcggtcgtcttcgctaagttcaggtactcgcttttcccatggaatacggcaggagggacacagagttggtacaagacgctggctgatcatcccaatcagtaattgcgcatcgcaaataagatcggcattcatacccatcgtaatcatccgctccggtatacccagagctgagtttgtatgtaatgtcgtcagaacgatgtgaccggtctgagccgcgtaggttgttgacatcatcgagacaagatcgcgcatttccccttccatgatggcatcggggtcaagtcgcattgccgatgaaatagcacgactccatgccagtttgacggcctcttcgtcggatttgtcacagataatcggggtttgtgttgcccccagaatctgtccttccagcggatcttcgatcgtcagcaggtgtcgcccctgattatcgtcaagatatacacggcaggcactgcgtaacgttgttgatttacctgaacctgttggaccagacagaactattttcccttccgggcggcgcagcatgacgttcagcaaccggatttgctccggtataaagcccagttgcttaaacgtgggaactttgtctccgtcatcgggtatcaggcgcataactgcaatcagaccatctcccgtaggtctgtgactgtatcgtgcaccaaatattcctatttttcgcattaattgtggggacaggcgcgcatcctgttccctttgagggaagaaactggtttcagtcacatcagccattgacagaatggctgttgcgcaaagtgaataacccaacgcaggttgatcttcatctacagtttgcagttcaccgaatattctcatgcgaactttgaaaatagactctgaaattaaaaaatgaatatctgaagcaccaagttttctggccgtttcaaaataggagagaactttcttctcactttcactgacatctgcaagatctttcagatgaataatccgttctttcggacctttattttcatcatcctgaccggcttcctgtaactcagacagcgagactacttttgggatgatgtcagggtataagtttagcagttcctggagattactctgtacgtcaggtcttgttcgctgatttgtttcgatgagaatttcatgggtgtctccccgggatataaaaaggagagcatccttcaaattatatttgtccatatcacatcactcagaaagtaagggtggtgccatcacttaacgtgacgccagacaatgagatcgacttcaccgtgacggatgtacccggaagctggctaccagtggtgacgcttgtctgacgtccatcagccatgcgaagaacggcatgaagacgtttatctttgccgtttatttccataataacgggcaattcctttctgtttttagatgtcggctgctctgaaactgatggcaaagaggcagtcataccagagaaacctgaaacagtttcagaggacagattaacatctgattcttcgagttgtttctgtagctgtgcgccctgaacttttgcctgtaaaagaatattccggttttgttgtgcttcaagttctcctattgtgacaagaggttgtgttgttgcaaatgaaaaaccggagaagaaaaatatggatggaataatgagtgatttacctggacgcataaatatgaccttctgaggaataactgaaagtaccgccgtttaattcaaaatggatattgctcagacgaacgccggtatcctgaaataaagggaacaacgcatcaggatttacaggcgttgataaactgaactgatattctttccatttctgaacaggggctggttcaccattgttacctggtaatggttccggtatggctatttcattaatggccggcgttaactgttttttctgaaaccatgtgaacacccgcatcagttgttctgagggggcagggactgcctcatccctgcggggcagggaaggcagtagccgggttacagaagccaggcgtgcaccatctttaaggttaaagtcaggaataacattaaagatttctttgcttcttgccagaaagccttcaatagttcctcctggctgtcgttcgtaaatcagtgtgaatgtctcgggagtacatgttccaccggtaagtttccagccttctagcgcgaccggtgatggttttcgaaggtccgcgcaggctttcagaaaatcactgattacaggttgtgacgcccatggatgcgggagctccgg

SEQ ID NO: 225 - DNA, 14537 bp, Escherichia coli
attttgacagtattaagcatggatcattaagcctgtctctgataggctcattctgcttttgcgcaaagcagatgggcctgaggtttgcttgtgaccccaacgcatgagcagatggctggcaggtgccgctaacacccaccagccgcccattttcacagcaggaaaccgccattactggcagcgtctgaatttattcccgtacccgccgttatccttcgccagacccgccagaactaactgagtcagtattaactggcaccgggcttcgcttactccggtagttctcgtcatcatgcgtggcgttacccacttgtcagcaggtaagaaatgaaggactgcggcggcggtttctgtcatatcttgctgttttagcatgtcttttcccttctggttaacatgacataccaataactcttgtctaaaaagccagcaagataaaaagccagtattcacgaccaccagcgtgtttactgtactgcacaaggtttacaggtacaaaaaaaccgctcagcggcgggtttaagttgtgtggcgaagtaaccactcttaacacgatataatactttttgcgtacgcgttaggatttttataaactatgcgtccccattctcgctatctttagtcggtcctggaatacacatgaaagttagaagcataggatttacaataaataacaataacaaaaatattaataccgttgacgtaatgaatgcttttatcaacgcatcaaacagagaacacagtcgcacagactatactcgtaaaattctcatttcggatgtgaatgatttctattatggattagttgtcacattcagaaaccaaaaaaagaactgtaagtcgcaatttgttgatggtaaattccagcttaaaattgaagatcttcaaggaagtgacaaacttgctaatttcaactttttcttaattaaaaaatctaatctttctggtctctatatgtatcaccacggttcatgcagtctgaacactctcttttctcatttagaaacaataagtaatgaatttatcagaaatcaaaataaagaagaaataaaaaaacttggtgataaaccaaaacaaaaagaagtaactgcaataaataaaaaatacaaagaaagactgactttcagccttatgacaaataaaaacaacattcagagtgttttatgtcaattcaaagagattaaaagcacaagctttaaatttaattatatagattttaaaggtggaccaatgactgcgcttgaacaatttgttaacaccaccacaatagatatgaattttaattctagcgacagaacaaaagtgcaacaactatctcagaatctttcaaatatttataattctatgagtggagttgctaaagcacaggttattgcagtaaaccatgcaggaatagaaaaaaccattgattttatgaactgccctgtttttttgaaacatacgatttcgatataattgccgataaagtcaatggattgacaaacgataattatacaacaaaccctgtttttgatatgataaaagaagaaatgctgaacgggacgaataaaaatgcctttatatgaatggctaataaataaaagattgaggtatcagtaccttacactgcttgcattctcgatcctggcattgcttgcactttacctattgtacagaaacacacctaaagtaagtgttaacttttttgatttttatcataaaaacttacgaggctatctcttctccggttttatttccgtgggctcatttttattgagcctgcatacctttgttataataaatttacgcgataaggtttttgcaactcaggaatataaggaaatttatagcattgccactggtatacctattgacaaaatcaatgatagtgtactttataaacctttagacaatttatcctcatttattaatacatcaatattatgttctatcacaacagcaattgcacaattcactattggactttcaactaatttatatgcatgcttattttgcgtatggcttgcaatactaacggtatttcttttattacattgcctcatcataatcagacaaaatattaaaattttattaaagcaacagagaaaaaaggggggtaattccccctaatattacaacattgaaagcacaccatccagaaaaccaagagctgtttgcaactcttttcttattgtcccatcagaacacttctgcttctttgcaatagttcttagtgagatgccgataacaaaatgagcaataaccaactcatactcttcgggcttatatttccgcaatcgcgcaacacagctgtcaatcatgattccttcatcatcatcgcattgttggcgtgttttctttccatgaggtagtaaacctttaaaccctgcagcaacaggctgccagtccacaccactgttatctgctgcagcccatgcaccccagcggtccaatacttcatacatatcacgcatcaactttctccacaaaatcaggccagcacgccaattgccagtgcacgatcgataaaacgaaatatcagctccagctgggagccatacttctcttcaaatgccacggtatccgcatgcagctcgtcgtgatgctttctgcacaaaggcaacacaaagaggtcatgcgcttttgtagccattccaccctgaccgtgacctatcaggtggtggggatcatcagcaggttttccacaacatgcgcacggctgcgtcttaacccagcgcgtgtacttttcattaacccagcggcgacgtttggggcgtaacataaaagactccggcgactccggatccactttcagcgccagcacctttttcgccttatcctggatgatgctggtggcaggaaccgaaggcacaaggtcactttcccgggtaacagacggcacaacaggcttcggtaatctcagtgccttacgggctgcactttccggtaaggcatccgccagatcattacgaatcagccaccagcacagttccggcattgtcacaacatgactgtcatcaaaaccgagatcccgacgcacaacagacaacacccagcgggcactgttatccgttgccattgattccagccgttccgtgaactgatcgcgcagctggttatcgcagtgccagcacaaacggattgcgcccggagcgtgtcgcattgttgtcatgttctcgctgtgccagtcggaatgaggccactggcagcctttttcacgaagtaaccagctttcaagacattccacgccaccagcacgacggatcactgcctcattacggaacacggcccgaacggcaggatcatccgccagcggttgtgatgccgccggaacggcaccactggcgaaagatgaataacgttccggctcaggctccagcaagacacgcccctgcataaacaagggcatcagctctgaacctggtctgaacaatacgatccccatacgcggggcaatttcaggggtcagtagtgctctcacggtcacctcaatgaacggtatcgagcagctttaacagctcagggaatcgggattcgaagaaatgcggctgcgtctcgcgcggatttgcgggactggtgatgttcttgccgaacatgcagcctttcgctgtcagcgaccagaattttttgatgttgttaatcgcggtacggctgtatcgttcgcgctgctcgacgatccccagcttcaccatctggtgatatgcctgattagccgtcaggcggataccatactgcttcagcagtgcactcagcgacagcgtagggcggcttgaaccatctggcgcatcagcaggtgcatcaatggcatagatcggcataagttcaggaagaccagctacctttgataatttctggtatgcaccaagtttcgaggagtttgacagatttagagtctttgctgctgattcaagcagaatgaccccggatttaattttgtcggatgtggtttcttctggtgatgaattatgaagcgcatcaaaagtacgtatcacttttaagctgaatgccgggctgatccacattgcatatgcatagaccagctctttacagacatacgtcccaccattgcgcccctgaatggtgatgacaggaatactacgggaatctcccgtagtttcttcttccaataattccacaagagccttcgtttcaggacgacgcataaactcgtgaacttccagcgaacgggaggagcgattctcaccagcggcaagaagagcagctttctgaaggtcgttaagacagtagttagattcgaagtactggcgcacagaaacgccatcaattacaagcaactgattcattggtttctccacaaatttttatccacgagcgggactgcactcccttttcgttgatgcaggatgaacttactgcgatttttaatagttatcaaggatacactgttcataaatacagtatctttaacgaggtaatacccaaatttagggtgttgctcaattccgttaccgagttgctaatttgcaactcgctttttcgtacttactgatagtgatctcgaccttcccctccgggataaccggtccccactccaccagcattcttttcacctgactgtcgtcttcccacacacccgcgtgggtcagggcgtcaaacagcgccttgttatagttgtccagatcgcggatccggttatccggaggaaacaacacgatctccactgaagcaggtgccgacgttggtttcggcagacgacgtaactgctcaactattgctgcacacgccgcgctctggaattttcgccccgccgcgcttatcaggctcttaccagcaaacgcccctttgttggggtgtcgccagtacgtgttcacgctgggcggaaaaggcagtattagcttcatactttcaggcccctctcatgtaaccagtgggttgcacgcagccttgcgttttcctcaccggcaagcagtgcgcggataatcccgaccgcctcgctgtcgtcgtccttcatcgcagtatgaagcgttatcccccgggccacgccacgctttatcgtgatgacgccttttttctccagtgcgcgaagatgctccaccgctgcattcaccgaacggtatcccagcatggttgccacctcctgattggttggcgggaagccacgttctttctgataagaaatcagcatatccagcacctgctgctggcattgagttaacgtcgtcatgccgccatctccctgaccagtttttccgcctgctggcgaacctgcgccagaaacgcctcaccacatgcctcaagttcatcgcgccctatgtagctgattgccggtcccttccaggtcttgtcgaaaacagcaatagcaccagcgaagaaagcacctgttggcacctgcttttcgtctttcgggataaaccaggcaggcagttcaaaaccaatacgcccgcgaataaaagcaatatggtctgcatcttccggccaccacacttcgctggtggcagctttgatcaggaaaacatagcgcccgcctttatcacgcatagcactggcatgtttcatgatgtaacgcatgccggtgatgtattgcccctcatgctgactggcgcggctgtacgggggattaccaaaggcagcacctttaagctccgcaagacgttctgaccagtcatgcgccagcgcattgtcttccgcagtgtaataagcggcacatttggcgttatcaccatcagtgaacagatccagaacaaacgggccaaacagggtgttaattccccagaaaatgttgtccggcgtgcgccactgatcgcccacttccttcagttcatgggctggtttgttccgcagctccaccagcgcctggcaatatttattactcattaagcccccacgtaattccctgacagataccactcttcacccgatgcagcgcgcttgctgcttttccgtaagcaccgctcacgatgcgccagaaaattgtttcgttctggctgggagtggctttcacggaatgcctccatccacaccgttgcagctcgacggaataagcccctggactccagttcttccgcctggcgagtcaggcacaaaatcacctgcgggtcgttagtgccgacacagaaattgcgcacaggtctggtttcacgaactggttgtggttccggctcctgtgctctctcagtcaggcgcgggaaatgtctgcgtgtatctccttcacaacggtgagccacacgcccactctgacgtaacttgcttgctgactgcagaacgcgctgccgtgagtaacctgcaaaagcatccgcaatgtctccggaagtacaccccggatgggcttcaatgaatttctgaacttcattcaaaagactcatgatcaccccctgaatcctgccgggatctggctgtagtccacgttgtcgtaactggctttgaagtacgggtcctcgcgtctggctgcagataccgcaggaacttcccaggattcttcgaaatgacgatccggaccaaagaacgtgacagcctgtttcacaaattgtgtgccgctgttacccatcgcagatacccagcccgcgtagcgtttcacaccttccagcatggtttcgggttttaccccctcattcaaacgggctttccaggctttgaaggctgcagattttgaattgccaccagcacgtttggggtatgccagccatgcctgctcaaactccggagagtattccggtcggtttgaacgaactcgcacagactcatcagcagatgcaccaacagctattggttcattgactggttctttgactggttcaaaagagtgactggttctgggtgaatctcctgcaccaccccctggtgcaactcctgcactacctggtgaatttgctgcaccagatagtgaattatttgcactaccccctagtgaatctcctgcaccatcaagatgaaggagatagatattacttgagttacctttttcacctttccgggtgactttttttaccagcccggactcacaaagggccgcaatatgattcatcacagaacgtttgctaatctcgcactggtcagcaatatgctggtagctgggccagcactcaccctgatcgctggcattatcagccagcttgatcagaaccagttttcgcaatggattacccactcgaattttcatcgctttaaccatcagctccatactcatgctgcacctccgagatgcttcatgttttttccggagcaaaaggctataagcggcatactgatgcggtaattacggcccagcggttcacaaatcaccttctgacattcacggtcaaccaggctaacacgtagaacatgccctgcaggcgtggtgtaccactgacccggacgaggacaacggaaagtatgattggtaaaccgtttgaaaatattccggatcatttgcgcccccttacctctgaagggttcagcgacaaatttatgagactggccagtagcgccgcgtcgttgatgcggtcatacagacttacagccagcggggattcggcttttgccaacatgggataaagctgctgcagccagacctgatgaattgatgaaatgtaggaatagagaacgctggcgttatgtgcaacgtcgctcagtacagagggatttgaaagctgtttctccatctggttaaaggcattgatgtatgcctctttgaaccgggcagcacgtttccccgtgaagcccatggcaagaaacgcaaaaccgtcgcgggtgatttggtaacaagggagtttgcggcctgtgcaatcggtgtaatcactgggctgaaaattcagctcagtgaattcaacagagcactcaagcgtctggattttttgaataacgtttttgtgctgcttgcagaaatattcggcaacggccaaagaagaggtaacagccttcccatggataacatcaattttagggtgagtttgggtaggggtggttgccatagtgacatcctcatgtgcgaattttgaaaactcaccacatgggacgccaatcacagaggtggtgagacgtacagggttggcgtaaccggtcgcacatgaccccggcgcatctttcgatgcccctgcacgccccaccataatttggatgtgaggaaacgtgcgcaaaaaaaccgctgaagcgcggttatgcgcatgtgcgaatttcaggacgccaatcccggcacccgctttataaggtgcctgaacagtgtaacgtcccggaattgcagaatcaatatgctggtggtccttcacactcaacaaaatcacgcctgaatttccacaaaggactaaagcactcatgcgggtagtctttgcgaagatagataacgcgctgtgtttctggctcccaacgaataacatggacataaagccctcttccgtcacgaaaccagcggttaagttcctgcacaactcgccccccacagtcaggtaaagttctctgtggttacttacagccaggtgatttggtaatctgcattcatgccgtaacaacaggtgttcagcgacgctgaccaccagctgttgcgacaaacggttatttgccgttaaactattcatgcgttagtttctccacaaccagaagcaatcgacgccacgacgcccggagctgcacactcgcgggcgttactcttttctggagcgcagaagattttgtagaccagtgctgcatgctcctggagcttcgaaattgaaagatacagttcgtcgttaattgctgtcttctcatgcggttccactacaccgtcttcgattgctgaacgaatctgtctggaataactgccgatctgttcaatgacttccagcaggcgctggtttatatcggcgttctctactgcctcaatttcaggaagcgatacgaacaccccaccagcagactgtgcgacagcatccgcaatgtagtgagtgccagccgcacgctgtaaaaccattgcccatcccagcgggaaaatctgatcgccatctgcacgaaggcggttgaataatgcgttctctgttacatccagccactcagcagcttcagcgtaaccccccggcaacgccgcgatagtttttctgacagctttcacgtaccactcaggctgtttttccactttccagtgatgattacccacggcttacctcctgttcctgtggtttaaacccattctggttttggctagattgaaaacgtgccggataaagaatctgcatttcgctgatttcacccttaaaaaaattggccagacgttctgcaagatcgatagatggaatttgttccagtctttcaatacgactcagcgtcgctggattgacctgaacgcccgcagcaacatgctgcaaagtaaatccgtgcgccttacgcacattccgtaatggtgattgcatataacctccacatattgcgtgatgagcatattatttcacgcaaatattttgcgcaagttgatttgcttaacgcgcaataaagaaatgtaataaacgcatgaacataggaaaccgagtcagacaacttcgccaggcgaagaacatgaaaatcgccgatctcgctgaagcaataggagtggatgcggcgaatatctcacgcctggaaacaggtaagcagaaacaattcactgaacaagccctgagtaatattgccaggagcttaggtgttgatatcgctgatctctttacctcagacgtcaaaagtaatactgtatgtaaaaacagtattggtgaggatgttgcgcaggtgaaggatgtattccgtattgaaatgctggatgtcagtgccagtgcgggaaatggccttatccagggcggtgatgtcattgatgtgattcatgccattgaatacagaactgataatgctgtatcgatgtttggcggacggccagccaatcacattaaagttatcaacgttcgtggggacagtatgtgtccaaccattgagccaggagatctcatcttcgttgatatcagtatcaatcagtttgatggggatggtatatatgtatttggttttgatgataaaatttacgtcaaacgactgcaaatgatacctgataaactgctggtaatttctgataatcagatttaccgcgaatggggaattaccagcgaaaacgaacatcggtttatggtctttggaaaggtcttaatcagtcagtcacaaacccttaagcgacacaattaacccctacctcaacatcaattagccaccagaaggtggcttttcattacccaccaaattgcatatctcgcaataaaaacacttgcataatgcgcaacttcattttatctttctttccagacatacaaacaaggtactaacaaaatttggttgtaacacggcgtatggcacatgcgtcgttagcggtctggtgacgttaaaggggacaatccactccttgctcgggcaaacaaaccaggtagccggaatgtgcaagtcaatgatgatgctgataagacgcctaaccagcgtggcgatccggtttgacgcctgggaagagaccagggtgcaacgatgagggcatttatggaaccgcgacaaagtgtggtgccgtaactggctaagtgctctcagcgttgtggtaatccgcgaaatggcgcggcggtaagtatggcggggttactctttccccgttgaggacaccggattgtcaggttgaccatacgcctgagtgacaaccccaccacaacagccactgctttggcggtaccagtttgtacccttgcttccggctggtaccgctcttttacaaaacagagaagagcatcaccggacgacgggctcataacccaatccatccgggcggctgtcaccgcaggtgttcttctctgttttgtggagaaaccaaccgaccttgcagggtcggtatgatgaggagcagcaaaatggctagcgtacgcagtactgatgtgcaggtatttatcgtagaactggacggcggcgtatttgaaaccaaactcggcgcagttctcagtgaagtcgcttccggtgtgatgaacacgaaaaacaaaggtaaagtctcggtcaatctggacatcgaaccgtttgatgagaaccgtgtgaaaatcaaacacaaactctcatatgttcgcccgactaaccgcgggaaaatctccgaagaagacaccaccgaaacgccgatgtatgtcaatcgaggtggtcgcctgactattctgcaggaagaccagggacaattactgactcttgccggtgaacctgacggaaaactccgcgcagcaggtcattaatatcgttcttaattaactgattatttatctcatcactgaatatcttaatatagtgaggacttattatgtctcagaacttagacgcaaccgcaattaatcaaatccatgcccttatttctgctcagggtgttaatgaaattatcagtaagattggtgccgatgctgtggcattgcctgagaatttccgcattcatgatctggaaaaatttaatttaaatcgcttccgtttccgtggtgcgctttccactgccagcatcgatgactttacccgttattctaaagatcttgcagatgaaggcacccgctgctttatcgatgccgataatatgcgtgccgtcagtgtgcttaacctgggtactattggtgaaccaggtcacgcagataacaccgccacactcaaactgaaaaagacagcaccgttctctgctctgttgtctgttaacggcgagcgtaactcccagaagtcactggcagaatggattgaagactgggccgactatcttgtgggctttgatgctaatggtgacgctattaaggcaacaaaagcggctgcggcagtccgtaaaatcacgattgaagcaaaccagaccgctgattttgaagataatgacttcagcggcaaacgctctttgatggagtctgtcgaagcgaaaaccaaagacattatgccagtagcatttgagtttaaatgcgttccgtttgaaggcctgaaagaacgtccgtttaaattacgcctcagcattatcactggtgatcgccctgtactggttctgcgcattattcagctggaagcggtgcaggaagatatggctaacgaatttcgtgatctgcttgttgagaaattcaaagacagcaaagtagaaacctttattggtactttcaccgcctgatttcattactgcaaatgcccctgcgggggcatttatggaaacgtaattaactcaataatcaccggatggtgagggcttccttttacccaaattcagcgcggtgcagcgcatatacgtggagaacaaaatgtcatttattaaaactttttccgggaagcatttttattatgacaagataaataaagatgacatcgttattaacgatatcgcggtttccctttcaaatatctgtcgctttgccggtcatctttctcacttctacagcgtcgcccaacatgcggtgctttgcagccagctggtgccgcaggaatttgcttttgaagcgttaatgcatgatgcaacagaagcgtattgccaggacatcccagctccactgaaacgccttcttcctgactataaacggatggaagaaaaaatagacgccgtaatccgtgagaaatacgggttacctcctgttatgagcacgccagtgaaatatgccgatctcattatgctggcaaccgaacgtcgcgatctcgggcttgatgatggctctttctggcctgtactggaaggtatcccggcgacagagatgttcaaagttattccactgtcaccaggccatgcctacgggatgtttatggaacgttttaacgagttatcggagttacgcaaatgcgcatgaatgttttcgaaatggaagggtttcttcgcgggaaatgtgtaccacgagatctgaaagtgaatgaaacaaatgctgagtacctggtacgtaaattcgatgcgcttgaagctaaatgtgcggcactggaaaacaaaataataccagtgtcagctgaactgccgccagcaaatgaaagtgttctgttatttgatgctaacggagaaggctggctaattggctggcgttctctctggtacacctggggacaaaaagaaaccggagaatggctgtggacatttcaggtcggggaccttgaaaacgtcaatatcactcactgggcagtaatgccgaaagcaccgaagaataaaaaatgagcgtgataaaaactcatacaggaattgttatcacccgagacggtccgcaggtaaaaaaactgcaccagacaaagcggatgtgggtcgtcggaaaaaacgagttttaccacaaagaaaccggacgccgccactttgcagaaaatactcgccgccgactgctgatcgataccatcaagcctatcgaggtgaagcatgtttaaacagaacgaaaaatctatcgctcaaattgctgagtatatcccgcgtgcgtgccgggatatgcagttgcaggaagccaaagcacgcctggagaaaaaaattgcgctctatatcgatgacggctgtgatgccgtcgttcttaacgcggcgttcgcgccagctcttaacagtcatacgcgaaagtcttttttttcgtgcatcgcagcgcagatccgtaaaggaggcaaccagtgagcaacattaactatcaggtactgcgtgaaaaggcagagaaagcaactaaaggaagctacatcgtagggcatacatctgttaaccaacacggcaatttaacaggagtttttgtttgtcaaaaatggaaaggagaacccggtggcgtgattgcggaatgtcatgttaactgcctgattgaatcagatgctcaggcttatgcaaacgctgaattcatagcagaggctaacccggctaccgtgctggcactgctggatgaacgggaaagaaaccagcaatacatcaaacgccgtgaccaggagaacgaggatattgcgctaacggtagggaagctgcgtgttgagcttgaagcagaaaaacagcgggcaaaagttctatttatggaaaatgctcggcttaagtcaggcatagccggtctgatacacctcggtattcgatatgcagatgttgaggtcatgaaaattgctggagatgcccagctttctaccccatgcactgacagcatcataaacagcattgcaacaggcattcgcatcaaaggagagtgatatggcgttaacacaccacgaactctgtcagattgcgtacaagttccttaagcgcaacgggttcaaggtttgctttcatgaccgctttgttgctgtaaccagtaccggagaacagccagatgctatgggattcagaaattcagcatcatgcctgatagaggcgaagtgttctcgtgctgacttgttagcagatagaaaaaagcgttttcgtaaaaatccgtctcttggaatgggcgactggcgattctttattagtgagccgggaattatttcaattgaggatttaccacctggctggggattacttcacgttgttaacggaagagtacggaaagtacatgggtggcccaagggtaattgctgttggggtaatcctgacgataagccatttactgggaataagcaggttgaatgcgattacatgttatctgcattaaggcgcatggagttgagagggcaccttaatgaaatatatgacggtgtgattgttaataagaaagaaggaa

SEQ ID NO: 226 - DNA, 3960 bp, Escherichia coli
caatcacgggttcgtgactggtgagtttgcgcagatgttccaggatgtgacgggaaagtgagtaaggcagagaggagaggggtttttcaattgcctcaatggcatcagacggattcatacatgtattcccggtgaaaaagacaaaaccccgcacaccggaaaggtggcgggggactcacggagataatatctgtctgaaattattttgaatggttttattttttaattttgctacggtaaatcatgtccagagcactttcaataacccggtcatttgagataccctcgtttatggataattttctcagtttgtcatatgcctcctgtgaaatatttacgttcagggggcgcagctttttatcaaccctattttttattctgttttttgggtagcccaggcgcttttaaacttccgggtaaacagttctactgagtctggtgaattctggttgttttttttccatgtgaagtaactggcataacaccaggccataatctcttcagatgattctccacagacatagttcagggaaatgttcgtcttttcctgaatatattttttgagccatgagcagatatcaaaatttctggccttaacctctctgaaaatatcatctttttcgagtagtgtggtccattcaatacttttctggttcaggtaatttgatggtgtgtataaaatgaaaggccagttgtcaatacacctgcgtatggcatccaccctcacgctgtggtgagaaggcagtgactccggagataaacaggtaagggtattttcataaccgtttatcttaatcatttcatataattcacaagtcaaccataaactggcgcgggcatcattacgataccagttaagatcatcctcagatggtaaggaatcgaagtaacgctggtctgtttcagccagaaaattatttattttcagtgtgtcagcaccctgtgaaataagagtgtttaaaatccgtttctgatacgagaaataatctttatcggccaggcttgatggtaaataaaacccattttcatttaagcgcctttcaagatatcgtattctgcttctttcatcttccacaaccttaaccatagtatctctccttcagtcaggataatcacacgtgattttaagtaaaatcaaagcatctttagcatgattttctcataaatttcagttcatttcacgtgtataaattaaggggcgggagatacctcatgttatctttttgtatctgctgactgggagggggttttataaaagtacattctttgccaggacggttgaagtgcattcacaggagtgaaccgctctttttattttccgggaagagcgctttctcctctcatcctgttattattaatttactttcgttttcgccttcgggcaactctcccctttgccttaaacaacacagttaatcccgcgtcaggttattaaggtaaatgttgatatgaatttcaccagagacgatgagtttcattgtgagaatcattgtatcctgtattttgatgcgtctctccatgactttaacagagggcttcatatttttatttacgataagtctggttttacgttactggagataaaatgactaacggtcatcactttcctcattaatcatatcttacagatatggtattgttcaccagtctgtcacgggtacagggaaatcatatgggcttccttgtcagagaaaatgactggtcggaaatttattcgggaattcattgtagtgcctgcagacacagatatatcgttaacgtaaactataattgacggacgatacgggagttacagtgactcatgaaccatgaatttcataagccatgatggcaagtaaatattcctgattaccgtaaagtatttcttagatattaccataccctctggcgttactgatttactgatagatatggcatccagaattatcataacatttcatccgttgacattatttacccggtctaatagcttttttaataaagctgactttcagatcactcttcctgagactgactgtttttccggtatcagttcacggtggtggcaaagaaaaaatttaaaacccatcagtcgtttaatttacaacaatgtactcaggctgcgtggtccgctgacagccagacctgatgtggctgctatttctgcatgaattgacgtgtgtaccgtctgaagctcgttgtcgactgcttcacaacactgatatgttagcatgatacgagttcccggactgttacttcaggttttacagggctttattgatttgattttaagctgatggggttactgatatgctgagcagattactttctggttagcgggtgggaaaagcacgttagcgtcagcatcagaagccagctctctgcgaaattccacatctggttatcgacattatcactctgggggtattctggtgaagggaaacataaagtctggctgcatggagtgacagccccggataggggcgcaagtttcatctggtagcagacaatgtgaaggactggattatccgggacaatttattgctcaactgaatgagcaatggtaagcgtcaacggagcaccgtattgacgcttatttattggtgagtattacctcctgtattgtcaacgccgctgtatataaccttttttcaccgttttatttgattgccgctatttatcaatggcgatgcccggtttccaccgattcatcatcacttattggcgctggcccttgccagtacacctgctttacgtttttccttcaggtggtagctttccccccttaatattcagcgtggttgagtgatgcagcagatgctcagggatcactgttgccagtacattatcgccgagcatttccccccagttggcgaatcctttatttgacgtcagaacgattctcgctttttcatattgccgcttcagcaaccggaagaacagcctggcttctttccggggcattggcagatagcctgtttcatcaaggatcagtacgcgtgcgtaacagagttattggagctgtcgctcaagccggttttcctgtttcgctttcattagcaccattttgtgacgggtccttatggctgtcggttcagggtatgtttcctggttattgtgtaccacgaagcaggggtattgtgtcgatggtcacatttcagcaccataatgcccagaatgctccctgattccacagatcactcaactcaccgtccgttcctacaaccggcaatacccgtaacctgtgccacacagacggagccgggccatgtgcagagaccggtaaaattcgttactacaactgttcctgaatatctgacgaagaaacaatgatctccggggacttcagccataacatcctgccgtgtgagtttcttccgcagtgcaaggagcgctgtcgccatgtacttattgtcaccaggatgaggcatgtaccgcagcatgccatttctggtaaataacctctgcctgcatattcagtccgtagagaacgtggcgtgtatctggctgtaaagaacatccctgtccatggctttcattcactggtggtgttcatgccagttcagcaatgacaggatgcccttaagccatccgtcatggctcagtatgatgacgacgaacacgctctgcaggtgagcatgyggggccgggagcatcatcatttccgtattttgtcacaccttccggaagcaaccggcatcagttgcggctatcgtcaaccgttgtgcggtatgccaggagcacgtactgatccatcagatccgtcagtgctgcgctctgcctctgacggttgatgatccattcctccagctctttttctgatttccgtttcaggttctctttccagtcttcaaggctgtttccggtcattaaatcaagccagcaaagccagaccagtttgaggcgcaactccgtgccaccaaactgacggaagaggctgatcagtttatttgccagagaacgctgcctcagacgttcaca

SEQ ID NO: 227 - DNA, 8551 bp, Escherichia coli
gccagcgtgcgttcggaagacattttcgtcagcaacggcagactgatttcctccactgacgctttctcctgcacctgttccgtgcggtcagcgtcatcagtcgcgtcatcttcactgcgcaactgcacaccacgctggacacatacgtttccataacgccaggacaccaccacgccacttccggcacgcatctccggcgtccacgccctgaccttcgccatgcagtcaatcagcttcatttctgcttccagcagatcggattcctcacactggttttccagcgcgtcgtaacgcgtcatcagttcgttcaggcgttcttcttctgcctccgtcagcaccgcttccggctccggcagacagcggtatgttccggcatcctcacggcactcaccgacaggctccatgcgtccggcgcaccattcccagccttcggcttcccgaaggtgttcagcgacagcctggagttttccagcagggcagcatcgagcgccacgcggtcgacataaccgtccccgtcatcgctgaacaaatcagtacgcagttcgtcaggtgagaaagcatcagcccccacgaagcggaatttactgttacctgccaccgccacttcactttcggtcaccagacgacgaatggtctgtacttccggtttaccgccccatcccgactggcaggcggcttcaaacacctgcacctgacgcgtggtgtcgttctccagcgccagcgcctgacagtgctctgtggtgatgcggtcttctgccagcgcatcgaggatgacaggcgcaaggtctgccagtttcagcattcgctgaacgtggcggggcgaatagcccagcaaatcaccgatttgtgcaggcgttttgccttcctgcgccatcgcacggaatccggcaatctgttcggcagggtgcatatcccgacgatgaccgttttcagtcattgatgcagccgtcgccagctcctgcggaataaccttcacgcgtacaggccagtcagccggaatgatgccacgctctgccagcatgttgagtgcagccagtcggcgaccacctgcggcgacaccgtaacggtcaccaggcagggtatgcacgaccagattctgcagcagtccgacgcccttaatggactccgccagttcgctgacggactccgcagaatacggcaccgtgcgcacattcagcggtgatttaatcagcgaggccagcggcacgctcacttcctccgtctgcgccagcagggcagacaggacagtttcctgcgtttttacagatttacggcttgctttgcgggtggtttctggttcacacttcgttacaggcataatcatccccttataattgcttatgtcctgccggacgttcgcgcgtccggcacctctcttacttaagaatcccgaaatccctgatgtactggttcatccagtacccggcacagtcctcaaaattccaggagcgccagatcaacgtgccatcctgacggacaaccaggcgaaaatgcgttccctgatcatcctcgataaagacgttccggtactgtgcggcaacggcttccgcctgttcgcgggtaaaggagccgtccggcagtccctgaagtattctgaaatattcgctcatcctcatatctccggtgatgccccgcacagggcggggcggttgtcacagtcagcccgatcagaacgggatgtcgtctgaaaacccgtaatcctccccctccggcggttgcggctgaggctctggctgcgcggccttacgtccacggcctttcgttttcgcgccaccttttttcgtcgcgtcagcactctgtggctgcccattctgctgaggcttcggttgcgcctgagcgttctgctgtggtgcacgtcccagcatctgcacggtgcccgtggtcttaacaagaatttcagtgacgtaacgggtgataccgttatcttcccagctacgggtacggagttgcccctcgatgtagacctgcgcgcccttgcgcagatattcaccagccacttccgcgagcttgccgaacagcaccacgcggtgccattccgtctgctcccgcatctcccccgtctgtttgtcgcgccagctttctgacgtggccacctgcaggtttgccactgcgcccccgttggggatgtaacggacttccggatcattgcccagacgcccgacgaggatgaccttgttgataccacgtgcactcataagaacctcctgactgaaagatgtgagataaaccggataccggcgacgggacgttcatgtgccccttcagaggagcgaaagctcctcctgccgtccacttcacaggggtttctccccgcagtggacctttccgatgggggcccgtttaccgcctcacgggacagctgtccgggggcggacgcaaaatttttagccgggttcatggctaaaaattttgtggccggtgcatctcaccctggacagatggaacgggagggggttacgtctgccccccggaaagtccacagcgggaaacaggccgcaggggtggcggcaggagggaggactgctgcgccatcaggcgcagtttcctcacacaccgtcaggtgtgcagggagcgcaggtcacggcgcgacaggggcggcgcgaccggaacggtcgctgcaagccgggttttcacgcatcggaccgtagcggcagcccgaaaccgcgccagcgggttcggcggagactggcgggtgcgccagcagctgcccgtcggagtcgggcctgacgaccggatgccgccaggcagccgggagccgaagtgggcgcaataaaagacagccagaaacggtgacagtgtcacggaatatcacacctgttccctgcatacagccatacactaccttctgaccggaaagccgggccggcagcgccgcaggcgctgcaccccgcatttccggcaggcgccagcctgccaggggttttcgcgcgggctgacaggcggcctccaccgcctgccctgtatcacctgtttctgctgccctgaaggatgtagtgaccgcccaggaaaaccgcctgctgattcgccacaaaatcgcagatttcatcaacaatctgcgcagtggtgagcggtttctgccccatttcacgacgccgcgcattaatcacggctttgtaattgcgcagaatttcgcgggtttctgtgctgatattcatgacatgtgctccccgtccagcgcctgtaacacaacgtccattgcttcgcgttcctccctgacgaatgcgtcaccgtcgcccccgttatcactcccgacggcatacaggcgcttcatttcactgcctgccagcgccatcactttttccagcatcaccgccggaactgtcacctgacggctggcgcgcttttcttccatcagctcacgaacaacgtcgtgaacaacgctgacatccgcaccatgctcaaaggcatcgtccagtcgctgcatgacggtttccagctcatcgtctgtcagactccagtcctgggctatgtgacgcacatccccacgggtcagcaccacggcaaaaacgcattcactgtccggcacgtctgtatccagcacttcgcggataatttctttaacagtacagtacatgttctcgtctcctttacaggggcggcattgccgccccgtccgttaatcagtccagcgccgcgtaaatcgcgttgcattcagggtgaaattcgatgtgacgccacaactgcgcatcgcgcatccggtaaagctgggtcagtcctgcatccccgctgtcgtggtacagccacaactggcggttaatcacaagggaggtcaggatgatgcctgcggcatcagcactcacggtacggtcaaaccagtttgcaccgttcaccatgtggaaacggtcaccgtccggcatcatgtagccgccaccgtccggcaggcggatgaagtgccagaagccgccctgatattccggcatcattttttgcgccagcgcgtacacatacgcctcggcatacagaaaatcgttgccaaacaggtaaggcagaaaggagagacggtcgcactcttcaacgttcagagtgacaggtttcgcatattgcatgatgttttcctccgttgttcacatattccgcgacaccgggcggtgccgtgcctccataaaagccgggcgataaggcggggatgcaggggcgcaagggaagccgcagcctgacgcacacggctggcgggagttgcagggtgaggccgcgaaacctgagcgggcgaacgaccggaaaatcacggcagacgggaaggagggaccgggtgaccgcagcggcgaagcgtacccttgcatcaacgccagcccggctaagatggaggcacggcacagcccgcacacggcgctgaggccacataactgaaaacccataaggccatgcccgcatggccgggtaaagcggagccggcggcgacgtcctttgtgctctgtccgggaccggcaggaaaaaggcggggatttccccgccatcgtcatcagccccggatttttgcgagggcatccgccatgctgcggatttcagcccggccttcccggaccacctcccgcagaacaccacggtcaaaccaccggcggggcggttcatccggtatacgcagcacatcgcaggccagcccactggacaggatatgctcaatacaatcgctgaccagatacatttccaccgccgaaaaacgtgcgccccggttcaggatggcatcgagcaccacgggcaggttttcgtcgtcctcatcgagccagcaggggtgatcgctttccttcaccaccaggcgaaagcggcgggtctggcgggtcagcaacgtctgaccggttgtggtcagcgccgccctgatacgctgcgcatcttctgccacccggcaactgacactgcgtaccgcatcgcgcactgcatcaagaactgccctgatttcgtcttcggtcagccattctccggcatacgggaaaaacacctgtgttccgtctgccggaagtaccggcagcgactgccactgactgccagacagtaccagttccgccccggttccggtcagtttctgaatggcggaggccaggagcggcggcagtacgccgccgtgacggttgatgagtaacatcgccagccggggcgcatccagcagaacataaatgctgatccagcccggatacttcgggttccgctggtcaacatccgtctcttccggccagccctgcgccagcagcaggttgcgggcgtgacgacaaatcagtgcgttcagtgttgtgttttcgttcatgattaatcgttctccctgaatcgccgcccggaggcggcgataacatcagtcgttttcgtgtctgttgtttttcagcagggtgcgggcctgattaatcaccgcctgacggcgggtgacgcattccgggacggcgaggccatgatcccgggcggcccattcacgtttccacaatgcctgttcagcggtctgaatcagggacgccagcagttcagcagggacggtcacctggcggttttcgctcacgttattgatgatctccatcgccacgccggaagaaataccggattcagtccgctggtcttccgggatgtcctccaggcgcgccaggacggttctgatttcatgatcggacagggaaatatccattccgtcagcgagggcctgaatctcttccggggaccagataaccagcatcagcggcatgtctcccggatactttgctgccagcgcccggcagagcgtttcgcatgttccgtacattctcatctccttctcagtctttaaagcacgcatccagttccagaatttcggtatatgcctccatcaggaggcggtttgcgcgaaacaacgtctgacgcaccagacgttccggcagggtgtcggcattaaagctgtaccgctgctccatctcattcatggttgtacgcaggtcgcacatggcattggccacctccgccacttcggcgcgcagtttttcgtgtcctgcatagttcatttacgcacctccggcataaaccagtcatcattcgcggccccctgctgcatggcccgttgcacggcggcaaggcgttgctgcccggcacggtgatactgctcaagcagctcgataccgatataccggcgtccggactggagggcggcgacgcaggttgagccgctgcctgcaaacgggtccagcacaattgcgttcgggtgtgtgaagctctcaatcagcggttgcaggctggtaacgggcttttccgtcgggtgatgacgattgcctgaatatttccagcccagcacatccggcagagggttacggggccgggccggactgccctttgccaggatgtaagcgcattcgtggcggtacgcgacatacgcagatttggatgtgtagtttttggtgaacacgaggtgccctgccacgctgaatccggcgcgtttccaggccgccataaagcggtcaatacggtgccagccgtagaagctgaccatcagcgcgtcttttttgagtacgcggtacatttcattacaggccggttgcagccattcatcggttttatcgccagcgatggtgcgcccggaacggtcacgaaaaccgacgaggtacggcgggtcagtcagtatgaaatcaatggcgttatcaggaatacgggccataacatcgatgcagttaccgaggacaaaacgggacataacaacgctccttctcttacagaggacaccgggagggcacccctgtggtgcccgttccccgctgcctgtgggctgttcaccgcgtccggtaacgggtcaggccgaccgtggaataccgcagccgtcgtctttctgacggcaaggctatgccgcgaaagcgcttgaagggcgttcatcagaaaagggcgacaggctggcgtacactgtcaccgacgccagccgggagcggtaaaagcgcccgtcccgtgcccaccggacgcgggacactgaccacaggcagcgtttatgccgcgccgcgtcagccggcgcagtaaaaagaggagcacggcgacatcctttaccggaaaagaaacgggcggttgcccgcccgtctccgtcatacttcatccgccataatgcgccacattgtcgactatccacgcaggcccggtgacttccggcagctcatcgtcatctgtcggggaagaccattccagttccccccacagcacatcaacaagctctccgcgctcatacaactgccagccacagaaatcacagccctgttcggcgtaccagtgctccagcgtgcagccgaaaaggcggcttaattctgcaacaacgtcgctttccggctgacaccacggcgtgtcgaaatctacctgaatgaagttttccccctgactgctgatattcaggtcatacccacaaggccacttcacgccataccgttctgtataccagtgatatgcagaaggaacaccgttcagaacaccgccgttaaagccattcacttcaatatccaggcgggtcggcaaaaccgtcagcaggtcaaacggcatggttttttccggcagtacgttgtcacacagacggttccaccacaccgatacatcctcgttactccagaagccacaccagtcacctctttttgcggtgaaaagtgcggtgatggtatccctgacatcgtccggtaatccttcccagcgacgctgtccagtaccgctctgcagccagagttcatgcagcatcaggcagttttgttcatccagtagcacaccgttctgcaggtgtgtcagccagcgtgtgaacgcgatattctccggcgatacaacaccacgtccggcagccgtcagtccggggcacggttcaaactgcacatcttcagtggtctgcagaagtccggcacttccggccagaaacagctgaataccttcatttgtggcgcggcgataaaacggtgtgactgcgccgctggccagtcgtttaatctcagcgatctgtgccggttcaccagaaaaatacatacgattcgagcaccagtttggcatgggaattctcctctcacatgcggcctccatcaggccgtgccgcacctgtaaccgggcgaccgcatacgaatgcaggtgcggccccgaagccgcagcgcgtggaggaggaacgacgaaacgtgaccgggtgaggaggccggcgacagcgacacacttgcatcggatgcagcccggttaacgtgccggcacggcctgggtaaccaggtattttattcacagaaccgtgcgcaaaatgctgtggataagctggacacagcagcccacagcaggcatacagccacacactcagagaattgagcgttttttagtcacaacaatgacatttgactgtgtgcggattcagttattagaatactgtataaacatacagcataaagaaaagggagatgagaacatgatccgcattgaaattcttttcgaccgccagagcacaaaaaacctcaaatcaggcacacttcaggcgctacagaatgaaatcgaacaacgtctgaaaccacactacccggaaatctggctgcgtatagaccagggcagcgccccgtctgtatctgtcacaggagcccgcaacgacaaggataaagaacgtatcctgtctctgctggaagaa

SEQ ID NO: 228 - DNA, 3917 bp, Escherichia coli
tgtaaaaaaccgactggtgaggtcggtttttttactgttccgttacagagtgggtggctctggtcggaaaagaactgtctataactgacctgtagatagtacgtctggaattatatttctgcaagtactggataagtgtatactcggcatgtcagctctgaggcatgttctgtccggcatattgttcagcgggaagaacaggttacaagtcctggccaaaacatcaggtggtgctggttttggtgctctggtcggagaagaactgtctataactgacactatagaaaccgttgtgacaggcagtgtaagagcgaacaacggggttctttctccagtgatggagaagcggatgattaatctgttaatcatcgttctcagggcagtagttgccgttgcaaacgcgctgattgctgttctggaactgatccgggaacttatcgactgataagcctggaaacgtaactaagggcaggaggtgaccgcttcctgccctttaacaaaaagagatctcatgttaaaaatttgtacccttccttaacttccagtgcctgctcctttgagtcaaacatcagtcttgttttcccgggaacaccccatgaaatgtattcgacatctatccaccattttccatattcttcatatggcccggatattacttttttgacaaaggcgtctaccagattcattgttttttcctttttgtgttgaaaataattaatgcgctggctgtgataattgcgattttctcccatatgatatttttctcatgggggattctacggagattatttcttcgcattggaatatattggatatgtttattcatgaataagagcaggtgtgggatttcctgctatttttgttggcgttattttacatgcttccagacagaagccggtactttgtcgtacaatttgttcattgtcagttccgcaaggcgatgatcaactgcagagttgaatgcttctattttatccgaggctaaagtgccctggtttttagcaataattttctcaagtgtctttaagctggaacagcgacgtaactgatataaccattcctgttttgtttttgccataaataggtccttgggtttatttaatacggcataagctatgtgttgttgcaaacaaaagccggctcatctgaaccggcagttatggaggctgcttatcttaaaatacttcagctacaggcatacctgcaatctgctcccactccttacgcttttcctgaatcaggcgaggaaagtcgacagggtaatcatatcctcgacttgccattgcgtgcaatgtgtttgcaatagaacgagcagagttaacaccaataggcaattctaacattggcatattgacatactttgtgtgtatttccatacagttttctcttactactgtccgtgtaaaattatcaatatcaatgccaatgacatctaatgttttattggggtaaagccgaatatataacgcagtaccttttttgatatcaattccgaaatataatgatggtattgatttgtgttcgtaagatgggtctggatcgaatacatcatgatattcagtctttatctgttctaggatattatttacgattgctcttttctttcttccatttttatatccggagtatagtaggaatccagttgggattactgctagtccccaactggtaggtgtattccaaatgattagtaatgggacggcgaaaataatgtagaaaagtgcgaatgcgatcacgcatgtttcttttttagaatgggtgccgccacggtttgcatatgctccaatcattatatatgacctccataaacactttttgatattttaatctctccaaatgtatatggcaagtcatatattaagttattatccctttattccatccttattgttgtcgttattcatccttttaatttgctcctctcttatattaggtgcgtgtcttatgtttctattgctgccagcaaaaatctcttttattgaaccagccatattgccaagcgtgtttacaccatcacgtcctcctaggaaattaattacatggtctgggaggtatgcttgtaaggcaaatgctgcggctacaatggttgtgcaacttctagcataaagaagtaagaaacctgcgaggctaaatatacctgtaaatgaacttatttgtacattggtcagtgcagcaccgaataaaaagtttaatatagtacctattgctataatggctacagaggcaaaaaagaatccgaaaaccatgataggtggtcttatcatgctgtctattaaatatatataaccgtaggcagcacgactccctctgtcctgtgatgtgcctagatgagttgccccccacagaggtccagctgtacatccgattaatacactaatgacccagttaccaatcccagtcatccagaaaataaacggaataaatggtaaataaatagataaagagaatcctgcacaaaacagcagtagtaacagaaagtatacggggggcgctaaggcctcaagtaaggcatttagtgttgaaatagcacttgtcgtcaaatctatgaatttaccaaatatagaactcccagttcctgaagtaataactctagcagatgtataagtaatccaaataccctctgcagcgaccatagttttatcaccaatatttttcatttttatcagtggattaacttgattgctacttgtacccgaatcagtccactcggtggcaatattgttcgtaagccattgcccaaacttctctgtgggcttgattaaagcatcttgtggcgtgcttgtttttgaaagtagttgttcgtctgctgaagttatagtacctaaaggtggggtataagttgaattctgcaattgagtcttgtatgcccccataacagcactaaataaatcagtatcgccaacctccccaagtgatgacattgaagttacagctggagctctgtcagccagctctgccagacgctggttagcagtggcaaaggtctgataccacgcgccaagcgttacccatccataggttgtgagataagacttgagagcttctttcctggattgttctccgttatcaataggtagcgatttttgtacagcacgctcatactcgtcggctgctctctgaatccgtgtctcgatatccggcaatgttccgttgccagaatttcttttttccagaaatgttgtcacaaactcactggcagcgttgtccatgtcgctaatcatattatccatggctgcacgttgtgctgagataacaccgctgtattcgtttttactgaagggattaaagaattttccaatcgtcgattgatctgttgttccgtttccttctactgacaggctggctgtaccacagataccgctgccattggataccgtgacagtgtaattaccactggcggttttagctgattctgtcatcagtgaagtcgaggatttggccgtctgattaaaatcatttagtcctgcgttaaccgcatacttacacagttccatttcaaaaatgccacgcgctgctgttcgtgtggatgcctgaactggctgtacagtcattgaataaccatttgcgatattatcagcggcaagttgaaccatcacattggcggacccaacccccattatcgatgcgccccataacataatgagctgagcgagactccagccatttccggttggaacgatcatcagaaaacctgcaacgacactcagtgtgccgacgacatcgcgtccggtgctgaatacctgtccctgatgccccgaacgcacaacatgacggataccaatgaacataaaccagacaacggcaagtacggcgatgatactgttgaacgccccgaacatgcttccgattagggtgggggcgctggttgacagtggattggtgaccacatcaccgaatatcgtgaccagcgcctgacg

SEQ ID NO: 229 - DNA, 4947 bp, Escherichia coli
gtcatgaccgctatgtgatagaccgggtgacagcgcagagtcacagcctgaccctgcgggatgcgcagggcgaaacgcaggtggtgcgtatttcctccctggacagcagctggtcgctgttccggccggaaaaaatgccggtggcagacggcgagcgactgagggtgacagggaaaactcccggactccgcgtctccggcggtgaccgcctgcaggtggcatccgtcagtgaagatgcgatgacggttgttgtgccggggcgggctgaaccggccaccctgcctgtggctgattcaccgttcacggcactgaagctggagaacggctgggtggaaacgcccgggcattccgtcagtgacagtgcgacggtgtttgcctccgtcacacagatggcaatggacaacgccaccctgaacggtctggcccgcagcggtcgtgatgtccggctgtattcctcactggatgaaacccgtactgcggaaaaacttgcccgccatccctcctttacggtggtttctgagcagataaaggcgcgggccggtgagacatcgctggaaaccgctatcagtctgcagaaagccgggctgcacacgccggcacagcaggccattcatctggcccttcctgtgctggaaagtaaaaacttggccttcagcatggtggacctgctgacagaggcgaagtcgtttgctgcagaaggaaccggttttactgaactgggaggggaaatcaatgcgcagataaaacgcggtgacttactgtatgtggatgtggcaaaaggctatggcacaggcctgctggtttcccgtgcgtcgtatgaggcagaaaaaagtattcttcgccatattctcgaaggtaaggaggcggtcacgccgctgatggagagagtacccggcgaactcatggagacactgacgtcgggacagcgtgccgccacccgtatgatactggaagcgtccgaccgtttcacggtggtacaggggtatgccggtgtgggtaagaccacacagttccgggcggtgatgtcagccgtgaacatgctgccggcgagtgagcgtccccgtgttgtggggctggggcccacgcaccgtgcggtcggggagatgcgcagcgccggcgtggatgcgcagacactggcgtcctttctgcatgacacgcagctgcagcagcgcagcggagaaacgccggatttcagcaacacgctgttcctgctcgatgagagctcaatggtgggcaataccgacatggcacgggcatacgccctgattgcggccggtggcggtcgtgccgtggccagtggtgacacggaccagctgcaggccatcgcgcccggtcagcctttccgtctgcagcagacgcgcagtgctgccgatgtggccatcatgaaggagattgtgcgtcagacgccggaactgcgggaggcggtatacagcctgattaaccgggatgtggaaagggcactgtccgggcttgagagtgtgaaaccgtctcaggtgccacgtctggagggcgcatgggcaccggagcactccgtgacggagttcagtcacagccaggaggcgaaactggcagaagcgcagcagaaggcgatgctgaaaggcgaggctttcccggatgtccccatgacactgtatgaagccattgtccgcgactataccggcaggacaccggaagcacgggagcagacgctgattgtcacgcacctgaatgaggaccggcgcgtactgaacagcatgattcatgatgcacgggaaaaggccggtgagctgggcaaagagcaggtcatggtgcctgtcctgaacacagcgaatatacgtgacggagaactgcgtcgtctctccacctgggagaaaaacccggatgcccttgccctggtggatagtgtgtatcaccggattgccggtatcagcaaggatgacgggctgataaccctgcaggatgcggaaggtaacacgcggctgatttcgccccgggaggcggtggctgaaggtgtcacactgtacacaccagacaaaatccgggtggggaccggcgaccggatgcgcttcacgaagagtgaccgggagcgcggttatgtggccaacagcgtctggacggtgacagcggtttccggtgacagtgtcacgctatcggacggacagcagacccgggtgattcgccccggccaggagcgggcagagcaacatattgacctggcctatgccatcactgcccacggtgcgcagggggcgagtgaaacctttgccatcgcgcttgaaggcacggaaggtaaccggaaacagatggccggctttgagtcagcctacgtggccctgtcgcgtatgaagcagcatgtgcaggtgtacaccgataaccgtcagggctggacggatgccattaacaatgccgtacagaaaggaactgcccacgatgtgtttgagccgaaaccggaccgggaggtcatgaatgcgcagcggctgttcagtacggcgcgggagctgcgggacgtggcggcaggccgagccgttcttcgtcaggcggggctgtccggaggagacagtcctgcacggtttattgctccgggacgtaaatatccgcagccgtatgtggcactgccggcttttgaccgtaacggcaggtccgccggtatctggctgaacccgctgaccacggatgacggaaacgggctgcggggattcagcggtgaaggccgggtgaagggcagtgaagatgcacagtttgtggccctgcagggcagccgtaacggagagagcctgctggctgataatatgcaggatggtgtccggattgcacgtgataatcctgacagcggtgtggtggtaagaattgccggtgaaggtcgtccgtggaatcccggtgccatcaccggtggtcgcgtgtggggggatatcccggacagcagcgtccagccgggagccggaaatggcgaaccggtcacggcagaggtgctggcacagcggcaggctgaagaggccatccgccgtgaaacggaacgccgcgcagatgaaattgtcagaaaaatggcagagaacaaacctgacctgccggatggcaaaacagagtaggctgtcagggaaattgccgggcaggagcgtgaccgggctgacataactgaacgggaagccgcgctgccggagagtgtgctgcgtgaatcacaacgggagcgggaagcggtccgggagattgcccgggaaaatctgctgcaggagcgtctgcagcagatggagcgggatatggttcgtgacctgcagaaagagaaaacactgggcggagactgatacaggaagacaaacactgatgacaacggataacacgaacacgacacgtaacgattcactggctgcacggaccgatacctggttgcagtcatttctggtctggtcacccggacagcgggatatcatcaaaacggtggcactggtgctgatggtactggaccacatcaatctgatattccagctgaagcaggaatggatgtttctggccgggcgaggagcctttccgctgtttgccctggtgtgggggctgaatctgtcccgtcatgcgaatatccggcaaccggccattaaccggctgtggggatgggggattattgcccagttcgcatattatctggccggctttccctggtatgaggggaatatcctgtttgcctttgcagtggcggcacaggtgctgacgtggtgtgaaacgcgcagtgggtggcgtacagcagcggccattcttctgatggccctgtgggggcccttgtccggcaccagttacggcattgccgggctgctgatgctggcagtcagccaccggctgtaccgggcggaagacagagcggaacgtctggcgctggtcgcctgcctgctggctgttattccggcgcttaaccttgccaccagtgatgcagcggcggtggctggtcttgtgatgacggtgctgaccgttggtctggtgtcgtgtgcaggaaaatcattaccccgtttctggcccggggattttttcccggtattctacgcctgtcatctggctgtgctgggcgttctggcgctgtgacgggtgtggtatctttgaccgtaacaggatgattcgtcagaggcagaacacagcatgacagagcagaagcgaccggtactgacactgaagcgaaaaacggaaggggagacgcctgtccgcaggcggaaaaccatcatcaatgtcaccacgccaccaaagtggaaggtgaaaaagcagaagctggccgagaaagcagcccgggaagcggagctggcggcaaaaaaagcgcaggccagacaggggctgtccatttatctgaacctgccctcgctggatgaggccgtgaacaccctgaaaccctggtggccgggattatttgacggtgacacaccccagcttctggcctgcggtatccgggacgtgttactggaagacgtggcgcagcggaatatcccgctctcgcataaaaaactgcgcagggcgctgaaggccatcacccgttcagaaagctatctgtgtgccatgaaagccggtgcctgccggtatgacacggaagggtatgtgacggagcatatttctcaggaggaggaagcgtatgcggcagcgcgtctggataaaatccgccgccagaaccggataaaggcagaacttcaggccgtgctttatgagaaataaaaaaaagcctccatcagagaggaggcagggaaataaggcttaaaaggaaataacttccgtacccgaaaggaagccaattcagtagattatttaacaccataatactgacgggttaaagaggagtgataaagatgaatggattcgtaagcgtaaagccaatgccgtctgtaacacctgctccttgcagactaaattagagctccttctaaattagacggagttctattgatggataaacctacagactggcgcttcggaacccgccggatattttctaatgaatttaaa

SEQ ID NO: 230 - DNA, 7288 bp, Escherichia coli
gtacgctcagaatatggcgcagatacgcttccggatcgataccgttcagacggcaggtgccgatcagcccgtacagcagtgcacacaagctccagccctgtactcagtgtccccgactggaagacctgcggttcagctggtatttccgttacatccatgaccggtgtctgcgcagcagtgcctgtcatcaggatcctgtcactctttcgaccgacagattatggcatacagttgagcacgtaagatccaaagtcaataactgacagggtttattctgcatcctccggcaacaaaggcatatacgatattcacttattttgtcggtccaacggctttttacagtagctcgttttgccctactgatgctacagctctttggtttgcttcatcgcggatatcagctccgacacaggcacagctgactggatgcaacgtctgcacttctccggatctgaaacgtcaattatcaggattctgacgattagtcttaagactgtcggtaaattaagtgatgccagttgtcaggatattcatggaaccagtctgtatgcgcctctggcgttgaaacaaacatatgaagtgtatttcggatatgactgtacgctcaggaagtacggcagattccgtcaaaaattacctgtaaagacagacatcagaaaaaacagcgctcgccgcagatcggtgaccgggcgaagcccgcgaaccggcgaggaagcgcaatggatctgtagttacagtgagcaggtacgccctgaagccttcataatcggtagtgtatgctgtttttctggaatgatttatccacatatccagaggcccgatccagtaaacagatccatgaatgatcaacaaaggatccattaaagatccccatatcgctgtaaaccttgtcattaatggtccgggagcacgatcacataagctgtggcatgttactgataaactgtaacaagttaatgataatctgtattaagtaatacatatactgcagtaagttaatgacataaactatggtcagtacgccagactctgttgttaaatacagactgcaggtttttcttcagtcagttagcggggctctgacatccgatttgctgtttattcttttactgtccacaggcaggaggctttctggaaaacgaaaattcagacatcaaaaaactgttcggcgaggtggataagtcgtccggtgagctggtgacactgacaccaaacaataacaacaccgtacaacctgtggcgctgatgcgtctgggcgtctttgtaccgacccttaagtcactgaagaacagtaaaaaaaatacactgtcacgcactgatgccacggaagaactgacgcgtctttccctggcccgtgcagaaggattcgataaggttgagatcaccggtccccggctggatatggataacgatttcaagacctgggtggggatcattcattcctttgcccgccataacgtgactggtgacaaagttgaactgccttttgtcgagtttgcaaaactgtgtggtataccttcaagccagtcatcacgcaggctgcgtgagcgcatcagcccttccctgaaacgcattgccggtaccgtgatctccttttcccgcaccgatgagaagcacacccgggaatatatcacccatctggtacagtcagcctactacgatactgaacgggatattgttcagttacaggctgatccccgcctgtttgaactgtaccagtttgacagaaaggtccttcttcagcttaaggcgattaatgccctgaagcgacgggagtccgcccaggcactttacacctttatagagagcctgccccgggatccggcaccgatatcgctggcgcggctacgtgcccgcctcaatctgaagtctccggtattttcccagaaccagacggtcagacgggcaatggagcagttacgtgagattggatatcttgattacacggagatccagcgggggcgaacaaaactcttctgtattcactaccgacgtccccggttaaaagcgccgaatgatgagagtaaggaaaatccgttgccaccttcacctgtggaaaaagtcagtccggagatggcggagaaacttgccctgcttgaaaaactgggcatcacgctggatgacctggaaaaactcttcaaatcccgctgaacataaactgtagtcagtgaagagtgctcctttactgactacagcttatattatcaggtgcagtgagtggtctgctcactgcagtttatattcagtttcctgcagtgctgcctgtggctgagctgccatctgcctgtcccttacgtgagtcaccccgtaacctgatgctgaggcattgctcccttcataaaacatggtttactcactacagcttatctacctgctccagcttatgttatgtctgttctgctgaccactgcttatataaggaagtgccgttacttcaggggaggcagtgtacgcaggatctctgcagcatcccgtccgtcacctgtgaaaggcactgccagcgtggcagccatatccagcgcaaacacccgtgtatagacctccatcgaacgtggatccctgtgaccagccagtgcctggatgactttccggggctggcggtgatagagcatgtgcatgatatagctgtgccggaaagtgtgtggtgttaccggaatcgaaaagtgtaccccgtcagcttcggcccgtctgacagcctgcttcagccagttgcgcatggtttcgtcggtcacggcccataatggttcacgacgacggggccgggtggtgatcatccagctttccatctgcctgacatagcttatatctgtcagcggaaccaggcgcacttcatcttttggcgggcgtccgcgtcgcgcacgcactttttcggactggatccgcacaaacggtcttactccatccaggtcaaatgattccggtgtcagcatccgggcttcgccaatacgcattccggtattccagagggtggcgaacagcatatggtgacgctgatccggcatatagaaaagaagggcactcacttccggggccagcaggtaggccggtgtggcccccgtggaagtggccattcttctcagggagagcgctgttgcaaaatccacccccggcgcaatgggtaacagggagacgcgttctggtgaattctgcaggggaatgacattgttcatgagttatttttcacgtagcacacgcactgtttatggatacaggtattctgacctgaacgcccggatccttccacgacaataaatcgcagcgcgcggatccttttgtttgcttatcacgctttatcgcgggtaaaaccaaatacgtaaaggtacgttttgcagcagggatcccgtattaatccagtcgtggtgcgggttgagagctggtttgccgtttttgggagaaatggggtaatgccagggcaaagatgatcgcaaggaaggagaaaaatacacagagaggggagttgcgctacgtgaattctgactaggtacacccctgtaaccctgccagttttcacgcaacgcaatgtggtggctgattactgtcagttgaaatgacggctggcatcctgatgctgacttaatatacgaataataacaatttcagtatcagtttgcagaaaataaaccatatgccgttcaacgggtagtgcgaatgtgtattcccccagttcaggacggggagtaccgatattatgattactcataacctgaaaaatgtcggatatctgattaatatatttatcagcctactcttcaccgaaatggtggtacccgtaatgctagatatcctccagatcctgactggctttaggtgtgagtttaacggttttcaccggaagccctcgcgccagctttcacttttttcagaaacgcatttttttcccacgacacaggttcaccgctgctcaagccttctgccagtaaatcccgcaggacacctggagacgtgactctgcctgtttctctcgaaggagacgaagtgactcgcggattacctcactctgtgtacgataatcacctgattctatgagagattctatgtactcccagagttcatctccgagagcaactgtcattgttctggccatatcaagcctcgtgattgtaagtttaaattttaccctgcaggctatgttaagttgtccccacacacaatctacctgttttctcgtgtgtgccacagacgcaatacataaatagtctggccattaatttcgtaacggatttcgtactcgccagcaaaaatccgtctgacctccctgggttcaaactgaaacaactgttctcccatacgtggatgagttaacagaatgaccggtgcctgtgtcagggactgtaccgttctggcggcagcaggtttactggccagcaccagaaaatcatataaccgcgacaaatcagaaagcgccttactggtccacttcagttccatcagcgtggcaccggtaacggattgtcagtactgaggctgtccgaccaggcctgtacagcctgatggtcgataacctgtccggatgtcacatcgtccagggcttccagcgtcaggcgattacgctcctcctcctgggcaagccatgcagaaagcgcctgtttgataacccagcccgggaacgttccagtctggcggccatctggtcgactttatcagccataggtaatggcacatgcgcggtaattacttttgttgcttgtgcggcattgtttttcatttgcatatccgattagttgttaatcatatttaatcatagtgattactttcagacggaacaaggcaaataatgcgcgtcagcgcatgtaaggcggcatacggaggttacatgtagcacaggtgtaaaaccgccgaagcccggcgtaagccggtactgattgatagatttcaccttacccatccccggccctgccagaccatacctgttttcagccatgagagagcttctgtgcgcggtcggagtggtcccgacgagggtttacccgaagtcggggcgtatctccgcgttagcgggccgtcagggccgcttacgagcgtgtattcaatacttccagccagaagactgacagcgacggcaatgcttagttacaacattcataattaaaagcgactctgttccggcccttcgggccggggccgcttttcagttatgagggaggggctttgtggcttcagttctgcgctggtccggggtttttccgaggtctatatttgcatgttgtaactaatgtggctccggtcggggcccgccgcttgcggtgggaggtgcatatctgtctgtccacaggacaggcagtgaataggttttctttttaaatgaatgtaattaagtagtttaaaggagatataaacaggtgtttaaaagatacattgcaccctgtaacgctggcggctggcgctttatggcatgaacggttgtaaccttatggggaagtcccttgcagttatatgtggataagcaaaattccccgtcgctgaggcgtattttgtattaaaaacagggggaaccggatgctccagaaggtggatggtgaggttgttttttgtatgtggtgctgattttttgtgcactaacgggcttcaggcgtgcgaatgcctccggcgcgggccggattattctgaggaggtcactttcagggagaagctgtggccagccggctgtaattacggttacgtgacagaatcatgcgctccttcatacgacgctccacttcgcgttttaccgcctcaccattagcagtgaagcgcccttccgagatttcacgcgtcagctgccgtttcaccagggtgacgatatcctgacgttccctgttcgcatcacgacgcgcacgggcacgttttattccacgggacttaagctctgtccggtaactgcggaaacgctcacgcacaaaacgccaggctttcgctatcagctcatccatacccagggtatccagcccctgctttttgcgctgtctgttttcccattcaacacgactgcggcgcgcagctgccaccgcatcctcagacacatcgagagcggcaaacagtgccggtgtgaacgtgatgtcggtcggaatgtagcagccgataagcgggtcatattccgtctggtaggtaatcagtcccagctctgacaggaacgtcagggcccgggtggctcgggtgatggagagttttcctgcaccggactctgtcgccagtccgcactcaatggccagtgtggtgatggaacactggacgcggttggccagtgggtcatagtggaaacacagcccctgcagcagcgcatcaatagcccgtcgacgcagcaccggtggcatgcgccacatgaatggcgaaatcaaaacgggaggtgaagcccaccgccttttccatcagtttttcgcaaaacttcagcgttccggcaccttcacggggtgtaaataccggattcgggttctttacctggcggtaatacgtttgttgaagatcagtcacaccatcctgcacttacaatgcgcagaaggagcgagcacagaaagaagtcttgaacttttccggtcatataactatactccccgcatagagcaacagcttctatgcagtttcttgttagccccggtaatcttctcttagtcgccaaacctggtgaagattatcggggtttttgcttttctggctcctgtagatccacatcagaaccagttccctgccaccttacggcgtggccagccacaaaattccttaaatgatcagtaatctagcactaatcttctgaacactcaagaatgtaagcccatcatcacatgcatcgtttttgcgcttcactttttatcagtgcggtcagaacttcagcctgggtcaggccatcttcattacacatttgcatgagcatggccttatactttggttcgagaaatacttttacttccttgaacgaagctcttttacgggccactgataatctttgtttctctgcatcagaaagcggattcccctttctgtatgctcgttttgcgccagatgaggaagtcactgtattttctgtctgcgacatctcgcctcctcaatacttaaacagggatcgtttcgcagagaatactacagttttttgaaatcagtgacttgaaagttgtgacgatgatctgtgttggcgcacaaatcatgtctgattacgaccgtttaatgtaattttgataataaaatgactgaaaagtaggaaatgctttaaccagggtaccggccccgggcgggaccggcagtttctagggaaggtgcgaacaagttcctgatatgagatcatcatattcatccggagcgcatcccagagggacatcat

SEQ ID NO: 231 - DNA, 2030 bp, Escherichia coli
gcaaaggccaggcctcagcattttattatggtgatcccctgggcgaaatgcgcctggtaagcagagtttttgaaatgtaaggcctttgaataagacaaaaggctgcctcatcgctaactttgcaacagtgcccttgatatctagtatgacgtctgtcgcacctgcttgatcgcggccgcgatagctagatcgcgttgctcctcttctccatccgcgttccaagctgcggaaaggcacccataagcgtacgcctggtcgagcaggcgacgcggatcgacgtccagcgcacgagagaatgcgtccgccatctgtgcaatgcgtctaggatcgagacaaaggtcgtctctgtcagccggatcgtagaacatattggcggcgccaaagcccacttcaccgaccagaccgacgggatctatcaccagccagccgcgactggagaacatgatgttttcatgatgcagatcgccatgtagcccacgcagttccgaggcattgctcatcatttgatcggctataatcgccgcgtggacgtagtcagtttgacaacctgcgttttgatcatcgcgcgcccgctgaaacaaagctgcaaagcgatcccggatcgggagaagggcagaaggcaggggttcctcagatgcggcatacagcttcgccattagttccgctgcaatttcggtcgcctggtagtcgccgtgctcggcaacgatgtgagagagcattcgctccccggcatattcgagcaacatcagattgttctcacgaccgagcaaccggactgctcccctcccattgcgccataccagatagtcggccccgcgcagttcatcagcaatgtcttctataggtttcaatcccttgacgattgcaggagtcccgtctggcaatgaaactttccaaacgaggctggaaaaggtgtccgcaatgagaacaggttgcgaaacgtgccaatgagcaggaaaaacaggcggcatgaacatcaaccccaagtcagagggtccaatcgcagatagaaggcaaggcgttcgcggtcgggggcttcgatccccaatacattgaataggacagcgaaggcgcgctctgcttcatctggcgctgcccagttctcttcggcgttagcaatcatgagtgccaaatcggcatagcgatctgctgttccgagccgcccaaggtcgatcagacccgtgcattgaagagttttagggtccaccatgaagttcggcatgcagggatcaccatggcaaacaaccatatcggtgcgctcttggtcgagccgcaccggtagctctcgttcgacacgagccaaaagatcgagctgcggcgtactcttgtcctcgtccggtaagaagtcgggattgacggcattgcgggacaccacatcaacggcgcgtccgaacattcgcgacagcctgcgctcaaacggacattgatcaaccgataggctgtgaacagcgccaagttgctgccccattgacggccacgctttgagcaaatccgctccagacagatcagccgccggtactcccggaattgccgttatcaccaagcatgcaccctcctgttcctcctgccagttgatgacctcggggcaagccacacctcgacctttgagccaaatgaggcggtcacgctctccagcgagctcaccgcggcgggaagcaggtgcgattttcgcgaaggcatgcccgtcaccacgtcgaaaaacaaaatcaccagattctccgcctctgacaggcaaccagtcagaatgcgattcaccaaaaaaatattagttcgattcaatggaggttccttcagttttctgatgaagcgcgaatatagagaaatatcccgaatgtgcagttaacgaattcttgcggtttcttttagcgccgccaataccgccagcccgtcgcgcaaggggcgcggctcgtgtgtgcggatgaagtcagctccacctgcggcggcggcaagctctgcagcgagtgtcgcggccccgacatcccccggaccacggcctgtgagcgcgcgcagaaaggatttgcgcgaaacag

SEQ ID NO: 232 - DNA, 17706 bp, Escherichia coli
yagcctatccctgtgtgccttggcagtctcagtggacgcatcttcggtcagatcgtagcgagcgacttcagtctggttatcgtcattaaccagacgaataaacgcaccggatacctgaccaaagctctggcgacgagcctgagcatcgtggatggtcacaacgaagatgatcttgtcaacttcagacgggacggcgtccagtttaattttcagcgattcatcatcaccatcgccctcaccggtgcggttatcgccggtgtgcgttacggaaccgtcggatgacgtcaggttgttatagaagatgaaatctgaatcgccgcgcactttgccgtttgaggccagcaggaatgctgaagcatccaggtcaaagtcctgaccgtctgttgaacgcgcatcccagccaaggcccaccaggacatttttcattgacggagctgctttactcagggagacgttcccgcctttggaaagagaaacactcataaaataacctcttcgattagtaattgttcaggttaacacttaaggggattaactccccttttcctcagattcaggtttgcccgggaacatgacgcttgcgagaatgcccagcgccagtacacccagtacaacatacaggctggttgttgccgcgatgctgtaaccatgatgccagatgtgatcggtcgcattcaggccgagttttgccgcgatgaagaacagcagcacgataacggccttctccagatgaaccaggtactgtttcagtgcctcaaggacaaaatacagagtacgcaggcccaggatagcaaacatcatggcactatagacgataagcggttcacgactgacggcaatgattgccggtaccgagtcaaacgcgaacattacgtccgagagttcaaccacagccacacacaggaacagcggggtcgcatacagcgccgcttttttaccacggccaatggtgacatcgctgttttctggtttcgccagttcagcatccacttccttctggttaagcaggaaggcatgccctctgagcttcggccagatagggaagaagcgtttaaccatacggtaagccagatgctgggagtaatcctcaatttcatcatcgtcatcaccgcttttaagcatcatgaccgccgtccaggcaacgataatagcgaagacaacttcaacgtacggccccagactcagcaggctcgtaccgatggcgacaaagatgcccctgaagacgatggcaccaatgatccccagtagagaacacggtggcgataacgatccggaacggcgaaccaggagaagattgccatcatgacgaacaggttatcgaccgacagcactttctccagcgcataacccgtgacaaacagactggcaacctcagcaccgtggtggatatagaggaaaccggcaaatgccatcgcaaccacaacccagaatacggaccagagcgcagcactcttcagcgagattggcttgtcatcacggtgcataaacaggtcaataaagatggcaccgactgaaagcgcaataaaaacaatgaccgtttcagtcgggaagccgatgtgtgtggaaaccatattttacccttagggatgtggatcagaggccaaattcagccgggtcgaagcccaacgcgatagcgatctcgcgggaggccagtttctcgtcctgatcgaagttaccgtcacttttcgcaacggcaataccaacacgtaaggccagctgagcggcctcaggctgatctttcagcgccaggatgtatttcatggtttcgcccttgccaatttcaacatcgaaatcgaagcttgaaaccagtttattgaagaactcaatcacctcattggtatcgaagaccttcagctcttctgaagagcgcagaaagcccatcattttctgcttttcttccgaacttacgccgtcactcgatacggcaatacggacacatacagcaacggtgccctgcatgaattttttgtttttgaaacggccaacctggcgggtcagttcgtcacggcctgagttaatggcacctttaactttgtcgaaaaagctcatacctgtttcctttgttgctgtgttatttagaaccggcgctccagcgaaatccccagccaaatgcccggtccatttcgtcctggcctttgaagtactggttaattcgctcgactttaattgcgccgttttcgtttacgagtctggcaatggcgcacaatgtgcgacggttctcaccttcggtcaggcgggtctcaatgggcggttgatccggcacatgaatggtgactacaccatcagtcttgtcccagctgggaacaccttcataaataaaggcgtaaatcagcacttcgcggatatgcttccattcacgtccattgatatgcagccactcgccgtctgatacatcacccgtccggtcatcgcccttgagctgaacatacggttcatcgcgataatcaccgaatgcattaccgagcgcctgaatgaccgatttatacccgtcctgaagctcaacaaaggcccccagatccaggtcgattcctttggagccgaacatacctgcaaagcctgatttgctactgccccggtgccagttcaggttgatccggatttcaccgaagttatcccgtttggtcaggctgattgcaggcttctcttttgtcagcgataccttgctcaggctgatttttgtctcaactggcggaggggttacaaccggaggagtaggggctgcgggaaccggttcgtcggcaatatttacgccgaaatgctctgccagcggtttaagtccaccgttgaacccctgcgcaacgaagcggaatttccagtcattattacgacggtaaaattcccccagaattaaggctgcttcctgacggccgctcagttcgacactgccgctaaccaggccggtagccccttgctccacgtcgatggaaagattacgaagaccggacaccgtctgcccaccgtcacaggtcacggtgaacgcaattttctggacatcaggtttcagccggttgagcgcgacagtaaaggttgagtactggccttcactgaccaggctgacggtaccatcatcgttacgtggctgaccataaaacaccatgtccgcatcaccctgcaccttcccgtcggcatacaggcgaaacgccgaagcatccacctggccgcccgaggtgatccggacccgcaactcctgggctggaacgggggcattgccccccggcgtcaggttcattagcgaataaccgctgaaacgatatcggagtgcatatcgtcaattgtgcggccgcgacaggcatggccaagggcggtaaagtcccagttgccgttattacggcgcagcgaagaaataacgatcccggtatgtgagccctgctcagtcagcttgtagcgagccagctctttgccggtttgatcgacaacgcggcagaaagcgttttcgacgtcattgaacgactgaccacggaagctgtttaccgtaaacgccaggtattcaacgtttgcaggcaggcgggagaggttgaccttaatcacttcatcgtcaccgtcaccctcaccggtcaggttatcgccactgtgcacaacagcgccgcaggtggatttcagtttgcggaaccagatggtgtcaattgttttacctgtgctgtccattaatacacagccagcatcgagatcgattgagtcgttgcctccaaacaatcctccaagaagaccttttttcttaaccggatcccaaccgagaccgaaatgaagctggcttaatgcagatgattctttgctgagtgataccgtctggttcttaactaatgaaaccatgttttattccttaaaatggtaatgaccgagacaatcaaaggtatatttagtaactgacgaagaaaatcatatcatgatgaagttctctgacaagggaaatttttgtggttttctgtaaaaacacaaaaagaaatccttttcagggtgttagtttttctatgtttaatttaaatatcaatgtgttaccaggaatccaaaaaacactggcgcactccataaccacaggagttattaatcatattatgattgacatgtagcttagacactcatagactcacttctcaatcataaatttgcatggcgttccggataattaaaaaaatgaacaagaaaatttggtttatggaaggtttatcctcccagcgagatattattcagggggtaaaatcatttgcacaaaaaaataattttgccattaccgtttttgcctcccaccgtaacgaaagaaatgaaatcctttccgttgccgattattctttgactgaacctgaagatcctcaaaaacgtcttcagtttatccaggaaaccattcagacctacggcatccaccatattcatactggccgtaacagccagtggtttgaagaacaccgttcagccattgaatcgaccggagccacccttactaccggtgcaacaggcgtcgactggttaactctggctgacgaaaaagttacttttgctcagtttatggagcaaaacgggctcccggtcgtaccgtcctggcgggtgaatacgctggcagaattaaagacgcacctcgcggccccgccgttctcggacagcccggtatgcgtgaagccggtgacgggtatctatggcatgggattctggcgctttgatgacagtgcttcgcccatggccgtctttaatcatcccgaacatcgtctggtcagtccgcaacagtatattgcagcagcatcggcttctgagtcgtttaaaccccttgttttgatgccgtacctgccaggcccggaattttccgtcgatatcctcgcggataagggcgaaatactcgcagccgtgggacgccgtaaggaaggggctatccagtatctggtaaacgaaggaagcgcctgggaactggcttgtgactgcgcccgggttatgaaggccgacgggctggtgaatgttcagacgcgaaacgatgtgaatggcaacccggtgctgcttgaaaccaacatgcgtccgtcaggcggggtgggttataccttcacagcggggtgaaccttcccgggttgtttgctgcctttaagctcggtctgatgtctgaagatgcggtgatccagagcgccagaaataccttttctccggttgcagtgagatccatcacagatgtcatcgtttacccggaatcactctctaaccatctgaattaaggcgtgtttatgtctgataccctcgaagatatgatttatcgccgtaccctctcatgcggtacgatacaggtaacccgcgaccagggtgatgtttcgctcgatgacctgtttgatatcgctgaaagacgtaacccgaaacgcgcctttctgtttgtcagcaaagtactcggcaggcacattcccgtgccaccctcagtcatgcggcaggcctacagacagcttgccagccagttccccgcaacgctgacagggcccgtacttttatcggtatggctgaaaccgccgttgggctaggggccggtgtgtttgatgaagtgcgccaccagcatcgtgaatctgtctatctgacctctacccgtcacccggttgatggcacgttactttgcgagttcaaggaagaacacagccacgccaccgatcatctgatctatctgccagatgatgaagagaaaagacgtcgtgttaccaacgcacgaacgctggttttgattgatgacgaggcaaccaccggtaatacctttattaacctgctttctgccctgcgtaataccggcaagcttcaacatattgaacaggttatcgccgttacgcttaccgactggagtagcaacgccctgtcggagcgcacatccttgcccgtcacttcggtttcgcttgtaagcggtcagtggggatggaccccattacctgatgcacctgtcccggacatgccgaaagtcaacgtaacttcacgcggagaatgggacatcctgggaaaacagtcctggggtcgactggggatgctcgcacctgcggccgatctcggccatgaggtctccgtccgcaagggggaacgtattctggttctcgggaccggggaattcgtctgggagccgttcctgcttgctgaacggctcgaagctgccggagcacaggcactttatggttcgaccacccgctcccctatcgccgttggttatgccattgagtccgccatttcctttacggataactacgggctgggcatccccaattttgtctataacgtcgcccaccagcagtttgaccgtattcttgtgtgtactgagacacccgcagaaagtattgacacgcagcttcttaaagccctggctgaggttgcgcccgtcgtggagattgttacctatgaataaacccgttgttctgagcgaccttgacgacacgctctttcagacccgtcgtaaaatggtggacgagctggccctggagccattccgtaccggtgccgttgatcgcaccctgaatccacgaagctttatgacggaagaacagtccatgttggtggactggctcctggagcaggctgaactcatacctgttaccgcccggggaactgaagaaatcagccgcgtccggatccctttccactcctgggcaatcaccacgcacggggccgtcattctcacgcctgaaggcaaacccgacgaggagtggaaggcccatatgcttggccagctggctccctaccaggaaaagctgacatcgatgcagcgtctgatcactgaaatgatggacgcaaaagggatcaatgcctgggcaaggctgaacttcgaatactgtgaaacggcggtttatatggtgatgaagcaccgcgacagcacccgccttgacgagctcaatgccattgcagatgagatagaaacggtgtttccgaccgagggcttctacatccaccgcaacagtaataacgtggcctggcttcccaccccggttgagaaaggctggcagtcagatggctgcttgaaaaacttcgggctgaacgcggagtcttccccgtaattggcctgggcgacagcctgagcgatcatcgttttatgaaactgtgcagctggtttggcatcccgcgtcagagtcagtttgcagatgccatttcacagcgaatttttggagaaaattaaaatgcagccacatgacacatttaccggctcataccagcccggtgacgtggaatttctgctaaagccggttgtcattgagatgacgccggttgagcaaaaagaagagctgattcagtcagggaagaaacattattcggacatgctcagtcaggagccagcgccaacacaatggcatcttgatttgtttcaccgggcgctggatcggggcgcagagagacttgcaaaagaagtcacacagctcgctattgctctggccaaacgctttggtgatgagcccattgtactggccagtcttgtcagggctggcgtgccgctcggcgttatgctgcaccaggccctgcgtgacatggggaaaacctcatggcattacggtatcagcattatccgggatcgtggaattgacggtgcagccctcgacgtcattgaagagcggcatggtaccagcggtattgtctttgttgacggatggacaggtaaaggcgcaattaccggagagcttgtacgcgcactgaaagatcgcccgggctatcctgagcagccgcgactggttgtcctggccgatccctgtggctgctcctggcttgcagccagtgatgatgactggctcattccttttggcatcatgggggcgccggtatcaggcctgatctcccggtcagtatggtcctctgaaggattacacgggtgcatggtttgcgagcatctcagtgaattcgaatgcagccggatgcttgccgataccgtcgctcatttccgtaagaagttaacaccgtcatccctcgctcccctgagctggaatacggaatcagcccgggtcttatggcagacaagtcgcgacgttatcgcgttcctggccgatgaatttaaagtggacagcgtcaatcgtattaaacccggtattgctgaagcaacccgggctgtattacgtcgggtaccggaccatgtatttgtgcgttctattgacgacccggacgttgccttgcttgtagggcttgctcgtgaaaagggaatagttgttacagaaatggggggaaccctcggccagtatcgggctgtaaccattatcaagaaggtactctgatgaaaaatcgtctttctccctggaatctgggagccacgctatacatgcctgcaacacgggaagatattgctgatgccgtcctgcacgggaaaatcccgggcttgcgctctctggtgatttgcctggaggatgctgtcagtgaagcagacatccctgtcgccctcaaaaatctggagcacctgctgcacgagctcagtaacagcatgagtagcctgggtaaaaatgactggcctctggtgttcattcgcccccggcatgccgaaatgggcagatggttaaaagcgcatcatgatctttccgctgtcgacgggtttgtgctgcctaaatttaccctcagttcgttagctgaatggtgggatatcatggtcgggactcacctgtgcatgatgccaacgctggaaacagaagatgtctttgacgtggttcagatgcgcgagctggctacccgtctggaggaacatccctgccacgaccgcattattgcgcttcgaatcggcggcaacgatcttatgaacgttgtgtcgcttcgccgtccccgggacctgacgctgtatgacagcccgatgggctacgtcatcaaaatgctcgtttcggtcttcggcccgcgtgattttgccctgaccgcgcccgtatgtgagcatattgacgatcatgccgttatggccagagagctggctcttgatattgcacacgggcttgttgggaaaacggccattcacccgggtcagatagaggtcattcaaaacgcgctgatggtcactcagggtgagcattctgacgctctgcggatcctgaactctacccaggccgtgtttaagtcgcagggagcaatgtgtgaacccgccacacatcgccgctgggcggctggcattctggacagggctcgtttttatgggttacagaacgagcaaagcgctgatggaatcagattacttaccgtgacccagcatcattaaggaaatcataatggggttcaggttcagaaagtcgatcaacattattcctggcgttcgcctcaacctgagtaacggtgcaccgagcctgagtgtcgggccgagaggtgcttccgtttcttttggtagccgggggacctatgccaatctgggcttgcccggtaccgggctgagttaccgtacccggcttgaccgggccgcgcgttccagaggtgaaaaccggacggcaaccgacccggggctcagacaggcgcttgagcagaaagccgctgaactcatgtcagcggtaaccgcaatccgtaatattcacgagctgacgccggatccaaaaacaggcatcagctgggcagagctggaagcagtatacctgcataacagaacgtcgccttttcaggttccggcaccggtgcgtccagaaaagccagactaccttgcattgccggaaaagcctgccgagagcgaaggcattagttttttgggtaaatggtttgaatcggaatcagctaaagctgagcgccacgccgaaaatcttcgccggtggcagcaggagctgattgatgtggagcgtgagaatacccttcgacagcaccggtaccagcaacaacggacggcctgggccgaacagtatgcaaactggaagtttgaagctgaagaacatgaaaaacggctcgccacggctcaggcagatgcccggcagcagttccggacagacgccgcgtttttcgaatcatacctggcgggtgtgctggcagaaactgaatggccgcgtgaaacgcttgttgcatttgaagtaaagccggagctatcagcagtcctgctggacgttgatttagctgagattgaagatttccctgataagatttacggcgttaatgcccggggaacggagctgacggaaaaagccatgacgcaaaaagccgtacgcgaaaactatgcccgccacgtccatggctgcttgttccgcctggtcggtatcgttttacatacgctacctttcgacaacgtgattgtgtcaggctttacgcaacgggtcagtaagcggaccggctatctggaggatgagtatatcctgtcctgcaaatgcactcgcagccagatgtcgtcagtaaattttgaaggcatagaacacattgatccggttgaagcgttaggcgatcacccggttattagaaagatgagcagtaccttcatttttcagcctattgaaccactaaccctttaagcaggctaaatcttacgatgcaattaaataccagacagacccggatttttaagcttgccaacttactgggcaccggcaagcccgtttccgctgccgacattataaccagtctggaatgctcagagccgacattaacccgggccctcaaagagctacgcgagtcatattctgcggagatcaaatacagcaaggcaggtcattcctatcatctcgttaatccgggccagctggataaaaagacccttcgccggatgaatgaagcgctcgcacagaatgctgaactgaaaaccggtgagtccacagggaaggtcgtactcgataaggataaaaaacagctgtgtcattatcgctacgcatgcggattctaagaaaaattgaccgtctggctgcgctgagtggctcgacccgaagtgaagcggtagagaagctggctctgcactccgttgatgaactgataaaagaatacagcactaaaaagtcctgacgctaaatctcagaccggggtgaaaactccggttttgtcatatttcacctctgtattggcgtgagggagttttgatctattctccttccgcaatgtcagcagcgccttactgcctacaaaagctggtgtcttgacatcctcatgtgctacacatcaatctttgggcgatttacactccattcatgcagatctgtgatgtatgatgatttttatacataagaaagtttatttttgccggagtttttttcggaatcttatattccagtacggtctgaatttttttctgttgataagaggccattcacatgtcggtaattcaatggtggttaacttatttctataatgccgcttctgagtatttaatctcccccgacagatgtcgtgccgttttatcaaatcaacaaactctggcctcttcctgaaactactctcctcttccgatctcttaagaaggaattacatttgagacgcttacccgtatatctgctactcgacacgtccggctctatgcacggagagcctatcgaagcggttaagaatggcgttcagacgctgcttaccacgctgaaacaggatccgtatgcactcgaaacggcttacgtgtcagtgatcacctttgattcttcagcccgacaggctgtccccctgacagacctcctgagtttccagatgccagcactaacagccagcggcaccacgtctcttggcgaagcgcttactctcacggccagctccattgccaaagaagtacagaaaacgacggctgacactaaaggtgactggcgtccccttgtattcctgatgacggatggaagtccgaatgatgactggcgtaaaggcctgaatgactttaaagccgccagaaccggcgttgttgtggcatgtgcagccgggcatgatgccgataccagcgtcctcaaagaaatcactgaaatcgtggttcagctcgatacagctgacagttcgacgattaaagctttctttaaatgggtcagtgcgagcatttcggtaggcagtcagaaagtggagtccagcaaaaaagaagtgatcggtcttgaagacctaccaccgccgccgccagaagtaaatgtggtcttataattttattgattaaggggatgtcatgtctgtcagtctgagcaaaggccagggcgtaagcctgaaaaaaaatgaatacgatctctcgtccgttactatcggcctgggttgggatattaatgaggaaaagaaaggttttctcggcgggatctttggtaaaaaagaagaatacgaccttgatgtgatcgctttcctgtgtaattcagccggaaaggtgaccgatctcggcaatgtggaaaatggtaaaccaacgcttgtgaatggcgatatcatctttttcaacagccttcgccataagtcaggcaatatctggctgacgggcgataaccgaaccggagccggtgacggtgacgatgagcaaattattgtgcgcctgaattcccttgacgctcagtacgagaaaattgtgttcatcgttcagatctacaatggtgaaaagctccagcagcactttggtaaagttcagaatgccttcatccgggcagtagatgcccgtaatattgaaatggcacgattcgatctttctggcggacccgccttcgctagccagcgttccatggtctttgccgagctgatacgcgaggctacaggctggaaactcagggcaattggtgagccttcagaatcagattcgtttgtctcgcacctgaggaattacatgtgatgcgccgcctgcctgtttaccttgttatcgacacatccggctcgatgcgcggtgagtcaatccattccgttaacgttggaattcaggcgatgcttagcgctcttcgccaggatccctacgccctcgaaagcgttcatatctccattatcacctatgacaatgaggcgcgtgagttcattcctctcacgccgctggaagacttccagttttctgacatcgttgtgccaagcgcaggcgggacgttcaccggtgctgcccttgaatgtctgatgcagtgtgttgaacgggatgtacgtcgctcagagggtgataccaaaggagactggcgtcctctggtattcctgatgactgatggaaccccttctgatgccctggcgtacggtgaagcggtaaaagcgattcgcggccggggattcggatccatcattgcctgcgccgttggtcctaaagcaggccatgagcacttaaaacagctcaccgataaggttgtgtctctggagacgctagattcaaccgcgtttgcaggtttctttaaatgggtatcggccagcgtgtcttccggcagcacaagcgcggggattaataacggaactgatacccttccccctcctccaccagaaatccagctggtgctctgacagacagaaaggtgctgtttccgggcaacacctttctgtacagcaacgttttctgctggccgtaccagccgtacgaggaaaattatgagacgccttcccgtgttttttgtcctggactgttcagagtccatgattggtgaaaacttgaaaaaaatgaccgatggtctgcaaatgatcgtcggagatttaagaaaggatccacacgcacttgaaacagcctgggtttcggtaatcgcatttgccggtgtagcccgtacgattgtacctcttcacgaaattgcctcgttctaccctccccgccttcccgttggcggcggtacgagccttggggccgcattgcgtgagctgaccgtgcaaattgatactcaggtcagaaaaaccactcatgaggctaaaggcgactggaaacccgtcgtgtacctcctcaccgacggacgtccgactgacgacacaaccgcagaagtgaagcgctggaaggatcactacgcgagtaaagtgaatctcattgccgttggcctggggccgtcagcagacctgaatatcctgcggcaactgacagagaatgtcatgctgttcaccgagtctcaggaaggggactttacccgcttcatcaaatggatcacggcttcggttacggcgcacagccgcagcgtcggggacgacaaacaacctgagctcagccagactgaatacatagtccggctggccaaagacgagccagtaaaagcgtacgacgaaaactgcgttacgcttaccggccgttgcagcaagacccgtcgtccgtatctgatgaagtatgaacggccaccagcaagggtttccgggctcgatttcagcctgaacctgaacagctttaatattgccggatgctatcccatcgatgaggactattttgcatggtcagatgccaccgctaccggtttgcaggtaaacaccagcgaactgcatggcgtaccgggttgccctcactgcggtaatgccagtgcgtttgccctgtgctcatgcggaaaattgctgtgcattgacggcccggatgacgtgatctgcccgtggtgtgaaacaggtctgtcattcagcaatgatggcggaaacactaacttcgacgtaaacagagggagaggttgatgtcgcaaaatgctttacttgaagagaagattatccgcttagtgctgtctgagctgggccaccctgtagaaggtgagcggctttttcttctatcgcacgccccttcccttactgaagagattatgcggcttaaagagcggattgagagccttgcacagggtttatctgcgcgggttagtgaaggtgataacgacgcagagatcgccgcctcgtcagcatccagcctttccgatcagcaacaaacggtcgtaagtgatgctgataacccgggcattgacgctaccgatacaccattactgcaacccctgccagaaaatgaacctcatcctccgttctggaagctgatgccttattacgaatttgataaaccagcacagagggaagacgaaaacctgtcttccctggtattaaaacccgggcagataccgacaggccagcagcgggccagattagctgtgccacctgccgttcccccgagagctaaaataattattcccaacgcccgcgcaggcgaacgtttctcttcgccggttgctatcgttctggatgagggccagcaggctactgtcagggacgttgtctttccccggaacattggcctgacctttgacaaagagcataagttgctgacaggtacacccaccgaaaacggcgatatagagctttcagtactctggtcatgcgcttcacacgacgaatgcgaaacaaaacagctttttatagtcaatcccgatccgagaagcctgtggaaggtggtagagccaccagcagacgcttcctaccctaagtcccatctggacgctgctggcctggtcaggggtgacatacgtattgctgccgccagtcgccggggacgatctcatgagcatgccgggagcttcagagatgacgacttctatatcaaccactgccaggaaacaggatggtctgtcatgctggtcgcagacggggccggtagtgcggtaaattcccgggaaggctcccggattgcagtccaaacggctggcgattaccttttcaatcagctcagtggtttgaaaggcatccatttaaagcagcacattacggcgtgggaagggagcgatcagcaggcaaccataaaagccatgcttcatcattttaaacaggcagctacgctcgcggtcaacagtatccagaacgaagccatttgtgcagaacaacctgtgaaatcctattcaacaaccctactggcaactgtagcgctacgaactgataaagagctgtttgcggctgcattctggcttggtgatggtgcgataggtgcatacagcccttccggtaaagtcagaatactgggaaatcccgatagcggagaatacgcaggacaaacccgctttcttgaccaaagcattatcgcagacccctcgtttagcagccgcatcagcgtgggtaaatggaatgatgtatctcacttgatcctcatgacagatggcgtatcagaccctctgtttgagacggataacgggcttcgcagtgacgaaaaatggacccgtctccttgatgagctcatccctgtccttacagacgccagtattgcgcctgagaggttaggcgactggcttaactttttctccacagggaaccacgatgaccgcactattgcggtgttgtggtaagagatacgctttttcggggatcaatatggcaaatattgttacgtgcaaaacaaaggacggcgaaacagtccagtatgttgacgaggtaattggttcgggctcgatgaaggatgtttacttctcgcctgataaatcatacgtcgtcgctttttatcataaaccgcagaacgagcaggcccgggatcggattgatatgatcaccggacgctacaggcaaaacatttttggtcagtccggaggtgaatactggaaggacctgttttgctggccgacccacgttgttgagcatggggataaaatcggcatcgtggttccaacctacaaaagctactttttctttaaatacggctctaaaaacgatgattttcttggcataaaaggccgtgaaaaggaaggcaaatggtttgccagcgccagcaaccagaataaatttctcgacccacgtgaacgaggcaatacgcttacctatctcaaggtctgtctgctgctaacaagagccgtcagaaggatgcatgcggcaggtctctgtcacagcgatctaagctataaaaacgtgcttatcgatccagaaatgggacatgcctgcatcattgacgtagacggcctggttgtccctggaaagtatcctcccgacgtcgtgggtaccccggattttatcgctccggaagtggtgaaaaccagccatctttccaaagaggatccgaaccgcgtattgccaagcattactactgaccgtcatgcgctgtcggtgcttatctacatgtatctgttcttccgtcatccgctacgtggcggaaaaatacatgacatgtcggatgaagtacgtgatgagaccttatctatgggtgagaaggcgctcttcattgaacatccgacagacaaaagcaatgcagtcaaagtcagtcagctatcctccttttcactgccctgggctgacccggagaaaattccttacaccatcatgggcccttatctgacgcctttgtttgaacgcgcctttattgatggcttacacgatgccactaaacgcccgaccgccgatgagtgggaaagtgccctggttaaaacagttgatctgatacagccctgccagaacaaggcgtgtgaacagaaatggtacgttttctcaggtaagacaaagccggtttgtccctactgcagtacgccatacaagggtaaattaccggttctaaatttatattcatcccgaaaggaaggcagttatcgtcctgacgatcaccggttgatggtgtggagcgggcagtcaatctatgcgtggcatgtgaatcgcctcattgcgccaaatgagcgcacaaccgatgcacaaaggaaacgagttgggtattttgttttccataacgatcagtggtggttagtaaatgaaggcataaatgggcttatgtcattaccggataaacgacagattgccattggtgaaaaaattgaactgacgaataacgctcagtttgttctgtcaaaggaggaaggcggcaggctagtcgtcgttcagttagttgaaaactaactgtcacgaacggtgcaatagtgatccacacccaacgcctgaaatcagatccagggggtaatctgctctcctgattcagaagagtttatggtcacttttgagacagttatggaaattaaaatcctgcacaagcagggaatgagtagccgggcgattgccagagaactggggatc

SEQ ID NO: 233 - DNA, 2924 bp, Escherichia coli
cattgagattttctacaatcgtcagcgtcgtcactctcgtctggggaatatctccccggcagccttcagggaaaaatatcatcagatgactgcttaaaaaaagaacaaatggtagtgtccgctattgccagtacacctcaggtatcaaaaagcgatagatgcagctaatacacaacataaccaagaaataaatcattaaacgacaacacttaataccatattgtgaagatgttcagacatggcggaattcccctattctttgttggcgcttacaacagactatattccgccatatctgtctttattgtgtataaaccatcgatactgatgtttgatagtgctaaataatcattggcgcaatcacaaagcctaatgccactccagcaataattccccccaacccaggcagcataaatggatgattcagcacatatttgcctacacgagttgtgccggtagtatcaaattccatggcagccagtgatgttggatacgttggcagtacaaatactccggtgacggccacataggacgccagaattgcccaggtgggcacgtcaagcgcgacggcaagcgggataattaacggcgtggtcgcaccttgcgagtagagcagcgcgcaagtgccaaaagaaccagcgccaacaacatcggatacgcctgcaaaatatcaccagcaatatctttaatctcagttaaatgcgcatcaataaaagtggtgcctaaggttacaatgccgagaattaccgccagcgaactcatccccgcacggaatgtggaggtgagaataatggcatcggtcgccgtcttacacagcaccaccatcaggcaggcggcagagagcatacagataataatgatatcgcgtgtttccatcggtttaccgatatcaaaacccggacgcagttgggggaaggcagcaagaataacaatagcgaccgtcgccagcaggaacaatccgacggagagcgtcgcacctggcttgatgctgctattattctcgtatttttgcaccagtcctttttgcaggcgctcaaggtagacctcgtcatcctgcaactcacatccctgtcgggaagcaataaaagcggcgaccatcgcggcagcaaaaagaggtgggaagacataccgacatcacttgaataaaactgacaccgtttacctccataatagtgagcatagccgccattgcggcgctgatcggcgaaccggaaatcgcaacctgcgaagcgacaaccgaaccggcaagcgtgcgggaaggacggataccggactctttcgccacttcagcaatcaccggcagcgtggaaaaaacaataaacccagtaccggccataatggtcatagaccaggtgataatcggcgcgattatgttgatatatttcgggttacgccgcataaaattaccagcgacgcgtaccagataatccattccgcctgcggcctgtaaggctgaggccgccacaacaacggtcataataatcaggatcacgtcgactggcggcgaccccataggcagaccaaatcccagagtcagaatggcaagcccaagcccgccacataaaccaataccgattcccccctggcgaataccaaaaaaatattgcaccaagtactacgataatttccagccaaaccataatgttctccgttataaatataattcagttaaaagcgaataactttctggctgcgatttaaatgattattgggttaaaagataatgtttaccgacacgattttcgtaccattttattccggcacgaacgagtgacgccgttgagtcaatatagcgggaaggctgctctttaacggcttgcgccagaataaccggaatttctgtacaaccaagaacaaggatttctgcaccgcgggaaaataatatttcagcctgctcattcatcaacttttgtgcgtgcgctatattgccagctttcaaggaataaatactttccatcacttttttctgaccgtcggcatcggggctgacacaggtaaatcccagcgactcaattcctttttggtataaccccatatatagcgtggcattggtggctaacaagccaattcgggttttaccacaggcgcgaacttcattgatcgtagtttctacgatacttaatatatcaatatgacaagcatcttttaattctttgaaccagtaatgcgcggtattacagggaataacaatacattctgccccggcatcttccagcttatgcatataatcacgcataacgggtaatggtgaacgcccatgatgcattaatgcatcggtacggtcaggaatatccgggatcgaagaaataattaaaggaatatgttcctgatcacattgtgcagcggtaaaagttacaaatttattaaacaggtcgacggtagctgccggccccattccaccgagtacaccaattaaacctttcacaatacctgcctctcaaaacgttaatgacaatacgcggtaaataactgctgctctcttttttaacagtcgaaatgggcgatgagaaatgcaaggttgtacaaggcgatgcaagacacgcatgatgcagctatggaacattccgcttattcaccatagtgatgatgtattctggttatctgacggaaaaatttcgtttttttggcgaaatgtgatatcaacgtcaataccggaaatgaaggggttatgcacaaaacgaatgataaaggccaggttgtgctaattgagaacattatttttattgccgggatgttttattatgtctttggattgaaaatacaggtgccatggtaatgaagaatatcgagacaaaatggttatacgatttcctgacactggaagcctgtcgccatttttctcaggcggcaaaagagcgtaatctttcgcaacccgcattcagccgacgaattaaggcgctggaggcagcgatcggcgttgtttt

SEQ ID NO: 234 - DNA, 2001 bp, Escherichia coli
tgctccatgcgggagaggaaaatctcttttcgggtctgacggcgcttagtgctgaattcactatcggcgaaggtgagttgatggctcatgatgtccctctgggatgcgctccggatgaatatgatgatctcatatcaggaacttgttcgcaccttccctaggtaatccattaagattcatccctcttttcacgaaatcaagcatgtgatctgatatttctctcattttaaaaacctcctgctcatttatgttcagatattaatttggtgttgcaaccatttattatcacagaattcagaatatcattcagttttatttttgttaaaatatcccctcttaagacagacacatattcttgtttatcatttttattaaacaatgactctatattttctacgtttaaataatatagcccacaagcagcataaattttagactccttagttgactttctattttttattatatttttaaatatctcttcgggattatctaatgtaagaatgtgtgtgtataatttttccccttcgctctgatagcctataaacccattcatacctatagaaaaataggttgttttttctaacgattgttgaaggggaggtggatctgatgaaaatgcagcagatggtaatataaacatcatacttattataatctttttcgtaagatacatactttcccctttggttttccatcgataaatgttcagataaacaatatatgttttttcttgttaatgtttatatcgatggttttataacatgaaatattcagcataataatcaacaggcttgtacctgatcaggtatcagtttgcaaaaatgtttgttataggtcatgaccgcaaccaggacacataatttcaccacaaccacaaatataatcggcatcatagtcatgtgttactataccggaagccgacttattatttgtgatacagtgtgtctcctgctctacggaggattctacctctataggaaaattatcgtgttttcgtcttgaattgtcttgcttgttgcctttatcaaaggtaacaatgaattcttcatttctgtgattattatcacaattcattcttatgcctcctcacatttcccgatgtatgaccgtcagtgctattagtgtgcgttcaagtctcaggttatacatgagcgacaaccatgagatcctgactaacaattgcatcagtgacataacgtaaaatacctcttgactttatatggacaatatgacactttttttgaaaagtaaataacaatcattctcttttgtctttgtctgggtgaggtcaggtaagatggaatgtgctacaaacagggtttctgtaaatgacagtcggtcagcgctgtcatcagctttgctgttatctttgatcatgagcgccactctactggaatattctttatcgatggcctgactctcctgactgaggtgctaagatttggtaacttttcataatgaaaataaagcaacaggtagggattaatgagttataaaaaactgtcccaattgacggctatattcagtttatctattactatcttattggtttcactttcatcccttcggattgttggcgaagggaattcttatgttgacgtttttctaagctttataatatttcttggttttattgagctgattcatgggattcgaaggattctggtctggtcaggctggaaaacggaagttaaatatgatggagtttatatgcagtttatatgcgagaaataacagaatcacagttaagatatatttccggggcgggaggtgcgccagcgacttcagctaatgctgcaggtgctgcagctattgttggagctctcgccggaatacctggtggtccacttggggttgtagttggagccgtatctgccggtttgacaacagcaattggctcgaccgtgggaagtggtagtgccagttcttctgctggtggcggtagctaattatatttttatttattttacaggcactttttcggtagtacctgtaaaa

SEQ ID NO: 235 - DNA, 3643 bp, Escherichia coli
gtgattagttcctgtggtcgacagaatccatgccgacacgttcagccagcttccctgccagcgttgcgagtgctgtactcatccgttttatacctctgaatcaatattaatttggtgacgggcgatggtttcagccatgtagcggatgtgttctgccatgcgttcctgaaaatcgacatcgtcatcaaatgcacgggaaatagcttttttgctggccccgtgacgttgcagattatcgatgcatagcgattcaaacaggtgttggggcagacctttttccaggtcgtctgccagctcagcttcagtttcttcacgggcaatttgctggtagtgtcgtgcccatgactgctcttcaatgcgatcggggataagccaggcattcatgatttatcacctccgaaattttcaagcctgttggcaatcatgatggcgatatcagggattgctggcgctgtggctatacatgcggggttggcgcacaaaccatagacggcggcaatcacgagctgtcttttccagtcgagagttactggctcagaattggcgtcatcgccggacgtatcactgcctggctcgttctgaacaacggtttcgccctcctgagcggcatcaacagcgttttcctgaatgatcttctcctcagtttgtgctgagtcttctccatcagcggcgtcattttctccaaaagtttcagcgtaagtttcatctcccattactggaccacagtcagggcaatggccgccaccgttctgactgcatgtggtgcaaaccttttccacttcctgttgcattactggccctggctgttgctcttctggcccgttttgttgcgtatccgggctgttttgtcccgcttctggggcaatttgttccactttggactgattctggtcctcagtgtcgcgagtctggatccccttaacccacttcggatcagcagggttactgatgccttcaacgaattctccacgcgaggcagccagtaatttgtcggcatcgactggattttttggggggatgttttccctggctttattgagttcctccctcagttcctggtatttcgtttctacagatgagacattttccagtgattgcgtgtcctcattatgtttaactggaatttcttccactgattcaggcgctgcctgttcattagccattgtgtccgatgcttgttgcttttcttcatcgccatgttttccttctgctgttccgcgctgcggcatcggtgctgatgagcgaccgcaggcaatttccacgatttccggatccgggttagtgtgatcggtttcggtcaacactttgttgagatattcagtcacgcgtgccgggatggcctcaatgccgattggtgcttctttcacggaagccaccacaatggcgcgggaataatccagcccaccgggcatggcgataaatttgtcgcgaaaaacagaaaagggcggcttattctctgacacgatttcttcaacgcgttttgcgtgtgctgggtgcaggttataaatatccacatccattgaacgggccagaacgccggtggctacatctcgtgcgagtgatgtcttatcatgtttgaatccttcaccacgatcggtaatatttccgccgccagcgttagcaccggaaggcgtacgggtaatgcctgaaacataatttccgttctgccattcttttgtcagcaggccctgatcaaggtagtcagttttcatccaggtggaaatgaacttgtcgaattcagccgggctgatgcgatgatttgcagagtgggggaatgctttccctacagattcagccaggcgactaaggtgatagttcgtcagtttatccagttcatgatgcgcggcgcgcacagcagtaagcaggctctgaaggtaactgtcctctgtgtccatctccatacggatcacgttattgcgttgttctggtgtggcatgatgccggtattttccatcttcatctttgctgaataagaagaggtgaaggaagcgatgagtaaggctcagagtggcgacgggaatttcacactcagaacagtcatcgtcgctgtccggggattcgcttttctccacatcatccggaatagttccgtccaggttatcgttgtcatcgccagcagttgtggcatcttcaccgttgatgttgtcatcgaaggggatagccatcatggtgatgccatcgttaccgcctttttcatagcggttgcagaattcagtatcaaacacgccttccggtggaaggtcattcacgacggggaaatttacgcgaacgggttttttgaaatcatcctcgtcgtagcctgcatcgtccatggctgcaatgcagcgggaaactgcgacagaaagttttctggcctcggtccagaaaaaaccgcctttgatgccaaggcgttttctgactttatcgttttttgcttcgcagtgtagtgcaaaagtctgtttatcagcgctcattgtatttaaacctctggctggattagaattagcggccctttgtctgatttctccgaatacggtgacgcagggagaaatccggtagcctgcgctgccggatttttatttcagtggaaggttgcctggtttgctgttttgtgagttgtttttcccttttcgtgctggcattcagggcagtcgcactcagaattttctcttgcaaactcaagagcctgtgcaagtgtatggatttgttgtactccaatgttgcttctgacaacttcacgtgcagcatgaatatatgggcttggtgttttgccatttaacccacataaaacaaaacgactgtccttatattcgttatttccaacttctgtaagcactgaaaaagaaaatacaaagtcgattttgtattctttgcatattttactgatgcgttctgcaatttctttgagttcatttattgcatcaggactggttttggaaaatatttcattttgcgcaagttctttcattttgatttttccgtgattgataattaatgcggttttatttcggcttgtctgttacagatatggaaggtgtattttattactcgtcacaacgacgctgcttttacgggtaagccatcgcgcccgatgaaaactttaatcatgcagtcggtaatgcatgtttttgttgtgaagttacgaatatagagttttctcttttcaatattgtttgctgaagcgatatatgtccgaccttcatgaagaacataatcgccaggcgtcacgcactgacgtggtatttcatcagttccgaagtgatgagcaatcataattatctccattttcacaaatgaactttgttgatgcggtgcctggtgcctccgggtgacgttaaccagttaacaactaacgccgggtcaggggacgatgactttccgtgacatcctgtcggtttaactgttccgcgtgcgcatagccgcattcaccgcatcacaaaattcactttaaaaagggcggacatcagcaatcggcaaaccgatgtccgccaagggctacacacagcaatgttgttattcacaaccggaagcgcacggtcgaagaaatctaacgacaagccttcaatgggtaagagtcttcgccgtgcactttcgtgttgtaccctggctttcagggtaatgtctgttcagtaaactgagactgccgaagcacacagggatagag

SEQ ID NO: 236 - DNA, 5774 bp, Escherichia coli
ccgtaaagacaggtcacgcacaacgacgacagaccgctgtgtcgtgctttgtgaaccgggcggaacgccggtatacggtaataccggtgatctcgaggcccgtctgcagaagaacgggagtgttcgtttccgtgaccgtcggacgggagagtttgtctgtacggattatggtgacagggttgttttccgtaatcaccatgaccgcaatgcgctggcagataaactggatttgattgcaccggtattattcgggcgtgatccacgcatgggttttgaaccagaaggaaacgacaaacaatttaaccaggtctttgctgaaatggttgcctggcataatgtgacaggccgtaccggtcacgaagactacaggattacgcgaccggacgtggatcatcaccgtgaaggaagtgaacgctactaccgcgattatatcgcggcgaacagcaacgatgacgcatcactgcctccgccggagcaggataaacgctgggaaccgccttctccaggttaaaaaaaggccgcgccagaatccggcgcggccactgttcagtacattccgtcccagtccggacggttgttttttttatgatgaaacccgtttacaggacgccctgtcgggtggttattgtcctgtggaagcgttaacaggtttatacctgctctttctgctctcactgatatctgattttcctcttttgtttcaggtagttctggtctgttcagcgtgatatagcgaattcgtcgctcttcccgtgtggtcgttttaagcgtattcaccgctgtttcccacaaggcactttcacgtgcgttgatatctgtgtcgtactcttccagcattgccatagccgcctgacgtcctgcaatgcgttgctggaatgtatccacgatcgtgtgcggctctgtgcgaatttttcgtctttttctggagggttttgcagtcaggacgccaatgatggcactgacattttccggtgacggtattcgacgttgagtagtacggggaacaagacggcggagacggtccaggcgtggcgcatccacgctgatatacctgtttataacaacgggatcgctgctgcagcttttctcatcgtcagggatgaagaatgatgctgatggtacggtttctccccggaaaatagaaaagaactcgccaggatgaagttcaatcaactcctgaacatttatcttgctttccatcaggatgctgatttgtgggctgtcaatccatgattcaccaaatatgccgtcctgacgctgcaggttgttcattctcgccctggcttcttcaccggcggcgcttttcagcgttctggccgtactaccctcgctgacaatcctgccggcaaattttgtccccgtgttctgcatcagtgttgcagtattcgtggctgttgtctgtccttctatacgttcctggtcctgtgccgtcaaaatcagagcaaaatccagtgaacgcacctgagtggcttccacagcaatacggtccgtatagtatgcccccacttcatcaaggaaacacagataagggaaacgccccttatattttttgacttccagtgcatcggaatcagttccttcgaggcggtagcccaaatcacgggcgagaatcatacttttctgggtgataaacattcgtcccagagcagacgttgtatgcgctgatgtatccagagcggggatcattaccatcagaatcctgtcgctgtgaatgctgtcacggatatcgatatcaccggaatcttcagcaaaaatatccccgaatgcttccgtgaatgtgctgaaagtttcagaaaactgcccggagagataagcatgttgttttctgggttcttccgtccaggctgatggtgtcctgaccagcgacaggtcgaaaccgggaacgtcctgaaggtagttacgtaacggtgcgatagcttcttccggccactgatcatcgaggccacgacagtaaagtttggccatcccttcgagagtcatatgttcacggagcatctgcagcgacattgttttgccttcgcgcacacaccagaatttagtaccaaataccagtgccttattcatggcaatggcccgggactgccactcgcccccctggacgttctggggcagcattgactgcattgtctccgctgtgaatgcctcagtgctgtaacagaagggattccaggtatttgactgaggacgcgttttttcaccactcagaatgatttcactgcgggattttcctccgttcatgaagttaatgacttccacatcgtcttcacgtccaaagcgtctggccagataccagatcgttcttgccgtatcattctgtgccttgccatcgacaagggtgaatcctcttgcccagcaaagtgggttaatcgcccaggcaaagatggtttccgttttaccgccaccggtggtggcgaaaaacattatatggcgggtcagatcgtccatactcagccataactccctgccaatatccctgacgcgttgataaccaacatagaatatgccgctggccggtgattccagaatgacctcatactggaacagggttggccagaagctgaaaagacttcttttaatcattctgtcctgtgacgggtcagcacattccagcgtcatgggcatacgaagagggcagcgccatcgctgcagactaaataccagcattgttatcagtgtgaacaacagacatgccggtaatgcaagtggccagataaaactggccacaagacttgccaccaggcaaaagccatagatattgagactctggagtgcattccagacaggatttccccaggctgtacggtgtaaaagctcggggttaacgcgatgttcactcatggccagactcgctgtcggtggttttcaggaataaattaagcgtgccagtttcctgcagaattcctgtaggcagatgccagccggtgtcggacagcacccatggggtaccggcaaatccgaacttacggaaggcgacattgttaacatcaatcgcagctctggctgctttcaggcatgtttcatctgcaggcgttgtttcttctgatggcgtcatcattccgttatctgcggaatacagtcggtgccagccggcagcacgtttctgagcatctttttcacacagcagtggtgccacacggtcggtggattcctctccaccaataactgaaaccgggtagataacgacattgaagtcgctggccaggcgttttaaggccggctccagaagtctgcagttaggacaggcaggatcgagaaatgcgaacagggttcgttcatgaccggatgacaggttgatggtaaacatgccccgatcggcgttccgcttcagaacagtagccagattatgtcgcgcagctgcggcttccggatttttgcttgtgattgttttctccggtacctgaacgtcttttttcgggggaaccgggagttgaatgccttcatttaatggcacagtgtgattcaggtgagggggaagcagtcgtggctcacctgctgtctgtactgcttcaggcgttgtatcatcccagaatacacgatcaacatagcggaacagagagaagccaatcgttgccattacgaacagcacaacgctggcgattatgccacggaacaaaggcgttctgctgaagcggcgttccatcaggtattcaaggcgcaggcaggaatcaatagctgtaagtatctggtcagcgttatgctcctggttatcaatcaggacggtttctctgttacgggtgcccatggcgtcaaaggctatatgaatcagttgattatttcgtgttaccagcctgatagggcatcccgtggaaggacggcaataatttctgtcctgccatccggccagattgcctgcacggaaatatgttttgcaatgcgtgttgcaaagtactcgattgtcattttcagttctccggataatcagaattcgttgtctgtagcaggtgtacggggcaggatgtcgtcggtgagggaccagttggtcaggatgcggcgtttccggtcgcgatctggttgtggttcatcccagataagaccgagactgagcatatcccgccgtaagccttccaccgcttcatcaacacagggttcagggcagggaaggccaaaacgcatggcttcggcctctgcacgtgcaacggccaccacaccagcgccttcaataaatcctttcgtggtattggcgcggtgtaatgcataaaacagcgttctgtccacgcctttcagccaaatccagttgggtggcgtaagccgcaggtcatgtgcatacagccagaccagcccactgcggacgtagcgatgttgtttcagccattgctgtgctccgttgcttttaatcactctctggaaagctgatttggccagtgaataaacaggggtacagaatttcccgctgtcccgtttgcttttaattctgcatgagaggttcagtgtatccatgagctttaatgctgccttacgatcatccaggaaatactgaaggccaaatatggcaaagagcgctttttcatgtggtgccatgtctttccaggacgttaaaggtttacccaactgggccatgaaacatcgtcttgcagctgcaacatcgagctgcatattggtgatgagtgcatgctgctcgacaaatgcttccggggtgagagcaacccgccgctcaggccgtttgccaccatgaaagagttttccggatcaccatctgccagtactggggcgatagcaggggacaacgaggcaaagatgtgtggcagtcgggtaatatctacaggtctgcgggtgaaacggctttgtcccgggtgttgataccattcccataaacaccagagtgtcacaggtaaaagatacatccacagaatacctatggtctgctccatgacgttaatccactggctatagcttatgttggcggcgttgttaccggtcatggcaagcaggttgtatcgtggtgctgcatagttatgaaatggtccccagtcgaccagtccccataaggtatgaagaatcaggcagctggcgtaaaccacttccggcaagaataaccatatgacgaatagcagcaggataagaaggacaccaacagcgccccatatctgcataggatcttctgcgacaggctgtcgattgtaagacatgacaaagtctccatttctggaatttaaatcaaacggaaaggttaaaaatttatttgcaggcgataagagctaaccagaggaattagccgtgcgataaaaggattgttgcagatacgaaagtcgttagaatagccgcggacgcttgaggctgtatgccgaaagcgttttgtggatggtatacagcagaaagccccctggagattttttatcaatcaaccaggggttctactgtaatgcctagaaaacattatagtagcctgataatttagatatgtgtacatcctaccggaaaagatacttttcaggtcatttatcaatgggtgttattaccaccggtagtttgtttacgtcttctaaattaactggtaccggaggtaaccatattaatctaggtttacgctcatgggctagttctggtttcttacttcctgtccagtatgtatgccagtgtccccggcgtatatgaggacgtttgctacctattgttgtccgctctttccctgtgggttctgcttggcgatattgccgtatggcttgccccattcgaataccaacgtcccactcccgaatgttttgtgctggtagttcatggtgagtgtgaacatgctttttgtgcttttctgaccgtttaaattgatttttttcttt

SEQ ID NO: 237 - DNA, 6733 bp, Escherichia coli
ggattataagaggttttaaatacttgagtagacttggggagacattagaatggtgccgataataggagtaaaacactcgattaatctcgtgttaatgccatcacctacgaccattactaattgattgaatcttatagaaaaatcatcattttctatgcgtcacaatcaattttcacattacaaacgctccgacactttagccggagattttatgagatacaagcctaaccaatacttaatctgtgattcttacggtaactactatttaaggatcacgctgcctgtgtatatgcagcccttttttgaaggaaaaaggacgtttgtcagaagtctacacacaagtaatcttcgtgttgcacgtagaaagcgtgatcagattgcagatgaataccattgcttacgggagagtgttgcccctgtaaacagcacaatagaaaacacgctggaactgttacgcagtaaggctaaatacgccaaaacagctaccagagtgcaagatacagcgtcttcgtgtccgtcattgcttaaaattcttgaaatctacctgacaattaacagcacgaagaagaagccagccactttagctaaggcaagaaaagcggtagagatgtttctctcctaccgtaaaaagcctgatattgcattgcaagatgtaagccgcaccactgttacaggctggattgaacacatgcaaaaaactctttcacaacaatcaattgcaaattatatcagtccaatggcccagctatgggaattagcttcatcacgttaccacgatgcgccagaaagggcgctctccccctggcgagggcataggcttgatgtggcacaaagtagagagagctacgaggcattttctaacaaagagctattgcaggtgttgcaagtattttccggtaattcagcagaaaacaaagaaatgacggctttgtgtcttatcggtttatatacaggtatgcggatcaatgagatagcaagtctcacaatagacgatgtgaaagagatcgaaggtgtgctgtgttttgaaatcacacagggaaagacgaaagctgcggcacgtgttgtgcctgtgcataaccttatcactccgttggtgttgtcgctgcgtgaaaagcctcacaatggctttttgttctatcacgccagcattacagaacgtgctgacggtaaacgctctacgtggcatacacaacgatttacaagagctaaacgaaaggctttaggggaaaagggaacagaaaggaaagtgtttcattctctgagacacggagtagcacagcttcttgatcgaaatcaaattccagaagacaggatcgcccttctcctgggccatacacgcggcaatacagaaacattccgcacatatagcaaaaatgcagcttctccaatagagcttaaaaaatatattgagcttttacgctaccctgaaatagagaaaggcttatcaatcaataaaaaatcaaatttaaggcgtaaaacaacgctatagacgtaataaagaggcttcaatatagactgatgcctcttttatgattatctcgttacagagcgtttcataggcgtttaaggctattgtttaaatactggcgttacaacgtcttgccctgggcttttttgatttttctgttctgttgtatttacctgcattttaacctggcctcctacagatttatttggtgctgtttttaccgcaattgcgcttgtagttgctttagagacaagacggatttgctcaaaatcaagagtaaacaataggctttcgcttgcttcttcttcgtaagacatgccaactaacacaacgttgtcataatttttaactcagtgacaagtaggaaaggttggcgactgtccatcaactgatttaggtattcaagcataagcatacgtcgattgccgttaattccagcattcttaatcatatcaggattgagcttcaatacggtttcagagatacgcccttgtaatgtgaacttgttattccgtatttgaacatgatcactaacttctgatcctgattcgacggcatagcttgtaacgtccgcatttctgctaactttcgtcgattccacgctatcaaatgataatgcctggtagtcattgtaagcagcatttgcaccactgccgagattagaggtaatgatcgcaaagccgttaccccctttggttgttctaccgttgctatcgttgcttgtgctgttgattttcgcctcagtcgggcgaccaatggttaacggacccattgccataatttgtaatccttatttaagggggctaaacagccccacagtgatgattaataggttgacccgcctgacataacacccagcgttaatagcttgctaaactcagcggaggatgcctttgatttgaagtcgataaattcgctcaatcgtccggtgtctgattcgatagttagcggcacttctgcatttacttgtaattctggattgaagttaataacaggtgcaaaggtgtaagaaggagccttgaaagcttgttgtgctgcactctgtttcagatttgcaatgttttgtccttcgagactgtattgatttacagcctgcgccccacctaccgtttcttctggcataaaccagcttttaatagtgttaaccagggaattgctgttatctggcttagttgttccggtgccagcgcctttatattgatcaggagtgagattagaaagattctgcttcattccttcgttagatagtggcggtgcatcccctaaattcttctgaatagcttccgtcttctcgtcgtttttcatcagccagttgattgttttcattacggcgttaaccaatccgccgatagcctcgcctaatttggtaaacattggcagcattgcaaccatgctctttttaaactcttcaatcactttcggatcaagagatttcataaagccatcaacaaaggcgatcccttgtgagtcagaaagcccactaagtgcattattcagttcacggaatttaataacgctttcctgttgtgcctgtgttacccagcgccctgattctcgttgttctcgtgctgattgttccacttctttagcggagcgtgtccagtatttagaggtgagcatcaaatcatcagccagatcttccagacgactaccgatttgtgcatctgaatagcctttcttcaccattccctgaactgctttactaaccagaccagccggattatcagcaaagtcttttagatcctttttagttaagaatccttcattcattaaagtattgatgccgctatcgccgcccttccattcacctttgcctgtttttttatcgactacatattcagcctcatcatagcttttggttgcacgctcacgcacatctttcatctgatcgagatacttacgtttaccttgatcccccatcattgaatcaacgccgtttttgtaggcccattgctcaatattgttcatctggttaacgtctacaccgcccagcttcgcacggctatacaattcacccagcgtttcagcattcgcaaagctgttagtaacaaattcagaggctttgctcatagccatatacgtagcgccagcgcctaagccacccagcataacagccgcagcaccgccgccaatactcccgctacccttaacaggtgcataggctttagcgtgagcgttacgattgccattaatcttacgttgttgctgttgtaggcgtttcatttggctattcatacgtgccagactaatagctcctctttcatattggagggcaatttctctagcctgtgcaatagctttatattgttccgctacagaaaggcggtgcaatgcactaatgcttgatccaacgtctaacagttttaagtctgccttctctttgcgtgctgccagggctttttgttctcttgcaactacacgttgagcggctaattgtgctttagcattggctttatctgcctgtgcttgctttttagcaatatcgtctacgtctttttttgctttagaagttgattgtttatgtgtcttaacacgcaattctatatctttcaccgccgccatttgtttacgaagtttttctacttctgcttttgctttctctaatgatggtcgatcaacctggaaggtgacaacgtttgataagcggctgacgttaagttctaacatgctaattgtttccctgtattatgattgttgtttattattgttttttagagcaatagtattgaattgcttcgaaagtgctgcacccagtctgaaagacacgctggcgcacattatttgcatcaatttctaaaaggcggcaaagcgccgatgtgtttataactgattcctcgctaatagctgccagttcttttacagccttaagaataaaggattgtgggttttctgtattcattggttttctctcacatatatatttttatttgggtttgtagacagtagaaaaacaaaaagggcaaagagattcgttactgtatttgcgcctacaggttagttaatccctttacccttattgccccgatggggaatcgtctattaacgctttattacgcagcagatccgaagatgatagcttgcggaatgttgtttactggcagataagatgtctcagtaaccacagatgggaattggaattcatccttgattagatattggtgatgcaacacggcatcttgacctaactcagcatgacgcacaccaacgccgctatgaagctggtaacactgtgccgctttatccattaccggaacaattgcgaaaccgttctctccgatgtgagcaacaatctcaggaaacattgacacatcaataacagtgatcccaccaatctggaaagagtcataggctgggttagaatcaaccatacgggtaaacagggccgtagcactcgcatcgcctgcatatttcaccatgtcactgatcagcgggttagatgacaaaccatcagcagcagtgccagcagcaaagataattacaccagttcgctttgcagcaagaccagaccccagcttttcactctgtaagcgcaccgctttacgaatagcaaggaacgggttaacagtagtcgatgcaaagtcgatagcgggtaccgtggttttagcctgaccgtcgaggaagtcgagatcaccttgtccggcatattcagattcaactttcaggcccagcagcgcggtaatcagatccacttcaacacggtttgcgtgtgaacggtaatgagcctcagagaaatcattaaccgctatcagcatagcatcagaacggtttggatattggcggctgtattgttccaggtcacgagaagtaacagcgttaatactgccgacgtgtttcatctggaaaagtttgtttgaccattcctgacgtttagaggcgttccagtcgctttgagcgtaaggcgaggtttccccagctacctgcacaaactgatcaatcaggtcggtaagaagaatgctgttttctgtatgatattgcacatcgaacagatcgagattagtaatcagggtattaagtgcattctcataagcaaatggagttactaccgcagtattaacgccaaaatatgttgataaatcattcattattattttccttgttaagtcgtagggatcgcaagttcttcataaccagcaattacaaagccgagagattgcagttttgcaataacacttgccttttccatgctgttaaattcaatcccatcttcagccagaataacgaaagtaggatgtgcaaccactacgctttcctgtccttcataagccggttcaactactacgtgagcaatatcagatgcggttgttgctttggtgccatcggctttcagcaaagccccgacaataagatcgtcagtgagaggtgaagccagtttgacgaggcgatcttgcagcactggatcagcagcgtaagctactaccttacagcgtgaacgggagttatccgcattcactgcttttaattttccatatgggttagccataagattattttcctttcagttgtttaattttagatttaagggcatcagcaagactaaccgcatcagccgatttaaataattgagcagtggtagaacgaagactttcgggagtaactcccaacagtgcggcaaccttaatgaggttttcatcactaacaatcatcgtttccccgtctttgctgataatcatttcttgtttcataaataatgttcctgttagtgccagacaaataaaaagccccaatgccgtaagaggttaattctgaccagcaaaggggctttaacgtgcgggcaattacataattgataagttaaactataagaggattaaacatatcagcaaatacactttttaaatatacttgatgatatgcttaaagggtgaatagatactcctgaaaacatgctcttaggaaaacatgcggaatcaatcaggaatatctattcggggcgcggtggccaaccgctatctttcatggtgtggatgcaccagtcagattttaaggaatcactattccaatctactcacggattaaatttttaataatgattaactacaccaacagtaatctaccgtttcagaaaatcgtttttacaaccaaagcttatagatccgcattctataaaacccgttttgctatcaatatttccaaagtttattgcaccattcttagctaaactctctctgcttgcggctaacgctatgcagatgattgtttttgacaacaacttaatagattattctgttactaacttctgtcattaaataatagtttaatgatgtt

SEQ ID NO: 238 - DNA, 1455 bp, Escherichia coli
gagcacctcaaaacaccatcatacactaaatcagtaagttggcagcatcacccagagtgagttacgtcagcgcgttgaggcgctgggttatgaaaccgaagtggtgggtaagcacggtatgtgggagataccgggcgtaccggtggaggccttttccggacgctcacagactatccgggaggccgtcggggaagatgcctcgctgaaatcccgggatgtggcggcactggatacgcgaaaatccaaacagcacgtcgatccggaagtcagaatggctgaatggatgcagatgctgaaggaaaccgggttcgacatccgggcatatcgtgacgcggtggatcagcgtgttgagacccgcacgcaggcgcccgggcctgcttcacaggacgggccggatgtgcagcaggcggtgacacaggccattgccggattaagtgaacgaaaagtgcagttcacgtacacggacgtgctggccaggacggtcggcatactgccgccggaaaatggtgtgattgaacgggcacgcgccggtatcgatgaggccatcagccgtgagcagcttatccccctcgatcgtgagaaggggctgttcacgtccgggattcatgtgctcgatgagctgtcagtccgggcactcagtcgtgacatcatgaaacagaaccgggtgaccgtacatccggagaaaagtgtcccccggacggccggttacagcgatgccgtcagtgttctggcacaggatcgcccgtcgctggccattgtgtccgggcaggggggagccgccgggcagcgtgagcgggtggctgaactggtcatgatggcccgggagcaggggcgggaggtgcagattatcgctgctgaccgtcgctcgcagatgaacctgaagcaggatgaacggctgtccggtgaactgataaccggacgtcgtcagctgcaggatggcatgaccttcacaccgggcagtaccgttatcgttgaccagggcgaaaaactctccctgaaagagacgttaaccctgctggatggtgccgcacgtcataacgtacaggtcctgataaccgacagcgggcagcgaaccggtacaggcagtgcgctgatggccatgaaggatgccggggtgaacacatatcgctggcaggggggagaacagcgaccggccaccatcatcagtgaaccggaccgtaatgtccgctatgcccggctggccggagattttgcggccagcgtgaaagccggagaagagagcgtggcacaggtcagcggggtacgggaacaggccatactgacacaggccattcgcagtgagctgaaaacgcagggcgtgctcggacaccctgaggtgaccatgactgcactgtcaccggtctggctggacagccggagccgttatctgcgggatatgtaccgtccggggatggtgatggagcagtggaaccccggagacacgcagtcatgacc

SEQ ID NO: 239 - DNA, 3671 bp, Escherichia coli
tgatacgtcagtgggagagatctcactaaaaactggggataacgccttaaatggcgaagaaacggtctaaataggctgattcaaggcatttacgggagaaaaaatcggctcaaacatgaagaaatgaaatgactgagtcagccgagaagaatttccccgcttattcgcaccttccctagtagagtgtttttctttcatggagaagaccatcatgcaaaacattacgcttattggtatagatcttggcaagcattcctttcacattcactgccaagataagtcaggcaaggtattgctgcgtaaaagtttacccgtaccaaacttattgagtttctggcaggctgtgcctcgtctaccgttgtgatggaagcctgcgccggagctcattttatggctcgccggattgctgatttaggtcatgaagcaaaattgatttctccgcagttcgttcgcccttttgttaagagcaacaagaacgattttgtcgatgcagaagccatatgcgaagcggcatctcgtccctcaatgcgatttgtgcaaccacgaacagaagctcagcaggccatgcgggcgcttcaccgggtcagggaatcattggtcagtgataaagtcaaaacgaccaatcagatgcatgcttttttgctggaatttggcatcagtatgccgacaggagtcgcagtggtaaaacgactttcaacagtacttgcagagaacgaacttcctccctatctggcgcagttactgatgcgcttacatgcccattatatttaccttgtcggacagatcaccgagcttgaaatcgcactggagcaggaactgagtcgtgatgaggtaggacaacgtcttcagacaatacccggtattggtccgataaccgccagcgtactgtcatcgcagctgggaggcggtaaacaatatagctgcagtcgggactttgctgcttcaaccggtctggtaccccggcagtacagcacaggtggtaaaaatacacttttagggataagtaaacgtggagataaaaatctgcgacggttactcgttcagtgcgcaagatcctttattcagagaatcgagaatcagtcaggaaggttggcggattgggtcagggcgttgttggcaagaaaacactccagcgtagtatgttgcgcactggccaacaaattagcccggatagcgtgggcaatcacaacacagcagactgtgttcgaaaggtaacgatggcgccagtctggctggcaggttaatcatgaattaaagtagttcccaatctggttttgcgaagactgattattgatgacatgaacggcatatcggcctgatgaaaagcctcagcaagaaaatggctcactgaagccggatggttttttgggctcatcaggtgtggaactcatcgaggcgcgggcatccatgcccataatgacgccggatagatttaggcaagccaacatcaatcaaaatcagtgttgcaaaaatggtggggaccatagattcttgcccagtaaacgctgaacctgattaatttgctttatcgcagcggccagttcagaagcaggaacaacgtcttcaccagcagcaacagcattgagagttccttccaggtattgtttcttccacttaaacaactggcagggctgaattccatgtaaacgagccatccgggccagcatcattcttggctcattaaaggccatttcagttatcagctctttcatacccggcttacgtgcttgataagtataagtgagctgaaacacacggtggcagtcacggtagcgaaatctgtcacggcctttagggttctgaccatggcggtaaacctgagctgactgacaacggggacaatgaatattaacgctggacatgagataacctcaaaagcccgtattatacatcagattcaactaattagaggcatcaccaatatgtttatagcaatctcaaataatgatatgaagcatattttcattggcttttaaaataagtcaagaattgttttggtgttatgccaaaatgttttacaaaaagcctaatgaaatatgatgtactggaaaatcctatcatattagatatctgtgatatctgatatgagttatcaagcaacagcaatgctgctttgctcattcttgattgcataaggatctggttaaaagtaatatactctgactcaagccttttccttattgttatctctgatacattaaattcatctgcaataatagctagagtccatctctttgataagtccttctcgattgtgtttctgaccttatcggaaaagaagcttacagccgatatataaattgactctataattttcctgttgttttcgatctttgatataagatatatcaaatctgaagtaattcttgaatcatcattatgatcgatactcttgaatgtatctaatacagaatcgtcagcatcagctacaattattccttttgaccaattcggacaactgcaagcatctacttttgatattccgtatattatcatcagggcatcctttaggcgtcttaatgtatcgctgcttaatctgattgcgataaatggatttactgttgatttcttcttttgcaatcttactgatatatttattcctctctcaagaaatatgagttcatttctaagatatgtattgcttccttcttttgtgtatacatcgattgtacaattagatgtatatagtacagtgtactgatgtattctgatattgttaatttttataatctctttttcgatgttttgttttaatttcatatcattctcacatgaaaaaatgtctttatcaggcaactctgcgttagagtgacctaactcttatcaataaaaagataaatttttaactcatatgaaatacgtttattaatttccacatcgtcatgtaggatatgatttttacgcttataattacaataagcaattatttatcgtgttcttgcccccttatttccagacaggggttgtatcttaattgcagcccagtctatagcttcacgatcgcaacagtccagggagaacgtaactcgcagtttttcgctatcatcgcaaccaaactcaaagccatcggaacaccaacgctggttgctttccttcaccgatatcggcctttatgttcccgctgctgtcgtgatggtttgtcatgtaacaacaacagactattttcgctcattatccggtaaacacgctttgcattcacgaacggtagtccttcatttcgggactgccgcctgagtatcgcccagacacggtgatactcaggcggcatatcgccaataatatacaggatgcgcgccaagggatactgctacgataatgcctgcgtggaaaggttctttcattcgctgaaagtggaatgtctccacgaagaacattttatcagccgggaaataatgcgggcaacagtgtttaattatatcgaatgtgattacaatcgctgtgaaccgccccgggaatcctggagactaaacttcctgagaaagaggtaaacaggatgactaaaaatactcgtttttcccccgaagttcgtcatagggtgattcgtatagttctggaaagtcaggcgaatatgactcataatgggcggtaatttgttccattgccccaaagattggctgtacaccggagactctgcgtgtctggggtcgccagcatgagcgggataccggggg

SEQ ID NO: 240 - DNA, 11557 bp, Escherichia coli
cccacgctgacgcgcgggccccggaacctcaccgttctgagaccacagcaaaaaaacatcaggaataaaaacaccacataaatgcagcaccgtgcccacccctcataactgaaaagcgaggccgcccccgcccaaagggcgggaacaacatcgcttttaattatgaatgttgtaactacattatcatcgctgccagtcttctggctggaagtcctccatacacgctcgtaagcggccctcacggcccgctaacgcggagatacgccccgactgcgggtaaacccttgtcgggaccactccgaccgcgcacagaagctctgtcatgactgaaaacgggtatggtctagcagggctggggatgggtaaggtgaaatctatcaatccgtaccggcttacgccgggcttcggcggttttactccggtatcacatgtaaccacagcgtgccgccttccatgccgctgacgcggcatatcctggtgacgatatctgaatcgttatatactgtgtataatatatggtgcgttaatttttaaacccttatttaatttcctcgtcagttagatattgtccgtttcccaaacgaagcccttcagagacgtcgtgtaaacacggtccttttatcttacaggttaacccctatcaatcttaggatgaaaccacgccatcctctgcttgcctggttattaatttcatatcatcttatgccttttttatcttcatttgagaccgtacttttcttcggaatatcactattcgttaactgctgttcatcaataaaattcctgatgatattcagttcactctgacggattttttcttcttcattttttctcagaagacggcagatatccatttcatcccgaccggtcattctttttccggaaaaaggcggttaagcagctcctgctttacatctggtgagtctttggtggcctccatgaggttgagcagactctgacgatcgagaataaagaaaacttttgggaaataatgtaaaaggaaaagaacccagaatgctgtccatgcaaagcagagaaaagctgctgtaagcacgtgattcttgcctgataggtatataatcagcagaacaaccgaaatccaagatgccagttctaaaaaagtatatacaggcttcaggcgtctgtatgcctgttcatgattattcaggatgaattgaattttttctgcacctgatttactcataataattctcttcccatttttctgatacgtaatgtccagctgttatcaggagtgtttattgcccagaaatattctcctgctgtgcctgcatcctgagcaacttttgttctaatgtcgccagtctgcgaccggcactctgtgcttcagagtctgagacctgccctttggggtgaccatccaggccataacgtgggacgccggcgacagctgtccgctgcagatatacgcggcgggatgtgatgcaggacactgcacagagccattcgtccatggtcagttctgtctccgggtgttctgccagaaatgccgaaatatcattgtttatgccaattttcaggggaataaatccaccaccttcagcacgaagatgaggaaacagggcctttattttttccacgcactcgtgagtatactcacgggtccagtgggagggacgtggaaaacggtgtcttttctttttcttcttcctggctggcgcttcggggatatgtgtttcgacggcagatgaatttattccggcgggggctgattctgccgtctgttcagtaaatacaggtgcgataatatctgttttttcggataaggacggtggcgaaaaagtacgacgttttttcaccacaatgatgggagttttcctttcttcctgattttttcccataaatacctcggctggctggttttactctttaataatatcacaattcataaattagtaaatttcccatcaggtgatttttcatggctaataagtccgttctctgagtatttatactcgaggtagtaacagttatggcgtgacagtcgaattgatattctactgaaccctgacagaaacatggttgatatattctctcactttaatgttgtcatgatataaataaaaacaattcatttgaaaggatatcagaagaagatatcggggcgcacagttcatctctgcctttgtttcatggggtgttctttgtatatttacttactgtttaagcatgtacataaggagtgctttcattatgccaatgatacttgtaaagaagaatccccggggcaaagtgattcgggagcttagcagtgaggaagagactgcagtaaagacggtctgtggactgaaaaagccagcaaccatggcactacataacctggccaatgatattctccgggaaatgcgtgagtatgatgcatggttacagtgtgactgtattccgggagattcgccggccatgaattttgctgctcttaaaaacaatacgggtactctttatctgtccagttttaatcatgagcatgcacctgaatgccccatgtatcgtcagttatccggaaatgaagaggaaacatcttccggagcaagccggcatcccgttagcacccgtataaattacagaaactttttaccacctgatgacagtaattctgttatcagactgcaggcccgctctgcttaccataatggtgagagctcctccgttcgcaagaaacgtccgcgccttgcccgtttactcctgtctcttattgacgatgctgggctgaataaactggattccctggctaatccccgtatccggactaattatcgtgagtgtcttgatgccatacggcaggttacactgcagcaggagtatattcggggaagatccttatctgaaattatccatttccggcctggaatgtctgaaaggtctcaggagcggttaatggaaacgctggagaattcagaacgacactggcctgccagaagaaaacatatgttctttcagatttttatggcgcagcacatctgtcgtgatgctgtggaaattcactgggcgaacggtaatattcaggtcatcagacctgtgcgggggatcagtattaatggtgaagcgcagggcggaatacgtcccccttactgggttattcttgctttttgccggagtgccgatggcagaatcatctgcagtgaagggtatgctcatgctctttatcaactgacatgtccggtgcctgtggacagcaaactggaacgaaacacgctcactgctcttctgaatgtggccagctggcttaaaagaaagccaggtacgccggaattaagtctggaaaggcccctgtttgatacagaagtttatgttaatggtgaaaagaaatatgtcctgccggatttcattgtcacagcaagggctcctgacggaaagacggccagagtggtcatcgaaacgatgggatatgaagacagtgattactgcgcgagaaaatccaggcagcataccggcatgaagcagattggtgttctgcataccgatccaccgaaatggctggataacgatcatcccccttttgagaaacatatgtacggtgtttttatgcatctcaggtactgagatattttgtggctcagttctgtaacttttcccgtaacattgtctgttgttacgggaaagtccggtttttgtattgcaccagagaatactcagactgtgatgctgccacagcgtcagcaggctttctgaacggtgtaacattacttcatgttaatgataatcactatcattaaatcttgacatgccattttctccttaataaattaatactgtatatgtatccatatgcgtaagcagttaattcatttgttttcctcagaggatgaaggagataccgaatgtctgaccctgtacggggttcagtgagttagctggcctggatgtaaccactcgttcaactcaattctcttagcgtgggaaaatttcccttttccaagcggacccctattaatatttgttttgttttaggttctattcaacataggtctaaaatacattgaagataacaagataaggggtctgacgctcagtggaacgaaaactcacgttaagcaacgttttctgcctctgacgcctcttttaatggtctcagatgtcctttggtcaccagttctgccagcgtgaaggaataatggccgagcatattgatatgtccgtggcaaagcggggagaggcgtgcgatatcttcatcattcagtgtttcaccctgcgcccggagatgatccagggctgcctgcatataaatagtgttccataacacgacggcgttagtgaccagccccagtgtgcccagttgatcttcctgaccgtcggtatatcgttttcttatctcacctttttgaccgtgacagatggctctggcaacggcatggcgactttctccccgattaagctgggtcagaatgcgccggcggtaatcttcatcatcaatataattaagcagatacagcgttttgttgatgcgccccacttcaatgattgcctgagtcagtccggaaggacgttcacttttcagcaatgaacggaccagcactgaaacctgtactttgcccagcttcagggagccagcggtccggatcatttcgtcccactgaaggactatttttcggggatctgattgccctctggcaatatcattcagcacgccatagtcgcatcatggtccattcgccagaaaccgaagcaccggcatcagccaggcgtggagaaaactggtatcccagcagccagaaaaggccaaagacaagttcgctggcacctgctgtatcggtcataatttcggttggattcagcccggtctcctgttccagaagaccttccagcacaaagatagagtccctcagcgtccccggtataacgatgccatgaaagccggaatactgatcggacacaaagttgtaccaggtgatccctctgttattaccaaagtatttgcggttcggtccggcattgattgttctgactggcgtaacaaagcgcattccatctgcagatgccacttctcctccaccccatatctgtgccagtggcagcgttgcctgaaaatcaaccagtctggcattagcgctggtgatagtttcagcccgcagatagttcgcttttgtccagttcagccggtgtcgggtcagtgcaggaacatttgatctgatcagtggttccagaccgatattgcaggcttcagccatcagcacggcgctgatgctgacgggcagatcatcaactctggcactggcttcactagcatggaaaaactcatcagcaaatccggtatgggcgttaatttcgagcagcaactccgttaaatccaccggagggagtagatcactgatcattttgctcagtcgtttcagactgtccggctcatcaagactggcgaggggagaaattgtcaaccggggcttcgggccagaaacatcgagttcgacagcctcattttcgcaaagacgtgcagcaacctgtctgtaacgactatcaagctgatgacccagagattttattgcttcctgcgggtctgtcgggtgccccaaagaacgataaaccttaatccggtttgcctgccagtcagcaccctgtagtaatcttgcacgaggatctccccaccggttactgccggtaacgtagacatccctccgcctcagactatcctgcagtttactgagaaagcagagcgtgtatcccctgcgggtgatatgtttttccttgttaatcaccagccgtttccatgaccgactgataatttccgttggtgcgtcgtcaaaaaactgccgccgtgagctgaactcccggctgaggtagtcacaggcattcagagtggtaaccccggcaggtgcggatgaaaatttaacggtattcagcagatggggcaggaaacgacgaacgcgcccgtactgctccaccatttcttcatgaaaattatcgtctgagggccgggcaatttcacggacaagcgtgatgatttcagccagcttttgccttgggatgtagctgaacacctcagcacgaatcgattcgtccggtgtttcttctttcagcaggtacgaacatgcgctggcgagcgccaatgcagatttatccagatccttcagcgagcggagccgttttttctgcccaatctttctggcgtcacggatgataacggccagcatggcgtccagaacgtccaatgcatcatccagcgccagcgtttcccatgcaaggacaaaggcaaccagaaccgccatccttttctgcggtgacatcctggcaatattgaacaccgaagtcataccagcataacgtgcgagatttttcaggcgcacagccgggagtgtactcaggttttcagcatgcaggccaaaatcgttcagagttttccagcgttcaattgcttcattaaacgccggaccactgatggtcacagggccctttttcagtgattccagtaaagacaggcggctgcaatcagttggccccagcagcatctccagctgtgaacgctgttcggctgacggtatcagtgccagtttgttccacaggcgcaacgtcgccttttcccttacctctgaaatcaaccgggtcagcgtagtggctccggggagaataatacgatgttgcataagccaccctgtcgccagatcgaaaagcaggccaggacgttcgttgcttatccagctccgggtatataaaagacgggtaaggcgaaatgtccagggccaggcaaattcacgatactgatagtgctgacgtatcagcgctgcatgctcacggcgggtattttccctctgaccgtattctgcaagaacggtgatatcacgaatcccgagctgtctggcggtaaaatgccggacgccggaaggaatatgacctgggacctacgtgcgcccgcaccgacaccctcacaccttcgagctactgttgccattaaggggtcgtttcgtggtgctgaattttgacgatcggggtaccgtcacccatcgggcgatattgggggaaacctgtacggtgctggagatggccgcaggaacctggcatgccgtgctgtcgctggataccggtggcataatttttgaagtaaaacacggtggctatcaacccgtggctgccgatgactatgcgcactgggctccagcggaaggagaaccaggaaccacggagcttatggcctggtatgcgcaagcgcaggtgggcgacagcacttttgccgtctaaggcgataaacaaaaacggaatgagtttccccattccgtttccgctattacaaaccgtcggtgacgattttagccgccgacgctaatacatcgcgacggctttctgccttaggttgaggctgggtgaagtaagtgaccagaatcagcggcgcacgatcttttggccagatcaccgcgatatcgttggtggtgccatagccaccgctgccggttttatcccccacaacccaggaagcaggcagtccagcctgaatgctcgctgcaccggtggtattgcctttcatccatgtcaccagctgcgcccgttggctgtcgcccaatgctttacccagcgtcagattccgcagagtttgcgccattgcccgaggtgaagtggtatcacgcggatcgcccggaatggcggtgtttaacgtcggctcggtacggtcgagacggaacgtttcgtctcccagctgtcgggcgaacgcggtgacgctagccgggccgccaacgtgagcaatcagcttattcatcgccacgttatcgctgtactgtagcgcggccgcgctaagctcagccagtgacatcgtcccattgacgtgcttttccgcaatcggattatagttaacaaggtcagattttttgatctcaactcgctgatttaacagattcggttcgctttcacttttcttcagcaccgcggccgcggccatcactttactggtgctgcacatcgcaaagcgctcatcagcacgataaagtatttgcgaattatctgctgtgttaatcaatgccacacccagtctgcctcccgactgccgctctaattcggcaagtttttgctgtacgtccgccgtttgcgcatacagcggcacacttcctaacaacagcgtgacggttgccgtcgccatcagcgtgaactggcgcagtgattttttaaccatgggattccttattctggaagatacgaaataacaacaacatgaatagtccctaaattccacgtgtgttttttattagcttcaaaaatcactatttcacgaagaatttagactgcttctcacacattgtaacattatttacaaccacctttcaatcatttttgataaatcattgatttcatctttgctgcaatgatacttaataaactctgcaagttatccacagagcaacactcaattttattgatgatattcttattataccagacatttttcatacactcccttgtacggatagttttccgacaacttcatgattacatatcttgcggttttgattatttttgctgcaagaaatacatacttcaaacgaaaggtctttatttgctgtctgtattctgaagagtccaaggaatcaaacttgaacaacaaaaataggttatatgaaagcatcatcatttgaaacacggcttcattcgcccaaaatgactttagcaagagatgacccaccgccatgtcgtatttggcttctttgatatagttttcagcattaccacgcttttcatagtatataactactttttcagaaagcaaggtagtatttgttacaaagaaaaagtagtcgtattcggaaccttctaaaagtgataattgtgctctttctttttctggtttcagtacgcgagatacgacaaatcttctgtctttttcccatttaactaattttgtatacagttctgtagtttctctaccttcttctcctttaacgaatacaattgatgaattcgttgcttgtgaggtgagtgtagaataacttttggctttaattaaatatttgcatccaagagattctatcgtttcgataattttttcatcaaagtagccactatccattcgaaataaaatttctaaatcgtctgatttgatgttagcaacaatttctttgatcatttccgcagcaccgtttgcagtgtaagtattgccacttcttacaaatccggtaacatatgcttttaattcgtcgcaaaatgcaaattggatattgtagcatcggtttcccagtttcttaggattatatccttttgacgcaccttcttgatgaccttctacgttaattacactactatcaatatcaatcgtaatggatgtcaatttacttttagtgagcagttttttaaagactttaaaattaatgtctctaaacatttgggttgtcttgaagttgaagtttcctagaaaccgtgacactgtttcaggttcttttacggaaatatcaaactcgttgacgaggggatcattttgaagtagctttagacgttctaacttatcaatgccaatgaagtgaccgcagagcatggtctttatatgattcatcttgattttatttgttgagtcattatcaaatacgaggtcattttcaataaaatcaaaaatcccattgctttttgcattctcaaggagcagaaaaagacctgcatttgatgttagattcttagctttgaaatcaattttattaatcataattagaacccctttttactacttttcttactattattttaccatatatcgagtcataaaagctgataatttaacatatttttgagcacttttctttcacccaatgggtgaaagctgaatttcgaaggaatgcatatttatcaaggctttgattatgcttttgaagtactgacgtagaatctaggtatgattcatatcggtgaggaaggtgcccagaaaacggacacatccaatttgcagggcaatgcccagacggttgtgatcacctctgctttttccgataaattccttgtctgcttcatcaaggtgaaaatatcgtgccagctgaagctcatccggttcaccggtgaatctgccatagctttcagtctgctcagtggtcagaaagtcaacgggcatatcggcctccctgcctgacgggcatttagtaacatttttccaaccgtacgaaatgttataaattatcggacatcgtaaaactgttacattaatatgtctattaaatcgtaaatttgtaataatagacatgagttgtccgatattcgatttaaggtacatttttatgcgactttttggttacgctcgggtctcaaccagtcagcagtctcttgatcttcaggtcagagcactcaaagacgcaggtgtgaaagcaaaccgtatatttaccgataaggcatccggcagttcaacagaccgggaagggctggatttgctgaggatgaaggtggaggaaggtgatgtcattctggttaagaagctcgaccgtcttggccgcgacactgccgatatgatccaactgataaaggaatttgacgctcagggcgtggcagtccggttcattgatgacgggatcagtaccgacggtgatatggggcaaatggtggtcaccatcctgtcggctgtggcacaggctgaacgccggaggatcctagaacgcacgaatgagggccgacaggaagcaaagctgaaaggaatcaaatttggccgcaggcgtaccgtggacaggaacgtcgtgctgacgcttcatcagaagggcactggtgcaacggaaattgctcatcagctcagtattgcccgctccacggtttataaaattcttgaagacgaaagggcctcgtgatacgcctatttttataggttaatgtcatgataataatggtttcttagacgtcaggtggcacttttcggggaaatgtgcgcggaacccctatttgtttatttttctaaatacattcaaatatgtatccgctcatgagacaataaccctggtaaatgcttcaataatattgaaaaaggaagagtatgagtattcaacattttcgtgtcgcccttattcccttttttgcggcattttgccttcctgtttttgctcacccagaaacgctggtgaaagtaaaagatgctgaagatcagttgggtgcacgagtgggttacatcgaactggatctcaacagcggtaagatccttgagagttttcgccccgaagaacgttttccaatgatgagcacttttaaagttctgctatgtggtgcggtattatcccgtgttgacgccgggcaagagcaactcggtcgccgcatacactattctcagaatgacttggttgagtactcaccagtcacagaaaagcatcttacggatggcatgacagtaagagaattatgcagtgctgccataaccatgagtgataacactgctgccaacttacttctgacaacgatcggaggaccgaaggagctaaccgcttttttgcacaacatgggggatcatgtaactcgccttgatcgttgggaaccggagctgaatgaagccataccaaacgacgagcgtgataccacgatgcctgcagcaatggcaacaacgttgcgcaaactattaactggcgaactacttactctagcttcccggcaacaattaatagactggatg

SEQ ID NO: 241 - DNA, 4986 bp, Escherichia coli
catctggataggtaccggcgtcaggtttgtgacagtgctttcttgtgaagttacaacgctgacatcgccttgttcactcagtgctttaatcagaaggctggaaccgctgaatttggcggcattccctgttgccgtatccagaattgatacgcctgcagatgtagcgcctgtaaaatctccgcttgcattgttcaacgttgctccggcggaatgtagcgatttataaacaaggttccagtccagaccgaactgttcgtttctggtattgctgacgctcagaacctgtacgttcagggctacctggcggttcataatactgttttgttcgtctacatatcgtgtgacggcttcctggacagctggagtatcagtgactgtcagcgttgagctcgatgcagataaccagtaacggcctttttctggtgtcagcattgcttcaatagttttccggatatcttcatacagatcgtattcctgaccaacggttgtgctctgagaggacgttgcatcaccggatgctgagttatcctggcctcctgttgccccattgtgcttgttgagccagagctgacactggaactgctgctggttttggtgttcagcatatgaagtggatacgttctggtttcagtcagatagaatacaatccgaccattatccatgcgccagtacagaccactccggctggccatcagatccagaagaccattgatatctccctgccacatgaggttattcagcgttaatggctgagtggaggtagtcattgttgtgctgcccaggctgcttaacggtagacgtccattttcatctggtgctggtagtgttcctgtcatctggcgggtagcgcctccttcaagagttgaattggctgcgtcaggcgtgatgatcacagggatgccgcatacggcagtaatacgttgccccagttcctgcagagtgatctctccttttcttgcctgcgtgatgtagcaggctggagctgtttgttttttctctcttgatacctgagcgaccggaacagggtttatccattgattatcgagccaggtaagagcctgcgatttacgggccgaaagggctgataccttttcccgtgcatgtgctgagtcttcctgtgcttttttctgcattttgttgatttcgctgaaagtacatccggagatggaaagagcgacggcgatcatgcaggggagcaccgccagcttcattgaacgctggtgtgattttttcatgaatatatccagattagttaacgtagacgacagaaccagcagtaatgcctgccgggggtgtcagaccggttgcagttcctgatagccaggtgagttgcccgttttggaagatccctattagtgcagaaccacgactttttaaacgcaaagtttcaacaagtcctggttgttcaggcatccatacccacagacgcccctgttgtaactgatgtttaattcgggagtccggagtgacagggagagccagtttatctgaggaaattactccgtcctgctggcctgatacgtatctgatatcattgattctgttagcaatcattagtatctgacttgcccatacagacgcacttgcatattgctgggcgtttgtggtttcagacatcttctgattctggtagctaccagtgataatcagaatggtcaggccgacggccatgaccagccatcccattagcgaccatcccttgtatcagaaactgtaatgatgcactgcatgcgagaagcctgtgcgtataaaggtttttgcgcagtccgatataactcaaatacctgctccatggctgattcaaatgatccccggaacatcaaaggcgcatcaagacggtaatcggttacagaaagtggccatatgaccatccagtgcgttgatgccatgctttcgcattttgtttcttctgcccacttaataatgttttcccttaatgtagtgcctgccggcgcacgccactctttaccctgagataccggtttgacaggtgtcccggtcatgagtgggatagacttgactgtagagccggtcggagtcgggattgctgcgggcgtagacggagatacgctgtttcccctgaatgggtttcgtggtttgttctggctatttgctgtcgttgaagactccggggaagtggatgtggttaccatggctgctggcgagatagtggttgccgtgtcctgtgccggtgcagcagccgatgttgtgacggtcaacgttttattatcccagtccagatggccccagaggtgttgttcttccagcaaccggttcagagaacgggtccactgatcattggcagaccatgaaaccagtttggtattcagtttgggcgtggctgcattctcttgtctgaatttccatccttccggtagtaatgtttttatccactgactgacggtccggttacgggccgtcggcgatagtgttacaggggtgctaccaggcttgcctgtaatgattaaccgggagaaattctgacttattgttggtgaaggtaacggtcgggattcgcttactggctgtgctgtttttactgtctctggcacgctgactctcgggggcggagttattttaggtggagaaagtcgttgttgcgtaagtgccaggacgccagcactctcactgatttgtccgtcaacaaaaaccagagcaggcgtatctgatggtgccacgttattgccgccggaaattccggcacagccggacaataatgacggcagtataagtgtcagatagtttttttcataacggagactccgtgttcgtatatacgtgtttgttagttaatgcgggctttaagtaagggttcattattttatgtgcaattggatgggtaatgtataccggtattgagagaattactcctgaatgtcccgttttagtcgcattcagaagtctgcttgggtctttaatattgttgattagtattttcattattctatcttttgaattttaatgttgcatgttattttaaaggtgaggttgtggatagccaattaagccagtgttttgggattttttgtgaaaataaaatcctgcttatgagcattctttttatatctaaatgtattttttaattggtgtggtgggtctggagaggacgaatgacgactgtcattccgtccgaatgcaaatgcgggaaagaccactgaaacaagagatatataaaaggaattgataatttttcgtacagacttgttttccgtgggtatgtaataactgaaaaactcaaatcataagattccagtctctttaaaagtttatttattcttgctggagtaaagagatgtgaatgcatgacaatgatttcatcattattaattgcttttgatatcagagaaagcaatacatcccagtgtttcctcattgacttcgggcaacgtgtgtcagcataggggctaagatgtatagttgatttcttgcttccctttttcttcttcacaaagaatgtgaagtcgtatttagatgcagaccttacaataagaagtacacatctgaaaagtagtgggaaaatgcaaatcacaaccaccacacagaaatataacatataaggcaatgataagttgtcagtgtatggataacgtaagtattgccatggggtagtgatgtacagacaaagcgtacaccaaagcaaccagagatataatggtgcgttattatttttcatgttggctgaggcaggcgactaaaataacagactaaggaggattaactgtttaattctttggaacaaaaaatgcagttcctgatcatcacacaccattgaataaacattttgcttcggttgcgttcatgatagccagtcctgtagatgctgatggcgggagctgctgcccttgtgccagcggcagtggctgccgggagcacgctccagtcggaacagaaatcggttgtcgcgtagtaccaccacgagacagttatccggcgtgcagaaacgtcgggcaagctcatcggggtctgtcggtgttttcgttgaaaacagcctgcgtttgcagtgtgcgtcgacgaccagtatttgcagtcgtccgggatgttgctgtggcatcaaagactccttccggaacgggaaaagaagcagctgtaccgtcataactgcacgtaccggttgcgaaaaaacggcacaagcgagtagtgacagaaagaatgtcggaaacggcaggaagggcggtacaggctgcgaagactggaaacggggtatgccggggattacacatcctcagtgtaatgtgatagtcgtctgctcctgtgttgcaccccagacatcttctggcaagctgggcagcccgataaatagggtgtgaaagagggtttctctgcgttcgatcccgaattgatgttcgtatcctctcaccacctgaaatccttcgtcggagaatattaactctgccgtttccagaagctgcatagttttgcggtgtagtggagtgatcagctgcaacgtaactggtgccctcatatcgcctgtcggtagaaaacactcttcggtgcgacttagttgtagcagatggcgtttcccggaacaggcccgttcaatggattcattgaacaccatctcaggccatgggcagacataagtgcgccagcctgctttctgtaatttacccagcgcagcccgaaaacgaaacaacggacattccccgacagtggcagagctgagaaagagcgtattcagcgttccgatgatgggaatattgcgatctttttcggtcaatgcttttaacgccatgatttcgccagggagactactgaactcaggatgtctgctggcaccagaaagccattcaagcaggtaatgccgtaatccggtttcactggttatattgtggttttcctgtgccgttttcagggcattcagtgcacaccagagcaactggcgcacgggatgttctgtcgtggtcatgcgaatgtcctactgtgagatgaaaagaagaccggtatccgttctctccgccacacgtgatggcacgggccggcctttga

SEQ ID NO: 242 - DNA, 4635 bp, Escherichia coli
gttttgacatccagcagaatattaataggaatggaaatatcgaatctgtcttccagcatcattaagagatccatcactttgatcgactccaggccaagatcgttgacgagatcgctgtcgggcttaatttccacaccgttttcgaccaaatcctgtaaacaggaaaggatgtaatccattactatttcacgatttaccatagaaacgttaacacacctttaaacaagacaatcaaaatagcccgttgcgtaatgcgtgttccaggctaatcccgggaaaccaattaatatcttcagaaatacggttattacttgccgaccagtcggcgtgggttaattcacgaattttcgagcgggtcagcataggttctttacctgccaggcgactcaacgcggtactgatatccgcaaggcaggtgagtaccggcagaggaataccaaccattcgcacggaaccgcaacggacgttggcggcaagttgctgtatgcgttgccagtcatagccgccagcgacgccatcgcataattcataggtttgcgtctgtacagtttcggcgcttaaccactgacccactgcttgcgcaaaatcggtgacgtgcaggaaagagagctgtgtatctggtgcaccaagtcgtggcagcaggccgcgcagcatccagtcaaacagcggttttaactctttatcgccgggaccatacacggctgtcgggcgaaaaacgcccagcgtaatttcgtcagccattgcagtcagccgttgttcggcgatgtgtttggaatttgcgtaccaggagagctcgggatggcgcgccgccagcgaagagataaacagaaaacgttggcaaaagcagctctcttttgctgcttgcatcaggcgcaggctgccgtcaacgttacagcgggtgaaaatctcttctttgtgcccgcgcacttgcccggcgcaatggaccactgcgctggctccggcaaccagcttgctaagtgaatgagtatcttccagcgaaccgcgcacccacgtgagattatcattgacgtgagcgcgggcagtacgcgtcaatgcgcgaacgtgaaagccgcgggcgagcaggttatcgataatatatttaccgataaacccggtagcgcccgtcaccgcgacagtttgattcatgccagggattcctgcacatgaaggcttgcagcataagccttctgataacgttttttcgcttccgcacgggcaggcttgccggaggatgttcggggaatactgtggggcggcaacagatcgatagccgctgttacgccaaattcgctttggatccgtgctgccagcgcgtggataagctgcccgcgacgttcttcgtcgctgatccgacactggatctgcaaaatgattttttcctgggcggtaacaaaagcaatcgcatcgccagaatgaatttccggttcttgttccgcaatatattcaatatcctgcggccagatattacggccacgaataataatcagatctttaatacgtccggtgacatacagataaccgtccagcagataaccgaggtcgccggtgtctaaccagcccgtcgcggcaatctcgtcttgcgaaacctggtcgccaaagtaaccgctcatcaggctggggccggagatgcaaatatggcctaccacacgttccgcgaccggcatacctgcttcattgcggatttcaatgccatgttccggcaacgctttgccgcagttgacgaaagtcgatacggcgcgtgtttcagcacccggcgcgacggctttgccctgatattctaggatgtcgcgatccacttcgttaaccacaaccccagagccttcatcagagaagctgacagccagcgcattttctgccagtccgtagcacggcatgaacgttttatcgtcaaagttaacctgacggaaacattcagcgaattgatggagttgttctgcggagatcggctcagcaccaataccagcgacgcgccagcaggaaagatccagttcagcgagatctttttcattcacgcggcgttggcacaattcatagccaaacggcggcgcaacggaaacggtgccgcgatttttactgatcaatttaagccattgcaaaggacgcatggcaaaatcctgagtgcgcaaataatctactgaaagttgcgtggcgacgggggtcaggagaaagccgaccagtcccatatcatggtagaaaggcagccaggagacgcagcggtcgccagggcgtaatttaatgccatcgtggcttatagcacgtagattagccatcacttcgcgatgggtgataatgacgccacggggaaaacgggtgctgccggaggtgtactggaggtaggcgatatcgttcggaactggacgctggagcgcaacatcggcttccggtaatgccttaaaccaggcgtggcttaaaacatgtaattcggggttgttatgcgtcgcggcattgaccagtggcaaccactcatcaccagtgataatagctgcgggctggcaacttgccagtaaaccctggagtttggcgctccaggaatcccgctgaccgacgcccattggaatcgccaacgggacggcgactaagcagcatactgacaggcaaaaaaagcctctacaaacccgctactcgtttcggcaatcagcgccacgcgttcgccttttttcaggttcagcgataacaaccgcttcgcaccagcttcggcacgcgtttttaacgtctgatattccagttgatcttcaagttggcaacgtctgtcataaaaattcattccggcgctactcagagcggcgtagtccaaagcatcaaccagcgttggaaaatcggcatagcgcataggtagggaatgcgtaaagattttattagacatatacaccacgaaaaaattggatatcaaaaataaaatgacaataatgcggtggattatataggcataaaagataaatgagatagtattttcatcggtgtgaaaatgaacattgatttaaataatgagtttaagttttttgtttttattgtgaatgatatttaatttatgaatatattaagaagaagccttgtccggtcgccttaaatcgacaaaaggcattgaggcgcttctgtgtagtctctaaccttatcataatcattaataaatactatttattctttgtttgtattcattgggttgattattaaggtgtcgttcgttgctgttgcaacctgtttttcaccgttaattatttgttatccacagagatatggaatgcgatctgctgatgattaaaattgaaaaagtaattaataaaaatgaccttaaggcatttatcgcttttccgtcatcactttatcccgacgatccaaactggataccccctttattcatagaacgcaacgagcatttgtctgcgaaaaatccggggacggaccatatcatctggcaggcgtgggtggcaaaaaagcgggcagatagttgggcgtattaccgcgcaaatagataccttgcaccgtgagcgttacggtgaagataccggtcatttcggcatgattgacgccattgatgatccgcaggtttttgccgcgttgtttggcgcagcggaagcgtggttgaagtcacaaggtgcaagtaagatcagcggtcctttcagcctgaatatcaatcaggaaagcggattactgattgaaggttttgacacaccaccctgtgcgatgatgccacacggcaaaccgtggtatgccgcgcatattgaacaactgggttatcacaaaggcattgatttactggcgtggtggatgcagcgaaccgatctcactttctctccggcgctaaaaaaactgatggatcaggtgcgcaaaaaggtgaccattcgctgcatcaatcgtcagcggtttgccgaagagatgcagatcctgcgtgagattttcaactctggctggcagcacaactggggatttgtgccgtttaccgaacatgaattcgcgaccatgggcgatcaacttaaatatctggtgccggacgatatgatctacatcgctgagattgattctgcaccctgcgcgtttattgtcggcttgccgaacatcaacgaggcgattgccgatctgaacggatcgctctttcccttcggctgggcaaaattgctgtggcgtttgaaagtcagcggtgtgcgaactgcgcgagtaccgctgatgggcgtgcgcgacgagtatcagttcagccgcatcggcccggtgattgcgctgttattgattgaagccttacgcgatccgtttgcccgccggaagatcgatgcgctggagatgtcatggatcctcgaaaccaatacaggcatgaataacatgctggaacgcattggggcggagccgtacaagcgttaccgattgtatgaaaagcagatttaataccagctaactcaggttcatctccagcggcaccgccgagcgaatcaaatggtggccttccagctcgatatcgtggagattctttttcacggtccgcacatgatcgcgtgctgcgcgctgggcgacgtgcggcagccgctgcaacaccgcgttgtagatcctcgcatgctggcgatcgatctgctttttttgctgtggtcgatggtagagattatttacgctggcaaacactgaattaaacatcagatcggtcaatgattg

SEQ ID NO: 243 - DNA, 2634 bp, Escherichia coli
tattatatagtttaattgtagtttaattatagtattgtcggaaatcatttcctaggtgataggaactcatttcctaggtaggtaggaaaccacttccacggttatttcctaaatagatcggaactcatttcccaggtgttatttatacttatcgggtatcagacttgataggggtagctcacagtgacctaccgttacatccaatcatcacatagcatctgtgcaatgatcttctaaaagtgtttcttgctaccaaaattaaacatctaaaacaggcttaaattcaatgtaattgatgattaatccctgtgtaattcctacgtaaaaatccaatgaaaagtagcttaaaaagtgcaatgttagctttcttcacttttacatcactttcgcaaagccttgtgtaatacggcttacagagcactatcagaaattgttgattaaaaatcaatctattatttgtcgaacaagtttcctttaatgcaacaaaaaattattttttcaaaataaacacactatttaatagcttgctaattttaccaaaatgtaactacatgattctcatgcaagacgtgtagtgataaagcaggctaaatcaccacactaaaaaccttcgaatttcgtagtgaaaaaagtcctttacacacctaatcaacacgatcaataatcactacactcaaatcaacacagaaggaaaatgaaaatggctaatattggatacattagggtatcgactgtgcaacaaaacacagaccgtcaattagctggagtaactcttgataaagtctttgaagataaagcgtcaggcaagaacactcagcgcccacagtttgaggcaatgatgaactatgtgcgggagggtgacgtgttacacgtccatagtattgatcgcctttgtcgtaatacagccgaccttctggcaacggttgagcaattaacagagcgcggcgtgtctgtgcatttccataaagaagactttaagacagggaagaactctcccgcagggaatatgatgctcacagtgcttgcagcagtggcacaaatggaacgtgaaatgatgcttgagcggcagcgtgaggggatcgccgcagctaaggccgctggacgtatagcaaaacgtggtaatggaaaagcaattgatcgagcgggaattgttgccgctctcgcgaatggtggatcaattcggagcgtagcaaaagatttcagtgtcagcacacagacggtgcaacgtatcaagaaagagcaggaagcgtaatgcctcctgatatttgagaattgtcgctgcgtggacctgacgccgctgatcttcgcgttaaacattgatcacgtctgcgccgatttcagagaaaaagacagtaactgaactcactatgaaggctaaacgtatctttacacttgatgaaaacgttcaaaaaacaacctaaccccaaaattcaacaaattgcaacacattgtttttaaaagaaaattaaatctacatcaaatattggttgacgtagattgaggtgaatagtagactattagggtaaattaccacccttgtaacatcatttaatgcatgttctaatcttcctatcgtaaaaccggaggaagttatgcatttactttcaaaacatcttcacactattcactttctcgttattgatgtattcgttgtggctattagttaccgcatttgcatcgcttccagtgaagagatggacgctgttgcaattattgctcaagcaatggcgatgttaactaaacgactttaataatttcactatcaggtgcataaacacatctttgatcgctggatgtgttatgcgcctactggtggttcaatccttaagccatttcaactcactaaggagttttctttcttcgttctctcgctgtttacgctctagccaggcttttccttctggcgtagacaggaacttacgagcgtgaatcttgcggttattacgtttgatagctgcaatgtttttcatcgtgttgcctctgtattcatatgaaaatgaacaagttacatactacacaggaaggctacgcataaaacacaatacaagtaaagatacattttcaagacaataggagccataaagcgcctttgatggttataccaaaaaataagcgccgtaggcgtatccactaaaaagggctttttcacaaaagctatgaagtcttagcagttcttctcttatcaggcacccgttgtactccggtggacgaaaccgtgctagagcttgattctttcccgatcaagttaggttttgaagaggtgggctttaatccactattgcacttaaaactcttcccatcatttagcctgtttatcctctgcaacgtctcacgacgtgtagcatcattggacaccgcgccaggtgtggaacatcttgctaagagttttggtagaaggtttagagacggtggcacgtcttccagcttcaaaggaacttgttacgaggttgagcttgggaactactcgcccatacgtgttacactaccaaagcccataacaacgtataggcgtttgtaagtgataacagaagatacaatttcttagagaagttaagctaagttattgattttcttgatggtgccgataataggagtcgaacctacgaccttcgcattacgaatgcgctgctctac

SEQ ID NO: 244 - DNA, 3437 bp, Escherichia coli
caatcccagacattacatatcataagttaaaagagtgtaaaacagcggatttctatacattattagctgaaaacaaaaaactcaagattaaggctgctgatatagataatgatataaggaaactatctgagatcccatctttttatttatcatttggattaacacctaaacaaggaggtgcattgggtaatatgagtctcagaaaaatggattatagtgctagtctgggtatcagctttcctttaatgggattatttagttcttcagtaaatcaaaaagaaaagattatttctatgtctcgaaccagaaatgaatcattgaaagaaaatataaaactagatctattggaaaaagaaattcgccagaaaattgatagattagagaaaaatcttgcgatgatgaaaaatgaactaactctgaaaaaaaggaaagttgagtatataaattatcgcttaaagaatggacaagacgacgttatctcttatttgtctagtgtagagaatttacatgaaacagaaaatgaatttcagaaaattggatatgagattgaatattatagtttatatcattattttcttctgcagcacatttccaatacaggggaaatgtgataactactatggtgttctacatggaagtaaaaacgtaaaatataagagtccttttgcaggggttgtaatacttgaggacatgattgaaggtaatgtggtcactgtggaaaggaagctattttctgtcctgaatcatgaatatactgcaaagaaagatattgtggccatgaaaagaaatatggaagagaaaaaactagctagattaaaaggagtaaagacacattcaacctctatgttctcaaaagggttaatttcaagagaaagcttgcatgatatagatgagaaaatcagcaatactgaattgactattatgggactggacatagagtcaaagaatctggaacaactattaaagttgtcatcaccatttttgcatactcctttcattattcgaaatatcttcgtaacaaatgagcagtatgtaaatgcaggcgatgatataatgtctgtagaacttctggataatttttatatagatgttaaattcgatccggtcagtattacagggaatataagagacaaaagaataaggtatcgttctttggttaattctctaatgggggctgcaacagtagtcaaaaatatccgtgccagtggcgaatcaactcaaggtgaagatacatcaggtctgcgatctattacgctgttaattgatggtgaccggaatgaattgtcgaatctattagatactgcgtttgagattataatagatgattagagtaaaatacataaaaaacctatagaaaacagaaccatcctgaataatagcactattgagataaaagaggggtcgttcaatattattactggcccgtctggagttggaaagacttcactgcttaatattattggtctattggataatgcctttgttggagagtatgaatttttcggtaaaaaagtggaaataaaagataatagcatcaccacatatatcagaagaaaatattttggattcatctttcaggattctctgattaatgtaaagcaaaatgtcttaagaaatatactatgttctgtagactctcaaaacataatagccgcaagggaaagaattaatgatatcttggtgtccgttggattgtcaaatattaataataatgtatcatttctctccgggggagaaaaacaaagactggcacttgctagggcattgataaaaaacccagtatacttttagcagatgaacctactgctagtctagatataaagaataaaaattagtgatgaacatactatctgaatacaataatcaaggaggaacagtcgttatggtaactcatgatcttgaactaatcgatgagaatatgactttaatccaactattaaatacataacataggcttacagtttatgaagttcactattgtcttattgtatttttttgcctattatctcgcagcaagaaaaagacgagtgagtcttttttttactattcttttatactctatcattttctctgggatgtatttttctagtggttttttagaatattatggcagttctaatttatacctttcatttggattactctgctataatatgataacccttgtcatatatggtttcctgagttcttatggggtacttggagcatgtctgcatgcccttttattaacctcattatccgccttcgggatgtttataccattaaatccattgattgttttatattatgattttcctgacatcttaccaagaacagatattcctgttttaaatttattaatattaaatcttatccctgcagttacatttagtctaaaaatatcattttttctccgttctcttatgttattattatttccgctaatatggaaaacgccggttaatataacacatccccctctgaacattgtgattgtacaggttggcctttattttaaaaaagtaggtgtcagaggtaatttttatactgatctcaatgaattcgtcagaaataagaaggttgatctagttatcctctcagaaaatgtttttttcggttacaagaatgattatataaaggaaagaactaaacatctcttaaagcaattaaaagataatcgattccactataaatatgggatattaatgaatctttatggatatcaagacattaataacgtagtgtctgctttctggcataaagaagagtttcttctccaccaaaaagcaaattgataccttttttgagaagaaaagtttttataactcaccagaaccatcgacatcaccttttctatattataaaaagaaatataatgagcaggacatcctggatttcaacaacattaaaatgagtattcatatatgttatgagggattatttcctgagggtgaatctcgaagaaaagatatctccattgttcaatccgattattcatggttgagtgacaatcacaaatatgacaacacccttattaatggaagcatattgtcgaaattctctgtttcgccgaatacccctcttattaatattcaaaattatggtggaacagttcttatagacaagaattggaaaattgatatggacttatttaacaggtcaaaaacggagccttttttatttacacagatatgagtaatgcgctaattttcagttgaaaatggggagtgctattatattaactaatgtatagggggatttttagaaataataaaataaatattggcgttgaacaataacgccaatatcgtggtgaatatgatttgctgactggcaatattaacgaagggttaaaactctctgaaaagaaagtttatcattagtatggctacatagaagttatgtcatagcgatataaaatagcttttattagcttttaaaataaaatcctgatgaat

SEQ ID NO: 245 - DNA, 1884 bp, Escherichia coli
caagatattatttattatagctaattaattttaccactattcataaataagctttatcctcttgatgttatacattcaccacttactgaaaatatatattctccaggggcactatactgattcccgtcggacataatatcaaagatagcctgtttttcttctccttgcctgtatactccccgttgcccttctctcaaagaagatgaccacccccccccctattttgactttcaactcatgcttggtttctctattgttttgtacaatataatgaccaacttttccattctgactggcatttatccatatataaaatccattatgtggctccctacaggcaattcttcctgttgctaacttcataccatcacgtaattgactctctagagttttgtgacttatcaacgtaatttctgcggcatctaataaaccactcattaccatcacaagtacaccgcaggacatcggtaatatgctctttttcagcataacttccctcctgttacatacacactgcacgggtcagaaaaattcctgacattcccttttttagtggcagtttgtagtccgcatagcactgactgtttgtcccccactgcgccttcagttttccagcctcagacagcccgcttagatacaccttccccttatcatctacaacacctgcagactcaaatgcttctcccgtttttctttcaagggtaacaaccgtaccaaatggcaaaagcgttccgtccttacgggtcagtgtcaccagagcacgattacccacacgagtcttaaattctgcttggactaatgctcccttagttggaataacacgcctatccgtttgcgacacttctgtattatcaggaaaagttgtaggatcaagtgtaataatattctcctgataaggcgatacatgtcctaccaatgtatatccacggaaatcagtactgactccaggccagccaccaactgacgctccagctattcctggtgcagcaattaaagccattgtatcatcagttttctgaccaaatgctatacctccactatgtatagccatgcttccagacgtcccaacgttcatctggcgtgtgttacgattgtaactatacattcctgttagctcgccataaccacctgaccagcgaagattcaatagactagtatctgcatcatatttgctaccaggtactatctgttcacgtatatcccagtatagcttttgtccaaaggcacgtccgtttaaccccgtttcataaagtgtattttgtcccgtgatacgctgtatctgtgctgtagctgttacccctttatcatcccccccccaaccagcgtttcataggaatactcatccagaggtttaaattattttccgtgcgtaaactgttgctataataatctccgatattattattgcgtgaccaatttactgcgaaggtaatacctttccatgaattactataagatgcacctatataatcctgctttactttatcacgatattcatcacgcccgccgtttagcgcaacagatccccactcaccaagcgcttgacttatgtttattgtggtccgccgaattctattatcataactcctgtatgcagtaccattacgataagtatccaatacgtccgccaatgaatggtaacctgcacttgaatcttgataacctgcagcaaaactagtccctgttagctcaaaggacttatcataacggacgcgccaagtttttcctatttcattactatatcccttttgttgtcctcgagaataaatcgtgtctagtgatatagacccgaagcctcccaatgacaaacctaatcccaatgcattaccctgataatgttcacttacttggattccaccaaacgctgtcaacgaccatggtaaa

SEQ ID NO: 246 - DNA, 3674 bp, Escherichia coli
gaaaatgtcttccgaacgcacgctggcagtccaggcagcactgatgcagcaaccggacaaatctctggcactgctggcatggacgctctgcctgaatgtgtttgacagcggagcgtacagtaaaccagcacaaatcagcctggaatgtaaacattattcgctgaccagcgatgcgccgtcagggaaggaaggtgccgcattcctggcgctgatggcagaaaaagcccgtcttgcggccctgttaccggagggatggtcacgggacatgacgacgttcctgtcactcagtcaggaggtgctgttatccctgctcagtttctgcaccgcatgcagccttaacggtgtccagacccgcgagtgtggtcgcacgtcacgcagtccgcttgactcactggagagcgccatcggttttcacatgcgcgactggtggcagccgacgaaagcaaacttcttcggacacctgaaaaagccgcagattatcgcagccctgaatgatgccggactgtccggtgccgcacgggacgcagagaagatgaagaaaggcgatgccgctgaacatgcagagttccatatgaaagacaaccgctgggtgcctggctggatgtgttcaccacgtccacagacggatgccactgaacgcgccgataacctggctgatgccgcctgatgaacaaccacaccgccccgccggagacggggcggcagagggagaaatacgatgatgaataccgaactgacactgaatgccctgcagtccatgaatgcccaggaatatgaagaaatccgtgctgcgggaagcgatatgcgccgtaatctcactcacgaggtgatgcgtaaagtggacgcaccggctaactggatgatgaacggagagtatggcagcgagttcgggggctttttccccgtccaggttcgtttcacgccagcccacgaacgtttccacctggcattatgttcgccgggagacgtctctcagctctggatgctggttctggtgaatggtggtggacagcctttcgccgtcgttcaggtgcaacatatcttcacgcctgccgcgatcagtcacacgctggcgcttgccgcgacactggatgcgcagggatacagtgttaacgacatcatccatatcctgatggcagaaggaggtcaggcatgagcgcacgttcacgggcactgatccccctcagcgcagaacaacaggccgccatgcaggcggtggctgtcacagaacaacgtcgtcgtcagggacgcacactttcagcatggccttatgccaccgctttctttcgctgcctgaatggcagtcgccggatttcgctgaccgatctccgcttttttgcccctgcgctgacgaaggaggaatttcatggcaaccgtctcctgtggctggctgccgtggataaactgattgaaagttttggggaagtctgtgttcttcccctgccatccgatgcggggcaccgtctgttcccgtccgtgccttttcgtgaaggtgagcgtcgtcgtcagaaaaccacgctgacagagcagaaatacagccgccagcgggaacgtgaggcagaacgacgggaactggaataccagacatgttttgctcaggcgcagattgaccttgcgtttcatactcccgccacggtcggaagctggttgtcccgctggtctggtgttgttgaggagcatgatctggaaacgattttctgggggtggtgcgggcgttttccatcactgtcatcatttgaccggtttttctggcaggaggaaccactctggcggctgatttttgaagccggtgaggccggtcgtggtgcaccggtacaggtacgtgcacttgagcagtggatgatcccgaacaagctggagaacgtaatatgatgaaatcagacgaaaaataccaggttcccgcgtggatgcgacctctgttgccgttgctctgcaacaccggggggaacgatccggaagaactgctgaatgatacagaaaccactgccagtgcgaatgttgtccgttatgtactgatagttgctgtgcggtcgcaggttgatctgctgcagcttctgtacaggaaagggctgttgcgcacagagataccaggtggcttttcaccggaagaagcgcaggcactcctggataatctggtgcgcagccatatcagcaaggcgctgtcgggcgagcgaatggcagcccgtgacagaaatgccgatctggcctggattggacagcaactggtcgatgccgcctggtttgtccgtgccacactggaagcgcatgggatgagcgtcggaaatgagagtccccctgctccgccggagacaatgccggacatacagacacgggaactggtgatgttgatcaagcgactggcatcatcgctgaaagcggtgaaaccggacagttgtgtggtgcgtgaagcgcaggactggctgcgcgacagaaaacttgtggatatcacagatattctccggtgaaccaggcatgtatattttacgcagggacacgccgatcatgatcgtttcatatcaggggtggtctggaggtcatgcggcgtgtcctctgcactcgccggaataaggaagtcgccggcggctccgcttttacccggccatgcggggcatggccttgtgggttttcagctctgtggcctcagcgtcgtgtgcgggctgtgccgtgcctccatcttagccgggctggcgttgatgcaagggtacgcttcgccgctgcggtcacccggtccctccttcccgtctgccgtgattttccggtcgttcgtccgctcaggtttcgcggcctcaccctgcaactcccgtcagccgtgtgcgtcaggctgcggcttcccttgcgcccctgcatccccgccttatcgcccggcttttatggaggcacggcaccgcccggtgtcgcagaacatgtgactatggaggattcgggaatgtctgttgttgcacctgctgtatacgttggaacctggcacaaatacaactgtggaagcatcgccggacgctggtttgacctgaccacgtttgatgatgagcgcgactttttcgccgcctgccgtgctcttcaccaggatgaagccgatcctgaactgatgtttcaggattatgagggattcccggggaatatggcctctgaatgccatatcaactgggcctgggttgaaggcttccgcctggcacgggatgaaggctgcgaagaggcttatcgtctctgggtggaggataccggtgagacggattttgacaccttccgcgatgcctggtggggcgaggctgacagtgaggaggcttttgcggttgagttcgccagtgataccggcctgctggctgacgtgccggagacggtggcgctctattttgactatgaggcgtatgcgcgggatttattcctggactccttcacctttattgacggtcatgtgttccgtcggtgatttactcccccgctccggcgggggtatggcctgccaggccgccggaaaaccctggcaggcttacgcctgcctgaaatgcaggagggccgcgcctgcggcgctgcccttcctgcccgtcatggtgtgaggcatttttctgttatgtcgtttctgttgttctgatttccggaggcggggacaccttcggctcccggctgcctggcggcatccggtcgtcaggcccgactccgacaggcagctgctgacg

SEQ ID NO: 247 - DNA, 2458 bp, Escherichia coli
cggcagaagcagaaaagcttattatgcttccatcggaaatgatgatctggcagcctgagttcacagataaaacactctccaggaaacccggggcggttcagaaaatactcagcatagttacgtttcatggctctgaaagcccacgctatttatcatcggctttatggtttcaagcaaaaatttcgctcctcatatccggtccacattggaaatgtttaccagaagaattttctaaaataccacgttaactgtcatctttgtttttataattctgctttttgcagaatttcttgagataaataatagaaatccccattgtataacctgatatgcatttgacttgagtattttcagagcattgccctataatcgtttagggcaaatctgtatggaaggagggtacattttgcggaaacgtgctcttggagtgaagatctcattggtgaaggcatgagtagttcatttcaggatgagagctcaaaaacaagggggcatctgaaaccagacctacataccggaggagcacagaagaaaattgttcttccgcaagatgaacgatttcatgccggagatcagttgtccagaaggttcactgccttaaggcagtgctggctatgcgtagcctacttcgtgatttgaaatctaatccccggagacatgttcagaatgtgctgctgaaatatgagcctcactttaaatttattaaagtggtgatgcagaaacaagaccaacccagggagccgagttatgtcattgatgcctgaaaccagagacgtcagtctgttccgtcacggaataacatctatgtcggaaggacgagtgttactgcgatatctgaagcaacaggacgactctgtttttctctaggtttaacttcttatacagatgattataagatgaagttctggtgagaaatattctattgtgatttgactatgaatccgttatttaacgatatccagaggcgtcttttttgtctgaatcatccccatattcttggttctggaatgttaggttcagagctatggaggccgtatatattggcaatgatgtttgtcatatcactattacctgtaatcagtctggattccacctgacaaagaatggcgtgcgtgtattaacggaatatcagaagccttaatgaactgttacctcttttgagacgacgctgggatgtgacgccggcaatcatcctggcagtggagtaccttttacgtgtatcggtatagcattggttttctccttaattaactattttgtctaatataacatacttgatctgcagatgacttgggcctgaaaacaggtagtgatcagcgattatttctgggctatgtatctctgtgtaatgagactaataaactgagtcatccgactgtagactggcattatgtgggacactctgcctgtgtctatatttatctagcggtatggaactgcagacggcagtctggcgccccatttcttgtatgcatataacggggttaagcatcctgaatgaaagagtggtcagtaacacataactttgttatgtgcctcttcgcactcaagactggagataagagataagagagtaactgctagcctctgctgcttttgacagaaaactctctaaggtcgttgagtgacatatttgcccggcagggcttaaacatagtagcaaggtgactctgccggaagttatggtaaaggtataggttgccccggatggataactatcctttacagagagaggaggtttcgtccttggtgatgtttcctgctcagagctttccgcatgtggattattttaattttttctgatgtcgaggtaatatgattatttactttttcccatttcaaatggatgaaaatgacacttttcttgatgccgaagttaagtatcagaaaatgaagaataaagaatgttatggtgtgaaagcttcacacaaaacacctttatcctttcttaaatcgagcgatacgttatacatcgttgctcatggcaacacatcagttattgggacaggttcagcaactgggccaacgttgaatcccttagcattagccactctattaatgaatagacgtttaccaaagaacttcatagatatcagagtattgacttgcgcctcggggatacattcgagaacccctgccttcgcacaacggctgaaagaaattatgaatgaacatgggtatcatagtctggtcgttaccggataccttggtgaggttgatatatcgagagactggagattaaaaaatgatgatggtatggcgttttattcctcaagaaaaaaagggattattcctgttaaggatgtattaagtgaatcccagagagctctttgtggttctgatctgaaatacgccctttctgatttcaagaaacgattttgaataggagtagtgaaccgccccggaaatcctggagactaaacttcctgagaaagaggtaaacaggatgactaaaata

SEQ ID NO: 248 - DNA, 3304 bp, Escherichia coli
cccctatccctgtgtgccttggcagtctcaggaacatgatattctctcgagattttatctgacagtaaactttcctcctcctcaaggacatcaatatcaaacctgattttttgtaaaatattatatatcatctctacatcaagaacagatattaatccaattgacattttacgctttgcaatttcgtattctttattgagcttcctatatctctcgaacatcaacatcaggtgagatttttttatcttatagttaataatttccgagaacaaattaattatgtagttgttcctctcactaagcatttcaatatattttaaataattagcaatatccaatttattattctgcatttttgcttcataagccgatagaagattataggataatgataaataaaaatggctgtctgtaatagatgagaaccattgattgttgtttatatactgccctaaccctatatttatatctggtaacatcgtttttatattgttatgtttattaatatctaactcttcgatatcaagagaataagaattaaactggatgcttttctgaaagaaattatcaatgatacaatctttcgccagagtctgtgtcgaaaacagataagcatttattgcaagaaatgagtataatatgtgtctcactcgatctttccttttatcgcattaacagggttaatgctgaaaaacagcctactgaaaatgatatttgcaaatataaacaccaataggacattggcaagtgatattgtaatcattgttgtcctaatacttattgttacatctaaaaaatacttaataatatgcattattactcctgcatggatgagtgaaataaaaagacatacgctcagcattattaatgactcaatgataattagaactgtaatttctttcttttctgtaccatggattatttttaatgataactctacccgtctcgaataaaagctgcgtttcgataaaataaaacatgtcacggacgcagacagagttaatatcacgtatacagagttagtgagtaatgaaaaccgctctaacactctgtccacagcttccttggcgtttaaagatgtgacaatatcgaattttcttatatcattgtcatataaaactctctttacgttgtttatatctctctttgttactatgttatcaagaaagattttaacagcattgactctgttatcgagtttcattttaaacatagtttccagtggaataaaaatgtgttcatctgattggtttgctttcaatccaaggctgtcaagaaaatccgtttttgagtttaatctgacaccaataattttaaacggaacaccattaataaatatttgtttcttactgaaaaacggactagattcattaacaatagcaacattgccattgtacttatcatttaaatctccagaatattccgtgttcaatcccagcttgtcaattccgctcaccgaaaatagttcaccggaaaaaggtgtatcgctgacatagaggaatgcgttcttcgagaaagaaagaactttactaaccgtaatgaatttttctgttatatatcctaccgttttaggtcgatataatttgacaaatattaccttgtcactatgaacttttagttcttcttcagcttttaaggaaacactgtatatcaaagagtcagtaataattatccctataaagctaagagataaaaaaacaagaaatgcaaaattctgtcttctattttctatgatattaaggagcgcctcctttagataatagtgcaaagttgtcatgttgaatgataacacaagaatcctcagccacacttacaggcgcagacatgtacagttattggaaacattatatataatgtacctgactattaataactaagggatatataattataagtttatgataataatcgaaatctgtgtgactaaacttagtataaatatatgcacttaatgctgtggagcatcccctgcatgttatgcagagatattaatgatttgattttacccagcaatagtggacatgcggctaagtgagtagacactcagtcagaggtgactcacatgacaaaaacagtatcaaccagccaaaaaacacgtaaactgaaccgtcccggaaatcctggagactaaacttccagagaaagcggtaaacaggatgactaaaaatactcgtttttcccccgaagtcagtcatagggtgattcgtatggttctggaaagtcagggcgaatatgactcacaatgggcggtaatttgttccattgccccaaagattggctgtacaccggagactctgcatgtctgggtacgccagcatgagcgggatcgagtaggaggagggataactcccgccgtcctctcacaccaccgtacatgcggctctgcatacggcggttcatgttaacactggaagtgatcaggaaaatcaatgactggccgtcaaaccgtgtgcatgaactgctgccctggaacctctcggctgtaaaataatccttacgccacgtacttctcggggcgcttacttttcaaatgagtttaaacttcaaatggttaaactggctttacaaccaagggattctgttgcccgtattgcccgggagcacgatatcaatgataatcttctgttcaaatggctcaggatctggctgatcaaagggcgtatatcacggcgtcttccgctaacgaattcttctggaattggcgttgaattattacctgtggagatgacgctggatgagcgtccttaccccgtttttacgcgaggtaattatgaagatcaatgactagccgtcgaaccgtgtgcatgaactgctgcactttcaggatgtaatattgcccagtagaagtgtcataatacaggtctcccggcgttcctttccccccaaagatactgacagtattaaccggtacattgatgtcactggcttttaatgtctgaaagtcgagtgttaccgttgattttttctcactgttattggtgatgatggccccgtagtcagccgcctgaagacgggtaaaggtcaggttattaccattcagatccagacgtccaccacggtatccccacgaaatattatccggattaacctgctgtgagtcagaaagcacaactgtcggacgaccgctggcaatatcaacagagctgaaagcctgtacctttccgtcagcatccgcctgctggttgagaataacagtaccgtcccctaccttgagtccgcctatattcacaccggtcccgtttactgtcagggtaccttcgccagttttatgcaggttatcaccggcaactccgttcacctgcca

SEQ ID NO: 249 - DNA, 2573 bp, Escherichia coli
ggatttgcgcgaaacagacagaagcaccggcaaatcgaagcgcagccgcaattcatcgaaccgcgccagcaccgagagcgaggtttcgggagcagcccccagaaaaaaccccatgccgggatcaaggacaaggcggttgcgtttgataccggcacccgtcagcgccgcgatgcgcgcgtcaaagaacgccgcaatgtgatccatgatgtcgccagcgggtgcctcgcgccgatctgcctgcccgtcttgcaccgaatgcataacgacgagtttggcagatgatttcgccaattgcggatagaacgcagcgtctggaaaaccgcgaatatcattgagataggccacaccacgcgacaaggcataggcttgcgtcgcgggttgataactgtcgagcgagacgggaatgccatctgccttgagcgcgtccagcaccggcgcgatacgctcgatttctgtgtcggacgaaacaggcgcggcgtcggggttgctggatgccggaccgaggtcgatcacatctgccccctcggccatcagcttacgcgcctgcgcaatggctgcgtctggcgccagataccggcctccatcggagaaactgtccgaggttatgttgacgatgccgaaaatgatgagcgatttattcatgggggcttctataataataataatcgagcatgagtctcatacggatgctcgggtcgaaaggaatcccaggcgagtaacctgtttgcggtgatccattagctgcaggagcagaatagcatacatctggaagcaaagccaggaaagcggcctatggagctgtgcggcagcgctcagtaggcaatttttcaaaatattgttaagccttttctgagcatggtatttttcatggtattaccaattagcaggaaaataagccattgaatataaaagataaaaatgtcttgtttacaatagagtgggggggtcagcctgccgccttgggccgggtgatgtcgtacttgcccgccgcgaactcggttaccgtccagcccagcgcgaccagctccggcaacgcctcgcgcacccgctggcggcgcttgcgcatggtcgaaccactggcctctgacggccagacatagccgcacaaggtatctatggaagccttgccggttttgccggggtcgatccagccacacagccgctggtgcagcaggcgggcggtttcgctgtccagcgcccgcacctcgtccatgctgatgcgcacatgctggccgccacccatgacggcctgcgcgatcaaggggttcagggccacgtacaggcgcccgtccgcctcgtcgctggcgtactccgacagcagccgaaacccctgccgcttgcggccattctgggcgatgatggataccttccaaaggcgctcgatgcagtcctgtatgtgcttgagcgccccaccactatcgacctctgccccgatttcctttgccagcgcccgatagctacctttgaccaccatggcatcagcggtgacggcctcccacttgggttccaggaacagccggagctgccgtccgccttcggtcttgggttccgggccaagcactaggccattaggcccagccatggccaccagcccttgcaggatgcgcagatcatcagcgcccagcggctccgggccgctgaactcgatccgcttgccgtcgccgtagtcatacgtcacgtccagcttgctgcgcttgcgctcgccccgcttgagggcacggaacaggccgggggccagacagtgcgccgggtcgtgccggacgtggctgaggctgtgcttgttcttaggcttcaccacggggcacccccttgctcttgcgctgcctctccagcacggcgggcttgagcaccccgccgtcatgccgcctgaaccaccgatcagcgaacggtgcgccatagttggccttgctcacaccgaagcggacgaagaaccggcgctggtcgtcgtccacaccccattcctcggcctcggcgctggtcatgctcgacaggtaggactgccagcggatgttatcgaccagtaccgagctgccccggctggcctgctgctggtcgcctgcgcccatcatggccgcgcccttgctggcatggtgcaggaacacgatagagcacccggtatcggcggcgatggcctccatgcgaccgatgacctgggccatggggccgctggcgttttcttcctcgatgtggaaccggcgcagcgtgtccagcaccatcaggcggcggccctcggcggcgcgcttgaggccgtcgaaccactccggggccatgatgttgggcaggctgccgatcagcggctggatcagcaggccgtcagccacggcttgccgttcctcggcgctgaggtgcgccccaagggcgtgcaggcggtgatgaatggcggtgggcgggtcttcggcgggcaggtagatcaccgggccggtgggcagttcgcccacctccagcagatccggcccgcctgcaatctgtgcggccagttgcagggccagcatggatttaccggcactgttgcaaagttagcgatgaggcagccttttgtcttatwaggccttacatttcaaaaactctgctta

SEQ ID NO: 250 - DNA, 5446 bp, Escherichia coli
gccacataagcaaggccttaagtggcgaaaagatgaaaaagaaagatcgcgatgctgatttgcgctggattcatggcgttatagttcaggcagcgtggtttgtaaaagcatcactggagcagaatgcactatcgggcaactatccggtaactccggatagttggataagctgtagtgagcgaatgccgaaaaagaatcagaacgtacttatttcggtgaatttcgatagtgatctggttgagccgctaatatgctccgcacgctataccggaagcacctttcggcgaggagaagcaacgattaagccgggcaatggtgttgagcaggtaacacactggatgccgctaccagaaccgccgcaggaggttaaccgtggctaacctgcaacttgccgtcaaaggtgaatacttcgcagatagtttcccccaaatctggggaaaagcccgaatggcgcggcttacagcaagataaggcctacatgatttgacaaatccgccagagctatcgcatactgaccgcactagaacttcaaagcggtcatccgcacccgatagctttgcggcttttttatgcctgcaatttggcatagtcacatccgtacaaaggtcgggtggagaggcgtaatacaatacccgcaaggggaatatgcccggagcatctttgaaggctctagttgacacccgatcaccagccactaactggtgattgctaactaaaacttcaaaggaggtcatcatgaccagtcaactcatccccgtattcaacggcactatcgacaacgaaacaattcttctagttaacgctcgtgatctacactcttttcttggtgtgggcagaatgttcgcgcactgggttaaagaacgcattgctgaatatggattcattgaaagccaggactatattttgatttgccaaaatgggcaaaccaaagggcgaggaggtgatcgccgtagcaaggactaccacctaactctcgacacagccaaagaactggcgatggttgagcgtaacgaaaaaggccgccagatccgccgatacttcatcgagtgcgaaaagaaacttcgccagagccttttacctgcaccaatgaacatcaactaccctctatcgtggttttcagagcaccacccctactccatgatgagctatgttgatcgaaaaactcttaacctggacgtttctgtgctcttcgacatgccaagcccaactatgcgcatcctcaatgagctacacagcaaaggctataacgttgacgccgctgtcgctgaatttaacgccttcaagcatctgacggaagaaatgcgccgcacgctacaggatatttcaagattgtcagatcgaaattcccgaaaaggcttctcgttaagcctgtaacttcccctaccatccccgacatcccgtcggggttttcatatctggagacaaaaatttgaaacagatcgctttctacaggcgttctggaaggcccggtgccttccgtgggttaaaagaacgcgtcacctggatgattcagtctcgtggtcgtcctgttactggcagtgaaatagcagagaaatttggtgtttcactttgcgagttcaacaaggtagctcgcggcctgacaaagggcagtaaggttgtgaaaataaaggcttcagaaccattcaccacagacaccggaatcgttgatcgctttttctccctcgaatcaaatcctcgtcgtgacacacctcgctcacgcaatgccgttcctccattcagtcgcagaagccgtgaacacgcagcaaaaaactgtcgcgaggaatacgtgcaaaaggccgaacgccgtcgccgactgattaaagcaggactttacattgatgagtttgaaaacgcgctatgacgaaaaaatacaccctcatttacgcagatcccccctggacattccgcgacaaagcaaccgatggtcaacgcggtgcaagttttaaatatccggtcatgagtcttctggatatctgccgcctcccggtatgggaactggcagccgataattgcctgttgtctatgtggtgggtgcctacacaaccacttgaagcattgaaggttgtagaagcgtggggctttcgtctggtgacgatgaaaggattaacctggaacaaatgcgggaaaagacagaccgacaagctggtcatgggtatgggtagcaccactcgcgctaacagcgaagactgcctttttgcagtgaaaggaaatctgcccgaacgcattaacgccggaataatccagtcattcactgcaccgcgccttgatcactcccgcaagccggatatggctcgagaaaagcttgtgcaacttcttggcgatgttccccggatagaactgttcgcccgccacacctcgcatggatttgatgtatggggtaaccaatgcggcacaccatccattgagatggttccgggtattgttaaatttctggagaaaaccaatgagcgaaaaaacgacgttgacaaaggcatcaccagttgaattaaggcagtgtctggaaatcgcaaatcaacttgccagaagtggaatacgatttgttccaatcccgattacagcagatgcagaacttcatctgtttggtgaaattctttcccgaaagctggatgaactggaaaagctggtagaagaagctgacacctcactaaccgtataacagccccaccgacattaaaatatcaggagaaaaaaatgaacgcagtgctcacagaattgaacaaattaggaaaagcatcagccgaaagtatttctaaaggtctcaatattgatttgaatgacgttattgacactctatggaagttaaaaaaccagggggtagtaactgtaaaaaatggcatctggcaggcagttgcaagggaagtggacaaaaaaccaaatatcgccccagtgcagccagtgcagcacaacattataggtgacctgctacgtaaatcacggaaagaagcgcgccgcgccgggcggaaacagaaacgatgggagggtgcatgtaaggcgttgcaagaactgaataaataccgtgacttgatcaacgaattgtcagagtgagcgaatcacagagagaatattttgagaaacaacccgcgtacattaatattgtttttcctttctctaatgacgggcggtatcctgttattcgcaggaacaacattatttatttttgttgcccggctaactgcgaggataatgacatgaaaatcacatttgaaagttacggtttaacagcaagtgtggttatatccagctctatattcgaaaggcgcaaacatcagcatatcgttgatgcagtgaaactcaaagccccggaagttaccgtcacaacacatggacttttcaggatacgaacgacgttgactacaacacacctctcggcatgccgtgtttatgatatggcactcaaggaatacaaccagtgttcgtcctgatccagcgcgggcagtctttcgttgatgccaacaactatccggtagaaatatgcaaggtaactctgactcaggtgatctaccgaaggctcgacggcagaaccagagccacttcaattagtgcatttaatgaagaatttgagcgaatcgagcacaacgaactgcatatgattaaagcggaaattgagaaggaaaagcatattgccagccttcgaaaaatgcgccgtacatcaatcaactgacaaccgccttcgggcggttttttcttacacatgcagaggcaacttatgcgcgagttagtaaaccaacataaccatggcattcagccagtcatcacacctgttgtacagataaatgcgaatgaatgggtaacactggagcttttaatggctgtaacaggcctgagaaaaggaacaatattacgcgccagggacagtgcgtggatgaacggcagagaatataaacaaatcgcccccgacggaacgccaaagaaaaacagcgaatgtctctatcaccttcctaccatcaacacttggatcaaaaaccaacccttaccatctcaggatgtttaattcttgtccataagagtataacctgagcgtgctcttggacgcaggaggaacaatggcgaattcagcctatccagccggcgttgaaaatcacggaggaaaactccgaataacgtttaagtacaggggtaaacgagtgcgcgaaaatcttcgcgtgcccgatactccgaaaaacagaaagatcgctggtgagttaagggcttctgtctgctttgcaatcagaacgggaacgtttgattatgccgagcgattccctgactcacctaacctgaagctatttggcctggtaaaaaaagatatcaccgtcggtgaactggcacagaaatggcttactctgaaagcaatggaaatcagtagtaacgccttaaatcgttatcaatcagtgatgaaaaatatgctaccgaggcttggtcctggcaggctggcgtcatcgattacaaaagaagatctgctgtttatcaggaaagatttactgaccggggaaaagggaagcaggaaaaccagcacgtcccgaaaaggaagaaccgtacccacagtgaactattacatgacaacaacagccggaatgttcagctttgccgccgaaaacgggtatctggagaaaaacccgtttaattcaataacaccgctgaggaaatcaaaaccagtgccggatccactgaccagagatgagtttagccgtctcattgatgcctgccatcatcaacagaccaaaaacctctggacagtggctgtttttacagggatgcgacacggtgaaattgccgcacttgcatgggaggatatcgacctgaaagctggcacgataacagtgcgacgaaattttacaaaaataggtgattttacgctaccaaagaccgacgcaggcactaaccgggttatacatcttctggcaccagcaattgaagcacttaaaaaccaggcgatgcttactcgtcttagcaggcagcatcagatcactgttcaattacgcgagtacggaagaacaattttgcacgagtgcacttttgttttctgtccgcaaatcgttcgcaagaatcacaaggctggtattaactacgcggtaagctccatcggagcgacatgggattcagcaataaaaagagcgggtatccgatcccgtaaagcgtatcagtcacgccatacctatgcgtgctgggctttatctgccggagcaaacccgacatttattgcatcacagatggggcactccagcgccagcatggtctacaatgtttatggtgcatggatgcctgagtgcagcgtgactcaagttgccatgttgaataatgtccttaatgcccgtgccccagacgtgccccaaagtgaccaggaggatgaaataaaattatatttttcaaaatgataaaccatatccttagacatgttgaaacgatggcacgcgcagtcgctgagggtgcaagcaaagtcgatggcgcagaagttgtcgttaagcgt

SEQ ID NO: 251 - DNA, 1077 bp, Escherichia coli
cgatgctgatttgcgctggattcatggcgttatagttcaggcagcgtggtttgtaaaagcatcactggagcagaatgcactatcgggcaactctccggtaactccggatggttggataacctgtagtgagcgaatgccggacgacaggcaggaggtgaatcaatgagctggcctgatgcaatcgtaactctgggggtggtattcgcagcagcgtttgttgtgttctcgatttgtcgatggggataaccacatgttcgctttgattcaacgcggtcagatatacacggacagagccggataccccgtggtgattactcgcatcactgagcactcagtgttctttcgacggatggacggacgatccgggcgggtacgcattggtgagttaaactgcctgttcgaacatattgaccaccaggagtaccgcaaaattctcgcggacactgagcaggaaaagcacctgaaaaaattacgagccataaaaaggaagtaaagaatgaataaagcatttgaacgatgggtccaccagcgttacggcaatcgctatgacctgacgcgagatgttgacggcttctactgtcgtgaagttgtgaagcgaatgtttgaagtgtgttgccactgccgtgggctgagtgttgtgtgaggtaatacatgggcaatgtgattcaactggctcccaatgaatgggtttgtgaaagcgttcttatcgcaattaccgggctcaaaccaggcacaattcttcgggcccggaaagaatgctggatggttggaagagagtatattcacgtatcaccagacggtaatccaaagccttccagtgaatgtatgtataacagaaaagcaatagatgcctgggtcgcctcaatgaaaaacaaacaacccaggtgatttaatatcatgaaatatgtaagctcgtatcgctcttgggcgtctggaggtatcgatggataaagtcaaatatccaacaggcgtcgaaaaccacggcggcacattacgcatctggtttaattttaaaggtaaacgtgtcagggaaaatcttggtgtccctgagactgccaaggcacacagggatagcga

SEQ ID NO: 252 - DNA, 3108 bp, Escherichia coli
tccagttccggaataaccttccccttgctgtctttcgggctgatttctctggccagacgggaaacactcatgcctacggtatgtgtgcccgcatcactgaagctgaccagaaccggccagatggcatcgaggaggcgttgtttttccggacggaaagcatatttgcgaccggcatacgttcgtttctgcacgtaaaaggatgcagagacatgtgcatgcgcaggctctgctcgccggtcaccgggtcctttttcaccagacggttgtaggcgtgcccgagctgcccgctcagcgccttatagcgctcaggacgataccaggacggattttcgcatttgggtttggtggagtgctcaccgcgacgacgcttcgtgcgcttcctttccggttcaaccaggaaagtggtcgcccttcccgcttcatagtcttcccagaaacggatctgctcttcgggtgctaactgactccagtgtactgcgttatatggagtattcttcagacctgccacaagctgtcgcttatggcggagcgattgtgccgtgtatttatacactgcacagggttgaatctctggtacggtttcattatactttacccgtattctgtgaggccccccactatctttcgtcgttccgccaagttcgtaagaaagatagtgggggttttccttttatggcttccggagcatcttcagtcttctgacttactgcccgtacatgccatctctcctgaatgccttatggtgcattctaccgtccggctttcgccgctttgctccacagagtgccaccctctgcacagctaataacagccgaaatatacccgctttacgttaatttgaaaagcattacaacgatctcttctcttccagtgcctcctcaccgatacctctaatgagttaatcttgacctgcgtcaaaaaaataaaatctatttttaaaagcagatttttctgctttagatccttcttttggattaaaagatcgacttttgttctactcacgatcatttatcttacaaccgatcaacctaacagaataatattctgttttaagacaattaaacgatctaaaaaacctttaaaaaatcattttgtagatcattcgatcgtaaatagaatgatttcttagataataaaaccatttgttacacaacccgccaattgtgtaacaacagcctctacaagagcatatttgttcatatgttcgtcagaactgcggattgtctggacgagggtcagacaccgtttcgtgcatatggaccagcatgttcgaacgccacaaagcagaagcatcatgcctggatcgcttcggcgcggagcgttaagttttgacgcttttttgtatgttttttaagcggttagttgactcggtacgttatactaagtaccctttactggtcacaggcaaaactgtgatcgggcgtaggaacccgcgtagtcatcgtcggcgcagaagttaatttcttcatttggcgtcgttttttgccataccataaagacaggaacttgtatttcttgtcgtcatctatggtagctcaggcggggcaggcattagcctggccggtttccgatgacgccggtattcctacccccgtctgggctatcaccaatgagcgtaggaactcggtgatagcgtttttagttgtcatcggagacctttgctatgtcacctcaaatgatacagaaactcccggccatcactctgttggaaggcatgtttcccgagctatcaacaaaccagcttaaagtctgcgtttttacgcaatgggtgttccttacgacgccattgctcagaactgtcggctttctcccgaaacggtacgaacctacctgaagcgaagcctgaagaacttaaatctggaaggatatgatgcacttcgctctgctgtgctgatgcgaacgttcgttttcatgattagcaatacagctaaagaaaacgaaaaaatgtgaacaggtgtccccattaaaggggacactttcatggaaattgcattttgcactttacaggcgctcccaaattgataaacataaacaccaagcacaagttactttaataaagcaaatcacttcagacggtgtcccaattatttgtatctggctcatgcccgatatatggcgaccttactctgaactgacgtgctgatgttttatttcgcgtatcacaatactgtgccactgtattgctgatattagtgcttagccgttctttatctgtgagttcgccaaatcaccgatacagaacgtactagagtctgctggttatatgcctgtcagaactgcagtttctccagatatgggctggacactgcttcagacatatgatctagcatattcgcctgacatcgcaaaatcgtccatcatggatcggttttgcgcggagcgttgaacttcgtgaatatagaacacctgaataaccggaactggtatcttgcgcaatataatacagccggcaaaacagagaatctttattctcatggctaaatgagcaaaacgtcgtaccatggactccattaataacaagaaagataagacgggcagactccaggtgctgttaccgtgaaagaatattcgctatttttccagggtacttttttattctggctaattttgacattcaaccagtatcggcattacgtcgccatagcgccttcattgatttcgtgaagtttggcggtgaaataaaacccgtcaataaagatattgtagatggattaatgaagatttacccggaccctgtgctaaatccgggagccagggaagagctgaatgcggcttccagcatatggctgacaaaagcacaatatcagtatctcctcagaatggaaaatactctccagcctgagtcgaggatatccctgctcctggaactggtatcaaatgccgaacatcacggctttatggagcgccttgtaaacatcccatagccagtatttcccggccttcgggccgggcttttttcaattcaagagaatattccggagtgaagcctgcacgaagccatccccaccatggactccccctgtcttttgatggaaccgtgtatttcttaatggcgaaagaaataaaaggcttcaccccagagtattgattcgttttatcaaaggccgg

SEQ ID NO: 253 - DNA, 2951 bp, Escherichia coli
gaccacacaatatggattttttatcgattccagccgctgtactggctgtaaaacctgcgaactggcgtgcaaagattttaaagttggttacgtatcgtttaaaatcaattagatagcccgtcatttctgcgctcacacgtcccaacattgaaaaacatgcaaagctttgtaagccgatgcaaagctttgtgtgtctcacttttgtcccaataccaatccgaatccaccctttgtcatcattgagaaatggcaaggaagaaaaggatgttactgcacgatttgacaaatccgccagagctatcgcatactgaccgcactacaacgtcagcggtcaaccgcacccgatagctttgcggcttttttatgcctgtttacaggtatcgccatatcaatggcgggtcgagagagcctaatacaataccctttcgggaaatacgctccgccgtctgacgcggtagttgaagcccgcccccccccactaaggtggcagtcaatactaaaacgtcaggagtcataattatgactaatcaactcattcccgttttcgatggaaccatcaacaacgaaccagttttactttgcaatgctcgcaatctgcacgcttttcttggtattggtaaaatgtttgctcactggatcaaggacaggctgggtgaatatggattcgttgaaaatcaagattttgtgattgcttgccaaaattggcaagcaaaaggtagaggcggtcacaaccgcaaggaataccacctcaccctcgacacagccaaagagcttgcgatggttgaacgtaacgaaaaaggccgccagatacgccgctacttcatcgagtgcgaaaagaaacttcgcaacattcagccagtacaagcagaaccacagccgcaattcacagccgaggaaatcatcctcctttgctacatgcagctctggatggaaaaagcccaacaactcagtaaacagctataccccgtcatgagagaactgaactctgattactatggaaagctgtttgatctggcctacgaaactcgtcatataaccaaccggactcgcgacacattgctccgcgaagcagcaaaacttgatcccgccaactatacggtgcacagggccagaagtatgctggcgcaactaagagcaagacaatttgaattctgaaaccaaaggagcttcggctccttttttcatgcctgaaggaaaggaaaatggcagatatcatcgacaatgccgctgaaatcgaagaattgcagcgcaatctctccctgcaaaaatacaaatccgatagtaatgccccatctgctactcattgttgcgagtgtggcgatccgatagatgagcggcgacgccaggctgttcgcggatgccgaacttgcgccagttgccagcaggatattgaacttatcaacaaacagagaggtgtgaagtgagcatagacaccactataacgatcgatacggccctcaacacaggtctggcgcttcttggttatttttacattatgttctgcgccgggcggtggctatcgctgttgttactgaaaaaatggaataaatgccgtaagcaggatcaacgccagaaggcaatgaatgcgttttccgaagccttcgggattgacagcatggagccaggaggtccagctcgcgtaattagcagaggtgacgttgtaattcttgtataccggagcgaagagaaaaatgagcgagattaactatcaggtactgcgtgaaaaggcagaaaaagcaacgcgtggtgagtggtcgctcgaatatggagagaaccgatttgatggtgatgatgcactaattcatcgcgaggctgctggatatattcccatttgcagaattgaaggagcacatcctgaaagcggtttcgatgaagatttccaaatggaacagcaggccaatgctgaattcatcgccgcagccaatccggctaccgtgctggcactgctgaatgaacgggaaagaaaccagcaatacatcaaacgccgcgaccaggagaacgaggaaattgctcttacggttgggaagctgcgtgttgagcttgaggaagtaaaacaacacgctgaagaattatccgaaaccaaggctgttcgtaaccaatggcggccagatatttgcccaataaccggacgtacatttttcatgtggattgagcatccaacattgggaaatgtgccgacatgtggtggcccattagatagttacaccattccaacaaaggacggtgacggtgagttttcatgtgagcgttacgatcatgattttggcggttgggtagaaagcgaatgtcttgggttatatctgattgatgatagagaacaatgcagggtctacgaactggaggaacgcgttaaagagctggaaacgcgggaagttcatttgccgactcgctacggccttcgatatggacatccgataaatgatgatgagcgccacgtcatgatacctaaagaaaatggcagttggctttacctgattgacctagaacacgcattacgcgtcgctggcattcgcatcaaaggagagtgatatggcattaacacaccgcgaactctgtcagattgcgtacaagttccttaagcgcaacgggttcaaggtttgttttcatgaccgctttatagctgtaaccagtaccggagaacagccagatgctatgggattcagaaattcagcatcatgcctgatagaggcgaagtgttctcgtgctgacttgttggcagatagaaaaaagcgtttccgtaaaaatccctcacttggcatgggcgactggcgattctttattagtgagccggaaattatttcagttgaggatttacctcccggctggggattacttcacgttgttaacggaagagtacggaaagtacatggatggcccaggggtaattgctgttggggtaatcctgacgataagccatttactgggaataagcaggttgaatgcgattacat

SEQ ID NO: 254 - DNA, 1708 bp, Escherichia coli
tgcatgacaagtcatcgggcattatctgaacataaaacactatcaataagttggagtcattaccgaagacgcaaaaaaataatataataacaaaaatcctccagccttgtaggccagaggataaaatacttaattgaggaaaatatcagggaaaagtatttctgatttaactttcccggctggagagtgaatcaatgtaatcagcgtaccattgcatcatttcacggcggccatcgagatacagggcatgattataggtacccctgatggaatttttatccacatgagctaactgcatttcaatccaggcggaattaaagccttgttcatgcagaattgtactcatggtgtgtctgaaaccgtgccctgtgagtcttcccttatatccaagtaattcaattacttggttaatgctttccttactaattggtttgcggggatcatttctaccgataaagactaggggatgatgttttgagattggttcaagctgcttaaatagcataatgacctgctcagagagcggcacaatatgaggtcgcttcatcttcattacttctgccgggatctcccacaattttgtctcaaaatcgatatcttcccagcgtgcaaaacgcagttcttgtgttcgtacgccggttaacataatgatctgagtagctgtcttagtgattatacttccggtataacccgccagatcgttgaggaagtggggaagttcattagcagtaagaaagggaaaatgtacttttttcggtgtagctaaagcactggcaagatcgggggctgggttatagtctgcccggccagtaacaattgcatagcggaacacctcaccacagcgctggcggaccttgcgcattttctccagagctccacgtttttccattttacgtagtgcttccagtaactccattggtttgatttcggcaatagggcgcttgccaatgtagggaaaaatgtctttttcaaaggtatcaatgatttcatcacgatagcgtaatgaccaccgatcagcttttgactggtgccattcgcgagcaatagcctcgaacgtatttttcagactcatttgctgcgcgattttttcttccttttttgcctcccctggatcgcctccagcagcgaggagtttcctggcttcactgcgtttctcgcgagcatcggctaacgttacatcggggtatacgccaatagaaagcatcttttctttaccagcaaagcggtacttcatgcgccagtatttagaaccattagtgttaatcagtagatacataccgccgccatcagcaagcttatagggtttgtctttgggttttgcggttttcactttgatatcggttaatgccatgacatcctccggctttgatgaattcatcttcctgagggggatttctgccagtaactaacctgatacccccaatacaccccttgtataacaaagatattgttaaaagccgttgttatgtatcatatttttcctattatgggggtgcttgtatttcaataggaaataacaccccctaaagtaccccccaaaagaaacttgatatggggtgaagtaggttgacctcaggatacaaataaatactgatatacaagggattagaagagatttattgacattgggagagttcagaagaggtaaactggcggaagatcacaggagtcgaacctgcccgggaccgctggcggccccaactggatt

SEQ ID NO: 255 - DNA, 1788 bp, Escherichia coli
cgattccttataaggaattatttgcttctttttccaacttcaggtgttatagatatctcataataacaatttcagactattatgtgatattgtaacgtatattgtattcctgttatgactgcattcatcgccatgtgaagtaatatgggcattaacaggccattcgactttatttttgcactgataagaactaacgatatcagaaagagcatcaaaaatgtacgaaagtcagtatattgtagatgtaatgcagaaaatatgactgatgttacaatagcagagatgtaaatattgtcattaaaccagaatttaaaagagttaaaaagacaccctcgaaatacaatctcttcatatacaggaacaagaagtacggaagaaaatatattaatccataaaatggtcccggaaaaagacatttgcgagatcatccattcttcagttttcctcactgccagcagataagggacaaataactgaataatcattattaaagagaaaagagtaaaaaaacatccagtcgaaaagaacctcttcctaatccttctctttttcggaagaaaataaaatacagtggaacaagaattagaaattcagcaagaaataatgctggaacaagaagtcccctggatataagttcctgcctgtttgtaaggaatgcaggaataaaggtaatagaaaatgataaggtaaacattgaaaagcagccgactgatgactgtttttttatagttgcatttttattttttgttatttccatttatattcccttacttgtcgtttaaaattcttctatataacaggaagaggtaaccatagaatgaacgtttattttcctgtatcagaacagccataacttttattttatagttgttatcagtgaatgaatgcaaactaatagaacaatgagaaaaacaatggagaaaaagcgacggaccggacgccatagttcatattctcgtgtatcagcctcacgtatcaacctttctgaaatggtttcggtttcttttcctcgcaccagaatatgtctgtaatatttcctcatgacatataccgaaaactgaaaccagattaatatggatggacacacaacacataaacttctgatgatatcacccgggaaagtatcttgggcgggtaaaagaaagtcatatactctggataaattatcatcgagataaatgagacgccagcacctatccagtattcgatatgagaagatgctgcattatatgcgtcagtaaaatttttctttcttaatgaaggtggaagtgctgaaagttcaggaatgcgttttcttgtccagtatattttcatatagtaactcatataaaaagtgttctactttactatgatgatgacgatttataaaaggcttataatgactacttctcctttcattctcgaatttcacgataatgatagagataatcattatcaattgatagtgtcagtaattttgacttacatcacactttcatggtttaatcaggtgattgatttaatgaaaagagtgtgtttgtggatgtattgtgtatatgtcttaccgggcatctgttcttacattaattaatatattgctatttaagtattggtagtattgtcagtaacattcttttggttaatttagttattattcctcactgattaattgtccttccgttcttattgtttgtaacttatgtttgtatcgtacctttcaggtgttgatgcgcgctttactgtgtctgcaccggcttgacaaaattcaacagggttgaaaaggaacatttcgtgcaaataaccgaagcc

SEQ ID NO: 256 - DNA, 1186 bp, Escherichia coli
aagcaatcattctgggtgaagtatatcggcacaatggcgcctggaagcttcgtgcgctagggcagggtttcaacggtggacttgagcctttggccattaactatggcgttgatgtcgcacagccagctccgcagccagcaaagcctgctcgtatcagtctggaaaagaaactggaaacccgatctccgcgccttgtaagcctcgctaaaaaagcctcggtcagtctcactaaaaataaactggacacccttgaggctgcggttgcgttcgtacttgacgcatccggctcgatgagtggccagttcagtaagggtaacgttcagtctgtgctggaccgcatcgccgttcttgccgcccagttcgacgacgacggtgaaatggatgtctggggatttggagagaagcataagaagtatccaaacgtcactctggacaatctggacacgtatattcagtcgattcgaggggctggtaagcgttcatcctgggagaacctgccgggccttggggggacaaacaacgagcctcctgtgatggaagaaatagtcgactactttaaggactcgaaaatcccggtatatgttgtatttattaccgatggcgggatcagcaagacccgggcgattaaagatgcaatccggcgttctgccaactaccccatcttctggaagtttgtcggcctgggtggttcaagctacggtatcctcaaaaatctggatgactttactgaccgccgggttgataacacccacttctttgccatggatgatttcggttcgattagcgatgaaaagttatatgataatttactggaagaattcagaccgtggatcgatgaaacaaaaaggttaggcatcctttaatacatatagttagagcatgggtgaatgagctctacagcagcttaatactgtagagcctttcttcattaaaaggtaaacgtaaaccgaccgccatatgtagccrgggggggccattagacaagaattggtaacttagacgcccatctgacacagacggacatctaagtatggaattacaggactggcgaaaagaacctcgtaaaaagtattcgaatgaattcaaacttcgtatggttgaactggcatcacaacccggtgcttgtgttgcacagattgcacgtgaaaatggcgtcaatgataatgttattttcaaatggctcagg

SEQ ID NO: 257 - DNA, 1175 bp, Escherichia coli
tgtgacgcccatggatgcgggagctccggtggtggttcgggctttttaaactgtaatcttgcccgtgcagctatctcctcggcggtcggtccgacatcaggctctggctgagtcatccagaatactgtgcctgcgccggctgctactaaaaacagtacggcaggcagtgtgaatttgctgcgattgccgacagtaagtttgcaacggcggaggtctgctgatgataaccgggtaataatactttcccagttatcaggatgttccagagacgatacaacctgccatttttcggggggctcttcgttcatcgccagaaaaaggctgaccttttgggcaacatcggcatcatttcctgataagtcagccataacggcaggctggccattaatggaagcaaggaataagagctccttatcgctgtaccggaagacaccgtatccatttctgacccatgagcagaaagccagtgccagggaaaaataatgattgcgttctggcctggtcagtattcctgtgccggtaaggcggctgatctttccacgggaatttctgctgcctacagtcactttcagggaggtaagccgtctgggttttacatgatacttgtgtttatgatgtgaggggacgcgctgtttttttacgacaggagtccatttaagacaggcagcccacacgcgatgatttactttaggatctgcgagaagcactaccgggttgatatcttcatcagccattattgcctcctgacgggaaagtcggggtaatgatgatcacaagcgtgctgcgttcatttttcccggtttgtgaaccaccaaataatggatttgctggcgtaaatgtaccggctttacttgtcgtcgtattgttctgatcgaaaccagtaacgacaagtgattgcccttctttcagattgaccttctggctcagtgaacgcagtttggtatatggcatttcgatgtaactgtttccgtcttttgacgtaaagctacggatagttgggggatcagacagattaaagttcatctgcaactggagattgcctgttttctgaattaaaggcagcagggtcatattgaatccagtggtgatcatgcccggtgttaatgttgttgttgctcctacatccgtagtcgtagttgttgctgactgggcgacgtaaactgtctgatctgcca

SEQ ID NO: 258 - DNA, 3128 bp, Escherichia coli
tgggataagccaagttcatttttctttttttcataaatagctttaaggcgacgtgcgtcctcaagctgctcttgtgttaatggtttcttttttgcgctcatacgttaaatctatcaccgcaagggataaatatctaacaccgtgcgtgttgactattttacctctagcggtgataatggttgcatgtactaaggaggttgtatggaacaacgcataaccctgaaagattatgcaatacgctttgggcaaaccaagacggctaaagatctcggcgtatatcaaagcgcgattaacaaggccattcatgcaggccgaaagatttttttaactataaacgctgatggaagcgtttatgcggaagaaataaagcccttcccaagtaacaaaaaaaacaactgcataagtaacaccgctcttttcacaatggacattcgtcctacgtcgctgacaaagcgagtcccaatatatctgaccaactaaggccatatgcgtttccacgcatacctttcaactaactattcactattggaaatcttaagaaatggaacaaacaagttacagcaaactatcacagcgcgatatcgatcgcgctgaaacggatttacttatcaacctgtcagctctgacgcaaaggggactggcgaagatgattggctgtcatgaatcgaaggtcagtcgtaccgactggcgatacatcgcggcgattttatgcgcgtttcagatggcatctgatatcagtccgatcagccgggctttccagcatgccattaacgttcatgcaaataaaaaacgtccggttggggccggacgttctgagcaaatcctgatgaatatctgatattcaggcagggcatggagcaatacacgggaataattctgccacatctggaagaatttcgccagcaacaacaccaaccgcagcagcctgaagccgattgggttaacccggagataccgggaccgtctgtgaagatgtgcagtcacaccaatgtgcagtcacaccaaccgcagcagcctgaagccgattgggttaacccgggagataccgggaccgtctgcggtatggagtaaatcttgtatgcgaggggactatgcgtaattacgcaacaatttcacctcagttctggttaggcgaaacagggagaaaactaaggaagtctggtccggaatgtatggtagtggcgttgtatatgatgacctcgcctcattccaatatgctgggcctttattacctgcctgttttgtacattgctcacgaaaccggacttgatcctgaaggggcttctaaggggcttcaaatggcttgcgaggctggtttttgcagctatgaccatgattctgaggttgtatgggtgcatgaaatggcagcatggcaggttggtgaatcgctgaaacctggcgataaccgttgtgctggggtaagaaatgaatattccgcgttgctggaaaatccttttttatcatccttttatgatagatataaggatgatttccacctggatgtcagacgtgaatcatgtcggaaaattgaagccccttcagagcccctttcaagccaagaacaagaacaggaacaggaacaggaaagagataaaacccttctggtccatggcgaaaaaatcgccacggacccacagggggattcttgccccgttctgactgagcgtccaggaccaactggcacgacaccggaagcagattccgggcgttgtgtgcagcaggtgctgatcgtcgaaccggagcaacagcaccaaccgcagcagcctgatgccgattccgcgatgagcgggaagccgattgggttaacccgggagatgccgggaccgtctgcgggacgagttgattatcctgacgtgttcgaacgggtctggcgtgaatatccgcatcgggcagggtcaaacccgaagaaatccgcgttcaatgcctggagggccagattacgcgaaggggtgtcaccggatgtcgtgctggatggcgtgaggcgttacgcaagatacctggaggctaccgggaaagcgggaactgaatttgttcagcaggcatcgacgttttttggcccgaacaggaatttcgaaaatccgtggtcgctgccgaaggctggcgcagtcagcctgcgttgcgtgaatcacatttctgaaccggacaccgaaattccgccgggtttcagggggtaatcagccatgaaaaacatttcgactggagggattcttgaacgggtgcgccgtctggcaccaccgcacgtggcagcaccgttccggacgaccgacgaatggcgggaatggcaactggctgagggccgtaagcgcagcgaggaaattaaccgcctgaatcatcaggcgcgggttgaaaaaatcctgaaccgtgcgggcatccagccgcttcacaggaagtgctcattcgggaactaccgggtgcagaacgacggtcagcgccatgctctgagccaggcgaaatccattgtcgatgaattgatgaccagttatacaaacttcgtgttcagcgggaatccgggaaccggaaaaaatcatctggcggcggctgtgggtaatcgtctgctgaaggccggtaaatccgtgatagtggtcaccgtggcggatgtgatgagcgcgttacatgccagctatgacgacggactgtcaggggaaaaatttttgcgtgaactgtgcgaagtggacctcctggttcttgacgaaattggcatccagcgtgagacgaaaaacgagcaggtggtactgcaccagattgttgaccgccggacggcatcactgcgcagtgtcgggatgctgacaaacctgaatcatgccgcaatgagcacgcttcttggtgagaggattatggaccggatgaccatgaacggtggtcgttgggtgaattttaactgggagagctggcggtcaaacgttggacgtcagggtatgtgagaatttttgacgaggtaaattttcgatggaaaccgtattgcatgcactgaaagcgatgggaaaagccaattctgttgaactggcggcgcggcttgatatcagccgtgaagaagttctcaacgaactgtgggagctcaaaaaatggcgttgttgataaaacgggtcacacctggtttctggctgtcgaaggtgaagcggggtaaccga

SEQ ID NO: 259 - DNA, 5196 bp, Escherichia coli
gccagtctccgccgaacccgctggcgcggtttcgggctgccgctacggtccgatgtctgaaaaaccaggcttgcagcgaccgttccggtcgcgccgcccctgtcgcgccggaaacggcgctccctgcacacctgacggtgtgtaaggccactgcgcctgatggcgcagtcaacccttccgccgccacccctgcggcctgtttcccgctgtggactttccgggggctggagtaaccacatcccgtttcagcagtccaggggaagatataccgtccacaaaatttttagccataaacccggcaaaaaattttgcgtccgcccccggacagctgccccgtgacgtggtgacggacgccccatcggaaaggtccactgcggggagaaaccccgaagaagtggacggcagaaggggctttcgcccctccggggagcaaccggtcggcccggcgacctgattcagcagaaggagacgttttcatgactgtcagcagcacgatttccgttttttgccgcgacggggtgttccgtaccgtttactgccacctgcacggtgagccgacctggaacggtcgcatcctgcatacccactatgccaccggtcagcaggccgaagccctggttgaacacggtgatatccgttgcctcggtccccgttgcgacaaacccgccgggcatacgcttcagaacccggtggacggtgtgacggcttattacggacgtgacagtggtttccggatggacagtgaggcgcgtgagtaccgttctttcatggagctattgccactgaaagcactgaagaggtgcgcttccattatgtgttcatcgacggctactggaaggtgatgtaccgcacgccggaaggctggaagatgaaagcgctcgcgctggcactgcgtcgctgtccgaaatgaaaaaaaggcagggcgataaaccctgcctctctccgccggcgcttccccgccaggaagtccggcatctcaatcactatctatggagattatgccatgaaaccatcaattatcttcgcaaccgccgagtatgtaaagcgtctgcgtgaagagtgcctgcgggagaataaacccctgcaccgccatacccgcttcagacgccaggagctggcacaggatgagattaacccggacgtcctggcgatgagcggtcatatcgccagacgctgcagtgagcagaagcgggtacgtatccccgccatgaaagtcagcgaatggggccacctgctccgcgcgcttgaaattgaacgggtctgtcactgattaacccctgccgtctgcctgtgcaggtggcaggatgtgttcaggtactttaccaggaggaaccgtgagcaagatgaaaaacatcacgacgtctgtgttgcatggtgtctccacaaaaaacagaaaagggaaacagattctctttcattcagggcccgggagggctggagataacaatgaagtcttgttttgatactgacaaagcttttcatatgtcttttgatgaagtcactttcaacgctgacagaattcgctcaaaactggaactattatccgaagaactaatgccccgttgtggtcttgtttatgagctatatcagcgacgtttgagtgctgctattgataattttgtggccacattgccgacagaacaacatctactggtcctggaactggcccgtgaggagtttgattacctttccgcagaagagattgctgaagaaatacgccgtgactcagaacgcggctattgttgtcatggctttgaacgcaattgctgtcctctcggttgtggggattttggcgatgattgctgcgatgctgctgatttgatggaggaaccgtgagtaagaagaaaaacaccacgacgcccacgccgcatgatgccgcgttccggtcgttcctggcgaatcccgacgtcgccagagattttctggaactgcatcttcctgcggagtaccggcagttgtgcgacctgtccacgctgaagctggaacccgccacctttgtagagccggacctgcatcagtacgccagcgatatcctctggagcgtgaaaaccaccgggagtaaagacggctatgtttatacgctcatcgagcaccagagcaccgaaaatctgtacatgcctttccgcatgttacgttacagtgtggcggcgatgcagagacatctggagcagcacaaaacgttgccactggtgattccggtgctgttctatcatggtgagcgcagcccgtatccgtacagcatgaactggctggactgttttgagaatccggcgcttgcggctaaaatatacacaaagccgtttccgctggttgatatcactgtcgttgatgacaatgaaatcatgaaccatcgccggatggccgcactgacgctgctgatgaagcatatccgccatcgtgacatgatggagctgctggacaaactcccgcaggtcatggtggaaatttcagacgagcaggtgcgtgttctgattcattacatcgttaacgcaggggactctgtatcaccggaatttatgcgggcgctggctgagcgtctgccgcagcatgaggataaactgatgactatcgcagaacgtcttgagcaaaaaggtcgccaggaaggcaggatggaaggacgcatggaaggagcgcttgaaaaagccctggctattgcgtgccagcttcagaaaatggggatgacgccggagcagattaagcaggctaccggactttccgatgacgaactgaagaaaatcattcactgatgagaacctcacagcccggcaaaataccgggccttttgccagcaggagcagagaaaacagtatgacgattgcagaacgtcttatacagaaaggtttcgacgaaggtttcgacgaaggttttaaagaaggttttaagaaaggtgcgcttgaagtggcgcgggaagcagcctgccggctgcgggatatgggctggacgccggaacggattcaggaggcagccggactttccggtgaagaactgaaaaaactgtttcctgatgagcagtagcctggcattctgccaggctgtgaatcacgctcacacatcctctgccgtttcccccagttcattttccagacgcctgatgatatctgccttgcgcatcccctgcatgtgaggcagcaggtcacggactgaaagtgcctgggtggtcctccagacggtgacgtccacctgttccgcattttcccaggcgtgccatgttctctgcgtcacgccaaattctctggccgctttttcgcgtgaccagagcatgctttttcgccagattcgcagttcccagccagtcataaaacacctttgaaaaagtgaaaaaacttcactttattttatcatcacaattgccaaatcagcgcgataaataagtgaaaaaaagtgaagaaatttcactttttttggttgtaaatgtcgtgcggttttctctgttttcacctgtgcgggagtggtgtgccagtgaccaccacatgccattgttgtgccgtcgtttttcttcagtcgcgccggatgcggcgctccctgcacaccttacggtgtgtaaggccactgcgcctgatggcgcagctgtctctgcctgtctgccgccgcactgcggcctgttctccgcagacggactttccggggtacatacacgaccacatcccgtttcagtcatccaggggagagatgtaccagccacaaaactttttgccgcaggcgtcaaaaacttttgcgtctgcccccggacaactgccccgtgacgtggtgagcgtcccccgtcggaaaggtccactgcggggaaatccccgaagacccggacggcagaaggagcttcgctcctccgggaaatgacctggctgacccggcagtcgtgacgatgaggagacaatgtgatgaatcagactttacccactgctgacctgaatactgccggcacgacagatgttattccgtctgtggccatcgaccgcatcatcgcgcagcgtaacgaaggtattgcactgttcatgcaggcgatggaatgcctggcgacagcgcgcaggattctgctcgatgcgtcaggtgatatttttctttacgggtttgaagactgcgtgactgattccgttcgtcgcatggataaaccggaagaagcgaaaaggaatatcacccgtcttgccgaccggaaaatctgggaccgcctgatgacagatacgggcatgtacaccttcatgagttcatgccagcgtgatgagtggaacagccagctgatgagcgacacctgtcctgaaatcaccctggacaatgtactggcaacattccgccatcttaatgccagcaagatgcagacgtttgaacaggggctgattgatgtctaccggaaattgtcatgggattacagaaccaataatccctgccgcctgggtaagaaaatcattattgaaaacctgctgtaccgctggagtaacgggcgtgtgacgctagactgcagcggacgggaggcactggatgacctggtacgtccgttttatctgctggaggggcgcaacgttcctgacttcaggaacagcatcggggcgcagtatggtgaatttctcgggaacggcgacaatgtcggtaagctgttagaaggggaatattttacggtgcgtggctaccagaaagggaccgtacacattgtctttaagcgttctgaccttgttgaaaaactgaatgatattattgcacggcattatcctggtgcattgccgccacgagtctgattaaacagaaaagccctggtatttatgccgggctttttttttctgtaatcatcataatctcagaacacgatgtgacattgtcacatcaattgttgttcatatcgatgccatctttcctgcctgaatctgtctttttaggtgctgttttagaggaagaacggcgggatggttttttcgattctgcttcccgaataatgtcacgaagtgccttctctcctacttcataccctgcatttttgagcgtgtcacgaacatctgccagtgtataaccctttgtccttaccaggacaataatgtcatcacgaatggcatcaagaaaatcacgcaatgttttccgttgagcggtgagatccggcaattccgataaggcagcttttgccagctggatgtcatcatctgagtaaaattttttagaagccattggcactttctctccgtttcatgttgaagtctgattttatcatcaaaactg

SEQ ID NO: 260 - DNA, 2830 bp, Escherichia coli
gccagtcgccgccagcgtattcataaatacggcggaaactgacttccgggccaagatctttaaagttgttgctcaccacttgaaagcgtgagcttaactcattctaattcaattacttatgctttctttgcatcctcaaaaacctcagggtgggacaaatttgggacatcgtcacccaatatgtcgtcaattttcctcgcgtgctctgtcaaatgattaggtgcaaggtgtgcgtacctacgcaccatttcgatagactcccagccgcccatttcctgaagtactgacagtggtacacctgactgaattaaccaactggcccaggtatggcggaggtcatgaaaacggaaattttcaattcctgcccgacgacatgctgttaaccacgatgtgttatagtccaggcgcatctttctgatgcttggtgtcattgtcccgtcaggccttctggcagcagtggtataaacaaacacccagcggtgatgtttgcctatttgatcacgcaacaccttgcaggcagtgtcattcagtgcgaccccaatagcgcggtttgacttactgtcttcagggtttacccaggcaacacgtcgctgcatatcgatttgttgccactccagattaataatgtttgatctcctcaggccagttgccagtgcaaatttaactacagatttcaggggatcagaacatgcatcaatgagtctcctggcttcttctttttccagccatctcacgcgtttgttttttacggcaggtattttgattacaggtgctttttcaagccatttccagtctcgctctgcggcgcgcagaatagccttgatcattgccaggtgtgttgcttttgtttgcgtgctcaccgatttaggtatataggctggtggttctttcccttttcttaatgcagcctccacctgcaacttccatctctcctttgtttttcggttatacgctttgctgataactgagtagatcattgcctccgatatatccttaatccttattccctcgaaatgctcaatccagaatgcgattctggatttatcggaatcgatggatttcttgtcggctttttcctcaagccatctcaggcaggcttcttcgaaagtgacatctggcatatcccccagtctgtctactcgccagagttctgcttttcgcttgtcgtgcaactcctgagcttgccgcttgtcctttgtgccaagagactccttaattcgcttcccgcccgggagcgagtacgaggcgtaccatatttcacctctgcggaagagtgacattttctttcctctgttatgccatcacccgcgctcacctggacagtatgcagcggtgaatgaagtgctgcaatgcaggcttgccgggttgtgagataaggtgatcttttaccggaagaattttttcgggttgcctgtagtcggcccgttcgtatccagttaacagctgttggccttgatatcttgagaaacttacaggcctctttgagggtgatactgtgtgaatccatatttttgccattaaaaaccgcccgaaggcggttgtcagttgattgatgtacgtcgcatttttcgaaggctggcaatatgcatttccttctcaatttccgctttaatcatgtgtagttcgttgtggtcgactcgctcaaattcttcattaaatgcaccaattgaagtggctcgggttctgccgtcgagtcttcggtagatcacctgagtaagagttaccttgcagatttccaccggatagttgttggcatcgacgaaagattgcccgcgctggatcaggacgaacaccggtagaattccttaactgtcatatcattttcacctcgttgctacggctatcgccattgctccccaaatacaaaactaatttcagccagtgcttcgtccatttttcgatgaactccggcaccatctcgtcaaaaccagccatgtatttttcatcccgctcgaccacgacataatgcaggccttcacgcttcatgcgcgggtcatagttggcaaagtaccaggcatcttttcgagtcacccacatgctgaattgcacctgggccatgtaagctgattttatggcctcgaaaccaccgagccggaatttcatgaaatcccgggaggtaaacggacatttcagctcaaggccgttgccgtcactgcataaaccgtcgggagagcaggctgtacgcatactttcgtcgcgatagataatcggggattcagtaacattcacgccggaggtgaactcaaacaggactctggcgtcgttctcgtattgttttccccaggccagtgctttggcattaacttccggagccacaccggtgcaaacctcagcaagcagggtgtggaagtaggacattttcatgtcaggccatttctttcctgagcggggttttgctatcacgttgtgaacttctgaagcggtgatgacgccgagccgtaatttgtgccacgcatcatccccctgttcgacagctctcacgtcgatccctgtacgttgcaggataatgtccggtgtcatgctgctaccttctgctctgtgactttctgtttcaggaatccaagaaccttcacagcttcagcctgtgttagttctgaagatgtgtaaatgttgcggcgaaaaatctgggaacagagcggcaacaggtcgtcatcccacgttttttccatggaagtaagaagggcgttaatttccgacatggtttcttcgttaaccggggtgatgtcgcgttccggctgacgttctgtagtatatgcagtattttcgacaatacgctcggcttcatccttgtcatagatgccagcaaatccgaaggccaggcgagcacact

SEQ ID NO: 261 - DNA, 963 bp, Escherichia coli
cagcggtaaaaaataaaatactgcggtcggaatacacgctaacgtcaccataccacgatgataagcattcatatcacgaatattaaaaagcgtttcatcgaatttctttattaattcccgcgcctccgggagcaacctttttcctgcttttgttaacgtaaccttgcgagttgtacgctcaaaatagttgaatatgtaaatcttcctccatcttttttattcttcgcgttaatgcaggttgcgtaatattgagtaatttagcggcattgttaaatgaactggactctgccagtatgacaaatgccttcatacttgataattcatgcttcattattactccggaaaatggaagcgacgattttgggtggctggtcgttaaaaattttaactgcatttagccaacttaaattaatgaaaaaatgttattaatcgttgagctaaagtcattagagatgctttgtccttaatgtaaccatatcgcaataagttatgtttttaaattgagggcattattatgaaaaaaataccctgcgtgatgatgcgaggtggaacctcgaggggcgcgttcttgttagcggaacatttacccgaagatcaaacgcagcgcgataaaatattgatggcaattatgggttccggtaacgatctggaaattgacggtattggcggcggtaatccgctgaccagtaaagtcgccattattagccgttccagcgatccgcgtgctgatgtcgattatctgtttgctcaagttattgtccatgagcaacgtgtcgataccacgcctaattgtggcaatatgctgtctggtgttggggcattcgccattgaaaatggtttgattgcagcgacttcaccagttacccgcgtacgtatccgcaacgtcaatactggtacgttcatcgaagctgatgtgcaaacgccaaatggtgttgtcgagtacgagggtagtgccagaattga

SEQ ID NO: 262 - DNA, 1067 bp, Escherichia coli
cctttaggtccctgcggtcctgccgggcctgcggctcccgtatcccctttaggtccctgtggcccggttgcgccggtggctcctttctcaccctttgccccagcagcgccagtatccccctttggtccctgggggccgggatcacctttcggtccctgaacgcccctcggcccagccggacctgctggccccgagtcccctttatctcctttcggaccgggaacaccacctcctgctgcagcctcttctgcctttgttttcgcttcatttgccacatccattgccgctttcaccgctttcggggtggctgccttcgcttcatcatcactgtccgttgcgctgcttaactgcacaattcccttctgtgccgtcgtcgcatcagccacatttgcagcgctgcctgccggacctggctctccacgaggtccctgaggtccggtctctcctcgttcgcctctcggacctgcaggacctggttcacctcgggggccagtctccccacgctcacctcgtgctcccatcggtccctgtggtccggcttctcctcgttcacctttaggaccttgcgggcctgcaggacctcccggatcacctttctcgccttttggccccatatccccctggtcccctttaggcccccgctctccggtatcccccttcaggcctggtattccctgcggtcctcgctccccctgttcgcccttctcaccacgcggaccagcgggccctacagccccctgagcaccaacgtcaccacgctcacctttcggccctgcgggcccttgagggcccactggacctgtttcgcctttaggaccgacatcccccttcggaccagtttctccctgaggccccgggcccgtgcattctcagccatacgtctggcctcttcagcactgacagtggcagcctctgcccgcttaaggatctctccggcgctctcctgcgccagcctggccttttcagcatgctgtctggctttttctgcatcagctccggcggctttttcagactctccggcacgggtcgagctttcctctgcattccccgctgctgtgactgcacgg

SEQ ID NO: 263 - DNA, 1578 bp, Escherichia coli
tgccatgctgttcggcgagctgtatcgccacaatggtgagtggaaattccgcgcagtaggccagggttatgctggtggtctggcatctgtatgtgctcagtacggcattaacgcgtcctgatcgaaaagtaacttttcatatctggggctgttaattcagcctcattcaactgtttgcaggagctaaaaatggcagtttctctcgtaaaaggcggcaacgtatctctgaccaaagaagcaccaaccatgaatgtcgctatggttggcctgggctgggatgcccgtgtaaccgatggtcagggttttgatctggacgcttccgtattcgcagtaggtgaagacggtaaagtactgtcagatgcccatttcattttcttcaataataaaaccagccctgatggcgcagtagagcaccagggcgacaaccgtaccggtgaaggcgacggcgacgatgagcaggtcaaaatcgatctgaccaaagtctcagcagacatcaaaaaactggtatttgctgttaccatctatgatgcagaagcgcgtaaacaaaacttcggcatggtgagcaacagcttcatgcgcgtttacaacaacgacaacgggacggaaattgcccgtttcgatctgtctgaagacgcctcaaccgaaaccgcaatggtcttcggtgaactgtatcgccatggtactgagtggaagtttaaagctgttggccagggttttgccggtggtctgtcagcgcttgcttcccagcacggcgtcaatgtctaaaagacgctgagtctgaccccggcaatgccggggttttttttgggtatcgatccgctatcaacgggtgaatatgggaaaggggggcggggggggcagaaagcagagctatgttaattctggcatgaaccttttatgcaggccccgggtttatctgtggttgctggttaaagccagtattccgtgtctgatatcaacagcatgcccttcggatatatgttacttttgcgacttatgaaggaacgggccctggaaaataagatacccggtcaatgaaaattccaattcaacaggtatagaaacttcagcgttatgaaaaatggtgtcataccatatttacgcctcaccgaatatccagcgtccagaactaagcctagggaacatatataaacgctgcgcattaataataatcaaaaatcaggagagttaatatgaatttacaatccggacaaaacataccccttcagcaatctacgatcaggctgaatcttcagtaccctgccaaatccggctttaaaggcgaacccgatacctgcctgttcatgcttaatgctcagggaaaggtcagtggcgattctgactttatcttttataataatttgtcttctcctgagggggcagtcaggctcgttaccggttcgcagcaggccagcattgagatagcactggatcgtgttccggcgaacgtcagtaaaattgcgatcaccgttgtcattgatggtgaagataccatcagtgggctcagtttattgagcattcaggctcctggtatcgctgatttccaggctgagactgccaaggcacacagggatagsw

SEQ ID NO: 264 - DNA, 1002 bp, Escherichia coli
atgcttttttataaaacaatgtcaatatcaataggtgaaaacacatgaaaacattaaaaaatatgagaagaaagaatctatacattactttgggtttagttagtcttctatctgggggggctaacgctgcgtcacaacaaacaactcagacaatccgcctcaccgttacaaatgattgtcctgttactataactacaactcctccacaaactgttggtgtatcgtcaacaacaccaataggattttccgcaaaagtaacgacaagtgatcaatgtattaaagccggtgcaaaggtctggttatggggaacaggtcccgctaataagtgggtcctacagcatgctaaagttgcaaaacaaaaatacacattgaatccatctatagatggaggtgcagattttgtgaaccaaggaactgatgcaaaaatttataaaaattgacaagcgggaacaaatttctgaacgcaagtgtttcagtcaaccctaaaactcaagtattaataccaggcgaatatacaatgatactccatgctgcagttgatttttaaaatatagcatgcttccgatcattgattggcatcctgccagtcactctgggaattaactcttttcaccacagtctccattgccgtgtttaaaccagtggagacgtcaatgtccagaaagagaaaatccaggagcactatggaaaccagttttaagatccttcagctcaagttcgacaagaagctgactaaccgttgtatcggactgacgttacacatcagcgcctcaaccgtttttgaggttcttgctcgcttcaaagcctcttctctgtcatggccattacctgctgatatatcccatgacacgctggagaaactcatttttccgcccaaagacacctttgcatcagagcttgtaatgcctgacatgttgtacttctgtcaacgacggatgaaaagtggttcttccgcaacctgggtggagattttcatgccagtggactcattaccctctgcct

SEQ ID NO: 265 - DNA, 1724 bp, Escherichia coli
aaccgacctcaccagtcggtttttttacatctgttgtttctcaaaatccgcccgacatgcccgtcacaccggggaaactcatgctttgaatcagaaccaaccatctcaactttgccgtctcctgaaaaaactggcacattcagttcgataactacccataaatacagagagaaaatccgatgtcagaaaagtggagtaaagaattcgactcttgctttcaggtggggagcatagaagaaattgccgatgctctcgagaaacgcagcggaagcgaggaaaacgcgttagccatgctggcaatgacagccttcacactcatgacccgacgtggtatctgcgaaatgcagaacgtggccccgatggcaaaggcattcggctggagctaatcggcttcagggaaaatgaaacaataccggatacgcttcattgaagaagaaagggcgcaatgaggtcagccttcgcaacaaagcggcggcagaaaacctgccgccgtgttgcccgttaacgtttaacttcgtaggctaacgttgccacaagcactgtgtttccctgctggagccggagtccgcaaagcgaatccctcaccatccagacaaaacacagaatcgtcacacagacgacgattaacatcattaaaaacgttcgctgtggcatcatagcccctccattgccttacggcggttatcgggctactataatgttgtcgaagcattacagtagagcccttggttgattgataaaaaaatctccaggggctttctgctgtataccgtccacaaaacgctttcggcatacagcctcaagcgcccgcagctattctaacgactttcgtatctgtaacaatccttttattatttgaatgattcagcgttgtttttgaagttaacaaccaacccaatacatggttctctacttcacaacaacgcatgttatgctgattttagttaataaaagaatccccttaggagatggaaatgtcgcagttaaaacaacctattttcctgaaaaagataaaaaaagtcatcaacacaatccctgggcttgaagagcaaatctttgcatgccgaaataaaaaacgcagcgacaatccattattatttatcgacagaaaagatgaagaacgcatactaatgagtcgtctccagagccaacaaaaaatgaagaactggcttctaaactagaatctttatttcatggaaacgaattatcgtcaccacacagtattttgtgttttatatactggcgctatacaaagaaaatttatcgcctaagcgaggacattatcagtgatgtggctaacacctatgttgataacattcctgcacagatcctcaaggaactcccttcatggagtatctatgtttcagccgaaaatctgcatactatacttcctacgtcctacccgatacatggatttttcttttatccatttttggacaataatggaaatattatccggcttttcattattgatgatctgaaacaaagtcaaggaactacagggctaaaagaaaaggatgttgacgtcgtcaataatatcatcagaataaaggactctcgtgaaggacttcttgactccagaaagatggagtgtatcgatggtgaagtcgtcgtaacagttaacgaaaagctcaaagatttcagagacagggagtttaatcttcttaacgcacagatatcaatggtgctttatatctgttcacagatcaatgatataaaagaaa

SEQ ID NO: 266 - DNA, 1331 bp, Escherichia coli
ggtaaacgtgtcagggaaaatcttggtgtccctgacactgccaagaacaggaagatcgccggggaactgcggacatcagtatgttttgccatccgcacaggaagctttgattatgctgcacagttccctgactcccccaaccttcaggcttttggggtaagtaaaaaagaaattacggtgaaggaacttgaagaaaagtggctggatctgaaacgaatggaaatctctgcaaatgcattcaatcgctatgaatccgttgcaagaacgatggttccgaaaattggaggcagtagactggtgtcatcggtaaccaaagaggaattgctgtatatcaggaaagatttgctgaccgggtatcagaattcaatgaaaaacaaagcagcaaaaggacggagcgttgttactgtaaattattacatgacgacaatcgctggaatgtttcagtttgctgcagatcacggttacttagaagcaaatcccttccaaggaattaagcctcttaaaagagccagggcagagccagatccgctaactcgtgacgaatttattcgcctgatagatgcttgccgacatcagcagacgaaaaacctgtggtcattggctgtgtacacaggaatgcgtcacggtgaactggtctccctggcctgggaagatatcgatctgaaggcaggaacaattaccatcaggcgcaattatacgaaacttggtgagttcactctaccgaaaactgaagcaagcacaaacagggttgtgcaccttatccagcccgctatcagtgtcctgaaaaatcaggctgaaatgacaagactgggtaagcagtacaacatcaaggtgcaactacgtgaatatggacgttcagtgaaccatgaatgtactttcgtgtttaaccctcaagtggttagaaaaagcgaacaggtaggttttgtctacaaagtcgattctgtaggtgactcatgggaaacagccattaagcgtgcagggatcaggcatcgaaaggcataccagtcacgacacacttatgcgtgctggtcattatctgccggagcaaacccaagcttcattgccagccagatgggccatgcaagtgcccagatggtattcaatgtatacggagcatggatgactgacagcaatgcagaacagatcgcaatgctgaatcagaagctgacagattatgtcccaatgatgccccatagtcaccaaagtgacaccagaggcttattaaaatcagtaagttaatccttaatacccgtcatgttaactgcgtggagggcaacaccacgctttacgccctgccgaaacccgaggttgtcctgcgctggcgtgaacag

SEQ ID NO: 267 - DNA, 1027 bp, Escherichia coli
gaagagatccttcacgcgttatgatttacatcggtctaccgcaatggtcgcatcctaaatgggtgcggttgggaatcaccagccttgaagagtatgcccgccactttaactgcgtgatacggaatttttaaaaatcactaaagaacgcccaagagcatgttttttatttagaagaatcaaagcgttgtatttccatgtcatataaaaatcggcaaagttcatatgtaacaaagtgtcccaatcatgccccaaaatgccccacaacaaatatttttgccccatgcatgccccaaaaaatcactttccttcacccttaacactgtttatccatacagttaaaaatgatactgtatacaaacacagtgtagagggacttttatgcgtattgaaatctgcatagccaaagaaaaatgactaaaatgccaaccggtgctgtggatgcgttaaaggaagaattaacccgacgcatcagtaaacgttatgacgatgtagaggtgatcgtaaaagctaccagcaacgatggcctttctgttacgcgcaccgccgataaagattcagctaaaacttttgttcaggaaactctgaaagatacctgggagtctgctgacgagtggtttgttcactaattagcacgtaaaatctgtaacggctggaaatcattcaatactcgcactatcggaagttcaccagccagccgcggtacgttcttacatacgatgtaccgctgttctctttacgatttatagctgtactggtgaattatgagcaatctgaatccatgcatgacgtgtggtgcctgttgtgcattttccgcgtctctttttactgggcagacgctgacgatgctggcggaaaggttccggtcagtcgctctggcgggaactccgggtgaaaacgcatattgctctgtttacaaaaaccgtccgtccacatgcagggaattcgcaatgtccggagaaaatggcatcgcgaatgaagcatgtaaccgcgcacgggaaaaatatggatttcccaaaatctgaatatt

SEQ ID NO: 268 - DNA, 3143 bp, Escherichia coli
caactgcaggaaccagtagcccgttcccaccgctgacgtggtgtatgacacacctgttgtgattttttccatctggtacataccccgtctcccgcaatccggaagctcacaacaatataaagaccaccggcacacaccgatggtcccttgcgcatgcttacatcatcatgtcgctgtcaggtgtaggttcaccgccatctgaagcactcccgtcacccgcgataccttccggctcaggaaccgctggtacgcccagcagctcatccagaatggcatccacttctgcatcaagacgcgactcaaggttctggcgaagtttctgtttcagtgcgctccggacttcttcagagcgcaggacttccttcactgcctctgcagtgaccagggatgtgatttctgacatgggattttctcgctgaaaggggttgttaaggagtaacgggctcttcgggtttgcttccggctgactgactggcgctgattttctcagcggcccttttatcaatctgcctgcaccagaaatcgcgcacagccctgtacccacccgaaagaagatacagcacacagaccgccgtacagaagtacagcatcacctgatgaataaatgtcataatttcttaccgttatggttgacaatgagaattgttttcatttaaaaaccaatgtacgaaagcatcttttctttacattctccattgggattacctccgccagcttccattcctgccgctggcggctttttttagcaattatgcggctgctccagctttgtttgctttaacttccaccgtatcaataagtacagggtaggtttctgcactacctgtaatatccgtaatgacaaacctgttgagtccattagcagtattggcccatttcaccaggtcaaacgcctgtccatccacaccatcgagcaccggagtaacattaatgctgttactgcccttaaatttaaatgcaagcgtatgccagtcatggtcgaatgcgccaaacgtgccaagttctttttgttgattaactgtatgatggtatgcaacattaatactggctttatctgtctggacaaagaaagaactcagatggccttcaccaccctcacccggccattccgctattcgccagtacaaaccaaaggcatacttgtttctggttgtctcaagattgacgttttcggggattttaaaccggacagcaatttccccgcctttttccagtaaaagttttgccttgtctgcagcaatatcacagtacattgaccaggatttcgcgctgttatttttctcaattcgcagagctttattgccgctgtcatcaaccagtgtgcgcctgccatacacaccgtcccagccatagggtttcagctgattgtctgtagctttttggcatcgtaaaaaattacagactctgaggtggtaaccggtctgtctggaacaaccaccccggcagtaccattaacaaacgcagaagacttacccgcgcagctcagaatcgcagttgccagacggtcggaaataatcccacggcgagcccatgaactgaaatggctcgccctgtcctgtgacgtccaggtggctgagctgtcacgccatttcgaaccgtaatatccgatacccggaatgtccgggtcttcttccggtttgttcgtcggcacattcaccccgttctcatccgtcatgaacggtacgaaatggatattcttttccgttttgtttttgtagctgccgtacaccgtctggtacgtggattcgttcttctgcttccagaaatacgtcgtgtccccgcatatccagggaacaccgccagcagagccaccgacgcactggcctgccatatccgccaggtctgcacggaatttatcaaccagcgcaccaaactgtgcggcatgatttgccggcgtaccgccaaaatcaaattccccctgcatccacaccacggcaaacagcacatttttcgggttcttctccagtgccgcttttgttcgaccgataaggtccttatacagcggcttgtccacaccccagcgggttgaattctccgaggcgccactcgcgtcactgtatgtgccatcagctccggtggtgaacgctgaaccaccacgacagcacggaaccagcagaatgcccgcattcgccggtataaacggcagcaattttttggcgatatgcagcccttgccccacggttccgtactgcccctttgacaggtccgctttcggatggttaaggcggctcatgtcctgcacatcatgcagacaatggtccgccggaatgatgtcgttatacttacaggcggcacctcccggtgtcaccgtactgcgacgcgctaactgtttaattcgtggatcaggactgtcgaatgtatccggtaatggcagtccctcaccgtatgacataccattggactgaccagcaagcgcgatcacatagtaatattctggcgcaacagaaggcgctgaggtcgtcggacggttgcctggctcctctggtgatgagatgctcccctcactcacaactggctggatgaactccgcaccataaccagctgtcgaaatcagcgcactaccataaggctgccacccttccttcagtttttgagttattcgttccgcaaggtctgacggcgacgccgccctgaccacgtcatagtgtttaaatgccatgaatcctcccggtcgggataatgtgtgagtcagatgaggagcgggctgaagtccggaagttacaggacaatggcagaaggaagactacagcccgaaatacgaaaaaggccgcgcagttgcgcagccttatgaatcctggttaaaatgctttcgattattaaaacgagtatctcatgcaattgcccgaacccactcgggcttttttacatgtaaaaaggcccctgctatgagaggccttggtatatgcctaatctctgtatactgcatggtgccgggtgcctcccggtgagttcggcctggtaccaccgaacccgtgtcgataatgaatcacaagcaaggatttttcaccagtcgcccctccacacagggggattcaccatgcgaaattttttaacaaatgctcagtctgacaggcaactgtcaactgactgaattgtgacacagattacacttgttacccacataccacgaatcaggttatgcc

SEQ ID NO: 269 - DNA, 1179 bp, Escherichia coli
tggtggaactggcatcacaacctggagcttgtgttgcacagattgcacgtgaaaatggcgtcaatgataatgttattttcaaatggctcaggctctggcagaacgaagggcgtgtttcgcggtgtcttccaataacgacctcttctgacactggcgttgaattattacctgtagagataacgcctgatgagccgaaagaaccgatgtcgactcttcccctgcttttatccactccttcacagagcacagccagtgccagttcctgtaaagtggaattccactacgataaaaacgacgctgaaaaatccttcaccagagctgctcacagtgttgctccgtgaactgagcgggaggggacaatgatctcactcccgtcaggtacccgcatctggctcgttgccgacgttaccgatatgcgtaaatccttcaacggatacgacatatgctgaaggaggatcagtaatggattaagtgataacaaatacccagaaatagaggttcaaatcctgcttagttagtacataaatactattttgatgaaaattattatatgtcacctcggattttaatcaggcgcccagattaaatcaagtattgagcgcctgattatgtttattcgttaatatctgtcattgattgtcttattatcagctacccccgtattaatcagagttttcatttatttttaatgcataatcagatgccgcctcatcattatcctcagtattatcatagccgaaaacttcccccggcacgggcgttcacgataatagtcatcgtcatagttttcatcgtcagataatgatatgtcgtattctgaatatgattcactacagttatacataaaatcatctcctctgggatggttacaataattagtgagtttattcgaaaaaataatgagcgccagaccaatccacccgacttttgattataatcatgaagatacctgtctcagtacaaatagaatcaaactcagtgcagcatgattcacctttatattctctcagggaaaccaaataccactactcaactattaagaacaaaattctggaggtatgattatctgaagatacctgcaccctaaataatttcagacagatattatcgttgtgagtcccccgccacctttccggtgtgcggggttttgtctttttcaccgggaatacatgtatgaat

SEQ ID NO: 270 - DNA, 2670 bp, Escherichia coli
ctgtctttacggcgatcgcgataatcccagcctctcaactgcgatacagcagccctgtctccctgagcagcctgaatttcgacccactgacggtaagagggtggataccacttcccgtcagcaataagtttctgtcgctcatccctgatgtcttctttcagcctgatcaatgcctgcattcgctgaacttctgcaatgtgataatgcagcttacgtaatgccggatcatcgtactgcgcacgaatgtgtgacttccgcagacggcatgcctgatgaatttcccgacaacgttccccataacgcagatctggtttacgccattgttcacgccatgccagatagcgggcacgcaggtcagcacgggcctcagctctggcttcacgtcgctgccggcgcagcattgggtcacgtttactgctgaccccgtacctgtcactgacagccagctccgggttatagcgactttcaggttgcaccctgtcaaacaaatctgctggggcactcacaaaaggtccggcctgtggctctgcacgccccagtgtcagatcaggatgaatgctgctggccttcaccggcgtttgctcatgattaaaggcatcaacgacaacaagcccgtgatgttgtttctgtagcatcagtccctgttgtgcaaacagctcatgacaacgctgccaggtaaactcaccctgtgtgatcatttcttcaatctgagggctacaatggctgatgctgtatccccacagactttctttgtcagaaaacagttcgcgtttgatagccccctgcggccccgtgcctgtacgcatacggtgccattctttatcggtcgcaggacagctctccatacgacgaccacggaagcgttctgttggcgtaacctggcggaaaatatctgttggtacaggctgccagccaccatcgagttgattcacattgtcgagcgtcagcagcgaccatacgctgtcagcacgaacgggagtctggttatgatcataaccgtcacagataaccaggtgaccatgctgaacacgcatccataatcccgcttcagccagtgtgcggtgaatagcctggcagttttccagccgtccttcccgtgccatttccggcagacgttctccaaggtgacgacaggcatactgctgcagactttctgtttcagcgattttttccgggcgaacatcagcggcaatgaagtccggattatagcgtcctggtgcttccacctggctgaaaatgtcttttggtactggcgtgtagtcacccatttttttcatgagtttttctgcacaccaggagggaccaaacgagtcaagctgtacacctcccctgttgcgatcccagccatccatcaccagaaattttccgtccatctgagacaggtacagaccatcttccgcaagacgacgatgcagggataaccagtcatgtacaggttcactgcgtaaaccagcgaccgctgtctgcgcaacatactcgcgaaaagtttgtttttttccgcgtgtccaggcgttctggcgatcacgttcaacggcagttttgcgaacgatacgatttcccggcgcatggacccagcaaccgttatccggagcaaaaccatgcttcagttcaagctcacggcaggcacggctgagtttttcctgactccatgaaaggcaattgagataacctgtaaccggatgcacccggttgaccgcaacgtgaacatgcaggttatcagtatcggtatgcacggcagagacatactgatgttcacccagcccgagagatttcagggtatggcgtacactgtcataaatctgttccggacgcgggctttcatgggcctgccaggaaagaatgtagtgaaaaacaggatcagtattatctttcgcatagtgtgcctgctgtgcaatgtactccatatctgcagcggcagtttcaagcgatgtacagttgtgaaaacaggtcacaccataaaagttaacccattcgcagccgtccttcatgacatcaaccagcgccacgaatgactcatttcgaagacgtgtcgcataatcaacaagacgactgaagcggtttcggtgcggttgttcagcctgcgaagaagaagataaatccagttcctcatcggtcatgtcatcccggacagagacgtaggacaccaggtcttcgaacgaagacttgccgtcccttctctttttcggaatgactgcattcaccggagaatcctcaaccttccattaactgtttacgcaatgtatttgtaagttcggttatggcaacaagcacttctgcgtattccttgtcaccggttctttttccctgaacaaacagatgcttctgcatccttcccagtctcattaactccttcagaaaagcatcatctgtccgggagttaattcgcttattcagtgctgcatttcggatgtaagcagatacagtaagtccggaatcttcagcttttttcctgatggtttcatcctcaacaggagagaatctgagtgttctgacaactgtcttttgccgtacctcacttttctttcttactgcactatcactcacttcaggctccttacggggtgtcggggcgaagccctgaccagatggtaattgtaatagcgtcgcgtgtgacggtattacaattacacatcctgtcccgtttttcaggccattatagcctgttatttt

SEQ ID NO: 271 - DNA, 2306 bp, Escherichia coli
attttttggtttttaatatagtttcatatataatggagttcaaggtaataaatgaaagtagtttctgatagttttaatgacatgcataaacgtcgttattttaatgacacaatggatattattaattataatcgaaaaacaataaggtatactgacatcattttttactttaggactctaaaagaaattagattaaaatatccattcaaagaattagaatcattatttgagcctttgaatgtttaccctttttactattttatgccatttttatttataagtgatctccatgataaaggacagtatattgaaaggataagatacgtcggtattatatcaacgcttattgctcgaagagcaatcctcacagacctctttgtcgatgaacagtacgagcaactaatttcaagaaacatgggagatttaaagaaagaatatcttgggtattatttgcaaataatagatgtagaaattaataatattgcctcaaaaatatttatagagcctagtagtttctatgctttttataatcgtcgttttaacgagtatgttaacaccatgttaatggaaaaagatatttcaccattaataggcatggatgagggggcgtttaaaaagtacgcagttggaaaatctatactgcatttacttgttagcgatatggttcttcatattataaaaaaacaagagttaacacatcagtttgataatatgatgaaaagctttattatgtatcttacccttcaggatgatgttctcgatataatggaagacatacaaaagcagcaaccatcgcatttctatccttggatttctgatggtaagatcattgaaagtattgatgagaatgtggaaaaagctgtgctccttaagttttatctcggtggaggtattgaaagatgcgaggatctcattaataaatatgttgaagatatcattactgctgtaaaaaaataaatcatcctctaaaatcatggttagaagttattgaaagaatgtcattaaaaacaaaagacaaattggattcatttaaagcagttagagatgaattacatttttttctgtcacaacaggggtaatttatggagaatgttattttaattgaccataatgattgtgaaacggggattgccgaaaaattatatacccacaaaaaaggtattttacatcgggctgtttctgtttatatatgtaatagcgatggaaaattattgttacagcaaagagcacttggaaaatatcattctcccggcctttggagcaatacctcttgtacacatcccttcccgggagaatcgaatttatctgcagctaacagaagattaagggaggaaatggggatagaatgccccttatctaaactattaaagatctactataatgtttatgtcggcggtgatttaacagaacatgagattgcacatattttctatggtattagtgatgatgagccagatttaaatagtttggaagctatgagttataaatatgtttccttgacagagttaagttctgaaataaaattcaataacgatgctttttctcgttggttcgtctattgtttcccatatattaaaaatgctttcctgaatgagagtaattataccaatttattgatttagtatatgatggtgcatttgagggttatgtattcaatttgttgaattctatattctgcccgtgacggtaacacgaggtcttaaagctgtttacttggctccaaccgaagacgctgtccctcaggcgccggagacgttcagaggtgtatgggagccgcgttatccgcaggagcttcataaggtgatttatacgaccataccattgaatcgctgaacagtgtgatccgtcactcaatcaagaaacacagggtgttaccgacagatgagttagtaaaaagcggtgtcatcccggtagcgttacagaaatgggcaataccccttaaggaatgtcatcatggcgatgagccgctttattatcaagtttagtgattgccttgacggtcatttctaagaaaaggcatttacacagaatgataaataggctctattttattatcaatgacatccatagtgtcattataataacgacatttatgcatgccattgacattgtcagatactatatttatgaccaagaactccatgcaggtccattgctattgatatcctcctgagtctctcgcacaatatcttttattagacttaaatccatatctgaggctattttgattatattatcaaaatcagcattcattacatatgtaactatatcaatcattatacacctcctttttctaaatttttaca

SEQ ID NO: 272 - DNA, 1133 bp, Escherichia coli
agtccctgagactgccagcgttcaatcgtccgcgggtccacgttgaaaatttcggcaagcctctttttattaaccttcatgaaaacaacccattatcaaatacaaggcccgacatgaaaacgccagaaaaaggcattttcggacactttcatgtcggacctttacggatgtaatattaaaaaaaacaaaaagttatattcgagaagtaccgacacgattttccctgaaaaattttcataaatagtgaaaaaccgcgaggtcgccgccccgtaaccggtcggatcgccggaaaggacccacgaaatgataatgattatcatctatataaggtttatcacaacatgtgtgtacgccatcaaaccacgagaaataatcaattatgacgcaggtatcgtattaattgatctgcgtcaaattaacgtaaaagcaacttcagataatacaaatcagcaacactgaatatggggaaacgttatgtcatcaaagaacagaacccgcagaacaacaacccgcaacatccgatttccaaaccagatgattgaacaaattaacatcgctcttgatctgaaaggttcaggaaacttttcagcgtgggttattgaagcctgcagaagaaggctgtcaacagagagttcgggtatgaattacataattaagtaacatggtgttcacagaacacgcagttaccggacacatcagttttccattcgctccccggcagtacaggcttcccctctgacgggatagcctgaaaaaataacacagaaaattatttgttataattaatataacttactcaaaaaaaagcgacgagaaaatcagcatcaacgaacaataagcgccaatacgtgataacaaatggcagccatatttatctgcagtataagcaatggacaggataaccacaccagaaaccgtcagcataaaatccatttgaacttccccggacaaaatcgactcatctaaagatttacagctctttttattatcaatatgttaaaagtaaaataaacagatgttcaataacacgaatacaaaaacgtgctgaaattcaatgaatccatttctgtgtcatcaattaatagtgataaacatccggcttcttccaccatcgcaccggacaggcgactatg

SEQ ID NO: 273 - DNA, 1917 bp, Escherichia coli
cattcatgcagcgatgacacgatgtcactgacaggcgtaacaacgccccgacgctggctggtcagaatatcggtttccgctctgagtttatctctggcggcgttgattctttcccggtcagcacgaagttttggtgctgtctcagccaggacgtccagcgtcagcaatgagcgttcaattgactcgatacgggcaatattccggtcaagggcctgttcagctttgagtattttgtcgtaaagagcaacgcgggtttccacgtcagttgcctcttccaggtcggcgaacatccctttaagtgccttagttactgaaagtgcgcgggcccgggtgaacaccagttcatcgaacagcaccatgtcggacgcatcatccatgaggttatctgcctcaagatacttcgcatatccacggtgtcttacggcgtgggtgtttcgctgagaaaaagcgtttgaaggtggtaaaagtcgggaaccacgaatccgtttcgtttctgccgaatttgcgcagtttttttcagagttttttgcgcatttttcatcgccggaacccgcgtcattgcagggttcttcatctgagatgtcatgatcgatttcatgatcggttttatgatcaatttcatgatcgattttgcccatttttatacgggttctggcggtgttgtaattaatctttttcttccggcaccagtccagtaatgttattcccgtttcggcatgttcgcgtcggaatgcctgctccagctttttccagtccagctttgccatgtcactttctgacgtcctgtgttaaaaactgatgcataatgaccgctgtgatttttcagatttcacacagcagcaccatatttgatcgatatttgcacaatgcggttgttttatccggtttcttccaccaccgcaccggacaggcggcttcgcgggaaatcgctcccatctcgtgaaaaatgagaaaacccggtgtgcatcgtttttgattatccccgcacactcacgcagataaggtggctgcagtctctgttaatgcgggaatacggcgacgatacggcgcatggctatgtcaggctgaaatgcctttatcaaatccgggtaacgcaatctgcccctgctgctccagcctgtccagccttgccagcaactgaggcttcttcaccctgccccagcgattgagcaaacgacctgacatactggcgacatctttctctttcatgtactccagcattacagcgttgcgctccgcctccagattcgccagaccttgctgaataagctcagccatccagttgaaagcctgaatgtacgcttccttaaaggtcatagcagccttccccgtaaaaccaaataccaacatcgtccaaccgtcttttgtcattcgatatatgggctggggtttaccgttctgtaactcattgttttcatagcaaagcgcaaaattgcgctctgcaaattcttttgagcattgttgaacaacggctcttgttttccgcaatacatctttgtgttctttgccaaatgctacggcaacctttcgggtatccgtcaccggctcgttgcctgtcacaaaaacaagatctcgaaaatcgatgccgttaacgatagttggataattcatcagtgcacaccttttagtgatgaaccttgtcacacaggattccggcccacagaaaggcaccgatcaccaaaccggcatcctcaagggtcatcctgaaaggttctgtgttcataagtcgcgcgtgtgaagcgcgtttactgcggacataaaaaagccccgtatcgcgaggctcattaaattgactttgtgatttgcaaaaaaattatttcaggcattgcgtcctgatgtattcctgcaggtagttaacctgcgcagttatcttgtcgattccacttctgagactgccaaggcacacagggatagaga

SEQ ID NO: 274 - DNA, 2319 bp, Escherichia coli
tcttctgccgtcgtgtgacgattcacttccggccatgcatacggcagatacgcttccgaaaacatcacttcattaccggcaaacccggcggcaataccattagccatcaggcaaaggcctgtcatattctctggcggcggcaggtaatcccatgtcgccagagaaggtccaaggtttttccccggtattttgtccgtgtaactgagcacggatgcatccagttcagccacaagtaaaaaatccgactcccctccacctgatgcagagcgataaatccggcgacgtttaatactggcattctgcaatggcaccggagccagcgccagttgtaccgcagttcccggagtacggagtgttacctccagagacgccggacctggcggaccttcttcaccataatctgagacaaaggtttccgtataaaaccgggtttcgtcatcattcgggttatcgtcagaaacatcaccgccctgctgaacagtacagacaggtgctgtcgtcggcgcgggatccccagacgatacgatgatgccggatgattcccgtccccttttgtggcaatggttgcatccgtcactttaggaaaacgcccgtcagtgtagtaaatacgcccgtgggggtcctgagcgatcggactgcggatcacatccactacatccgtccatgcaaaccagaaatcgtcacggtaatgaaaaatggttttcggcttaatcgcgaatgttttctcagcctctgacatctggtgttcaggcgtgatcactccatagcgaaaatgacagttttctgccagtacagcagaatgatctggcagcatagatgcaataacgcctggcatcatcccgcgcatagttgttatatcgatataaggcatggttgtctggtatccgaaaatttgaatggcaggtgagtcactgaattgaagttttaaaggcggcatacaattgcgcctgtgcagaatacagatttccagaaatcttgaaaaattacatcattattatcagcatccgtccggaaaaatttctctggcaacttaaaacaatatcctatatatccggcgtctccggtatgtagaacgtgaagtttttaaaattattcatttaccatttaactaatttttagatcctgggttactcccgtctttttcattgcctccacgaaagcggaactaacagaacctgaccagtaatactggaacccactaacaacgccctgataaatcatggtttgtgtagcaccacctacgtttacggtgatgttacctgctttaccaccggataaataaacagcagctgtcggtgtagagttcgtcaaaaagtgagaaagtgtaacgacagcccccaccagtctcccagaaccacagttttcagcgtttgtaattgtccctttgcttttttcttctaatggccaatcagctccaaccgccccccagttttcaacttgatccgaagagttccatttatagtaagcggtttctattttacaacccatagctcgccccaccatttgactcatcataaaaggtttatccaatcctagtttagtgccagcagcccccatccattgctcacctgtttcgctcttagccgaagaacctacccatcccgatgttatccccatttcatatatccttctgaaattcgtgaggtgagtatcatccccacaatttaaattcagtagaaaccagaaactacaacagctgtcgtttacttctcccggagttctttaatctcatgacgaagtgttttaaagccttcgactaacaatgcaattatgccgttgtagttaagacgcagacgtttttcaccagatataacgtctgcgtcttcagttaccagttcaggcaaggctttttgtgcatcctgagcaattaaaccaaccgacgtttgccaaccgtcggcagagtactgtatctcgtaaagataaccagtaagtgcctccagacgatctaacgcattatccagttttaccagatttcgcttgttgcgtttatccgagcggatctgaacatcgttaaatgatccgtttccgtttaccgtcaaatttccattaataccaccattaaaagtttgtgcctgagtccatgtattggcagtagtaagcagttctgttccttgcccgggggctccagtgtctcccttcggtccctgcggcccttccggacctgctggacctgctactcccggatcacctttatcgcctttcggccccggcgcacctgccggacctgctggtccagccacccccggatcgcctttgtcaccttttggtccctgtgcgcctgccgggcctgcagctcccgtatcccctttaggtccctgc

SEQ ID NO: 275 - DNA, 572 bp, Escherichia coli
ttaccgaataattctttcatctgacgaatgaattcttcgtctgaccagttatctgtaagctcatttcctgcgataccatggaaggttgatagctgatttcatcgctttatttgcttcaagccacatttttgaatcaccaataaatctggctattactgctttgttctgtgcagcacgaagcatctggtgattgatggctatttcattgcgcataataagacctcaactcttttccatccgtcacgtaatttacgggtgattcgttcaagtaaagattcatttaattggaaggcacccatgcgagcgcctcccgcgattgcgtaaatcatgggtggttccttatgttggttttattagtaggttatttttgttgcgaatacttcgccttttacgatggctgttatgatatttttagcaacatcttctgatgcaccaaccttgataaggtcagcaagtattttgttatttacttctttccggtgagctttatcctttgctctacgggtgatgctgccaacttactgatttagtgtatgatggtgtttttgaggtgctccagtggcttctgtttc

SEQ ID NO: 276 - DNA, 1158 bp, Escherichia coli
cctgtgtgcttggcagtctcaggagatcagcacggcagatgaaggggatggtggtcaggttgtggtaattgggcggtaatattattttactcatgttctaactgatttaatatttatatcgaacactgataattattctattggttagctatatgaacaaaacgattttattctgcacgattattgccttaacaggatgtaagtctttggattacgtaaaatccggaaaacctgtaatggaaggtaattcattaaaaaatattgatgaattgtcaggctgcatatccagacaatgggctggtaatggaacacctataacatcccttcctattgagaatggggtaagccttttagttccacaggctatggggggatatgatgttgtgcttgatatcaaaaaagcaggaaatggcagtagttttactctttatgaacgtgtaccagcattaacgccaaaaatttttgctgatagtgttaatgcatgtaaataatagttaatcctgtcgtaactcatgagccgccttttgggcggctttgttgtttatggagtgtgaggaatgggtaaaggaagcagtaaggggcataccccgcgcgaagcgagggacaacctgaagtccacgcagctgctgagtgtgatcgatgccatcagcgaagggccggttgaaggtccggtggatggattaaaaagcgtgctgctgaacagtacgccggtgctggacagtgaggggaataccaatatatccggcgtcacggtggtgttccggccggtgagcaggagcagacaccgccggagggatttgaatcctccggctccgagacggtgctcggtacagaagtgaaatatgacacgccgatcacccggaccatcacgtcggcaaacattgaccgtctgcgttttactttcggcgtgcaggcactggtggaaaccacctcaaagggggacaggaatccatcggaagtccgcctgctggttcagatacaacgtaacggtggctgggtgacggaaaaagacatcaccattaagggtaaaaccacttcacagtatctggcctcggtggtggtggataacctgccgccgcgcccgtttaatatccggatgcgcaggatgacgccggacagcaccacagaccagctgcagaacaaaacgctctggtcgtc

SEQ ID NO: 277 - DNA, 3309 bp, Escherichia coli
gtcactgctgttaatggctttcatcacgcctttaaacgcgtcgtaaacctcctgacgtaccggatattccgcatcaacatacctgccgtctttaaatacgcgcccggcacgctgtgcttccgtcatatagtcgccacctgacgtgatcttcccgtcagtggaaacatcataacgaccaaaataattatccagtgaatggaaccattcgtgggccagcgcccccggtccgttaccttttgtcaggttgattgccacctcacccggctcatagtgtgccgccgccttacccttaccacgggcaccaaaagcaagcccaagacgaccgttcagagaaagcgcttttgtcggcacgttcagcacgtcagccaggtcatgcagcgagtcataagcccggttcaaatcagcctgacgacgcggactttccacataattaccaaactgcacaccacgaaaaccaaacgcatcactgaactgctccggcgaaacatcccccttgcggcgttctggtccggtacgatcgcggttggtggcgttacgctgctcctcacgcgagacttcacgcagcgccttcacctgattaaccagctcatcacgatgtgtgcgcacataatcatgtgcatcacgggcagactcaaaaccgcccttcagtttctgcctgtttttgccataaccgataaaaatgtcgccactggccttatgccggtacacgtcaaaggttattctgtcatcagcagaggttgctggcgtttccctttctctggagccttgttcatcgaaatatgctttcgcctttttcagtaactcatcccggctttccgagaaaaagaggtcgcgccccttgctatcacgaagcgaatacatcatttgcggcggatcgtaacgttttcccccgacaaacgaataaacaccggacctgacacgatagccggatgctttatcaatctgcaatgcagaaagcgtacggagcagtttccaggtatccgacatgctccgtaaccccggcttactgtccatcatatcagccagtttcgctgccggaattttcccctccagcataccggcagtagcttcgcgaccgcttttaacaatgctgatccatttctgcatgttacggcttgttctggtgggaatttcactgcgatacaacgccatcattgccagcgtgtcactatccacaccttctttttccagacgggcataatccggctttggaaacagtttgctcagtggttgtgtcgcgtactccccatcctccagcgttttacccatagcttcagcaagctgcgcataacggtgttttgccgcgcccttaatctcctcgccaaagtcttcaattttcgcaccacgcacctgctggtgagtgctcggtttatctaccggcaccggcacctcagtatccggaacatcggttatggtctggcgattatccccggtctgtctgcgtgcttctgcctgctgtgccagttccggaagggagtcacgaaccatacgagggagtgattcaggctgtggcatatcaaccccacgctgactttcaggtgcaggaagtccttcacgcactggtgctgtggcgttctgctcatccggtgacggcagaccacgacgaactgtttcgccctccagtatttccccctggcgaccagcggcattttccggtgcctgctcacgtcctttctggaaactctggcccttcacctcaccggttgtggtaaaacgaccaccacgtccggcctgattttcatccggcgtacgcgccacttctcctggtaacggatatccctgtccgggatgaatatcgccgggagcgggaaggcgtggacgctcagttaactcctgtgctgtcggaccggcatcaccttcagccatctgggaacgcaccagttcttccgccgtcggcgcgttgccacgggcaagacgggcctgcacttctgtatcatcccccgtaaaaccacggaatcgcgggtcacgcatgaacgcgggctgttccatcggatcagcatcagtaatacgctctccgtcagccagagtgttaatggtctccgttgccacatcttcagagaacgcaggattatccatttcaacggcatactgattctcgcctttcttcactacggacggtttcaggccggtggcgctggcattgcggaaaacgtcgctccccagagcacttttttcatccgtgaaataacggttgtccggacgcaccttttcaatgcgttctgctggtctggacgcaccactctcgttaatttcaatacgaacttcatccggatcgcggaaccgcaccgtcgggtaaatactcccgtcgccatcatccgcattttccggctgtggctgtgcctccggtctggcctcccgctgagggcgaagcacatcacgtattgcctgtaactgctgctcttcagtatcagtacgcccttccttctggctgagttttcggtattcctcaagcagttcagggcgcggcttcgccttcagctcatccatcaccgcctgtcgcttcgcctgttcatccagttcattcaacagctggctggcggcttcccggcgatgaacggcagacgtgtctccctcatgtgccatatccgcatcagcatactgttccagaagctgctcgcgattcatcccctgcatagattcacgatgctgtgccaccggatcaaccggttcgggttgcggagccgattcgtcctgaggaacgctttcagcctcacgcatggctgcttcatctgccgcctgacgttttccacgatatccggcagccgcaccgaatggtgcccccattgcagcaccaagggctgcaccttcgatcgttgcgtcagccacgccctcccacggtgacacatccattccggcggtctcacgcaatgccgtgtttcctgatagcgtgaatagccaccctgcgccgcattaatcgtcccctgttccgtggcatttctgacaatgccgcttttaacggtcttcgccgtgcccgcatcgccagattaagcaactgagcatcgcccagttttgccgccatggcattcacagccagcaattcaggatcggttgccagttgcgcacgcacctcatcggcaacacgctcttttgccaggtccattttctggcggtcagtaagctgcgcgtgctgcggatctgcatcaattgacaaaaaggtctgctgaaatttcggtgacttcgccagctcagaataatccgcgttaagaacagcatctgccgctgccattgcactccgcccttgcgcactgacagtggaatgggtgatcaggcctgcctggaaaaatccggcatttttttatcgacagcttc

SEQ ID NO: 278 - DNA, 815 bp, Escherichia coli
actctccagcccctctccggaggggctgtttatattgattttgtcagatgtgagtaaactccttatggactttgttgttttagcccataaggacatatttgcagagtgcaacggttattaaagcattcattcaatacgttatctgtatttgtagggcattcctggctgtttttgattaaattccagaatgttttattgaatggtactacgttgtaaatggttacaggcagcactttgttattgagcatgatgcctgtgtgagtcagtgtaaatatactttcaggaggtaagaaagcatccgattgataccagattattaattttattttactccatatgactgaaaaagatattccgcatgatggctggataactgtatcaatcacaatccacttcatttagtttccttgtttatgccttgctggtgatgttctgaaaagtataaatgatatttttgattgtaaaccatagagcagaattatttttctgatgttgtttattgtttatttaaatgcagggtggtttatatctcgtcttgtagtttatccatgcatatctgcttgatgatgaggtttttaattaaggtatggttttgtgttttttctgtattacatgtcaggtattttaaagaatcatttttcagatggtggaaagaaccatggcatttaaacactatgatgttgtcagggcggcgtcgccgtcagatcttgcggaaaagctgacacataaactgaaagagggctggcagccgtttggtagtccggtggccataaccccttatacccgtgatgcaggcgattgcagcagaaggtgat

SEQ ID NO: 279 - DNA, 1519 bp, Escherichia coli
acagatgagtttatccgagaagttccatcattcaccgaaaaatctgccagttcggtgatgcttccatcgctgcatgctgccagtcgagaacttcgtcgcgccaaaaaacaggtccagaagtgggagcgagtctgcgccgcgctgcgggagctgaacaagcaccgggatattgttcgacagattgtcgattcatccggtcgtattgtgtcggaaaagtgattgccggaggcgcttatggcgaaaccttttacacacgaacagcgggaagaactgaaggcacgaattatcggattggtacgcaaaaatgaacgcatgacgatatcgcaactggagagagcgacgggagcaggctggcattcagtcagacgttgccttgtggatgtactggcttgtggcgatttatacatgtccggtaaatacggtgtttttgcatcagaacaggtgtatcgcgtatggcgtaagacaccggagaaaacaactgaccagacattgattcgaaagttaccagacggagaaattcgccgctacgatagacgcctgaacataatctgtcgcgagtgccggaatagtgaagttatgcagcgcgtgctggctttctatcaggggaattttcaggaggcggtactgtgagtaaattagctatcaggcttcaattgtcgctggcattcgcatcaaaggagaatgagatgaccacttttacaaaagagcagttaatcagtcatgttagtgaaaatgtaaaggcgatgaaatttgcagtaaaacagacagcattcaaaaattctctcgaggcaattgagttggatttagcactggcccttgttgctcaggcttcgctggaagcagagcccgtgctttatatgaatcgatttaccggaaagacattctcactggaagagcaacccggtgctgataaggaaccggaaatatacgtgccgctatatgctgccccgccagacagcgccgccatgcttcaggctggaaactttcgggaaaagaagggttcgtcaaccaataattttcgggaaatctcggaaacgtcaaccaaccatccggtaactctggatggttggataagctgtagtgagcgaatgccggatgacggtcagcacgtaattattttatgtgatggcgcattcgttctttatgcgcaatatcgagacggtgagttttttgatgtagtccgtgatggtgatgaatttttcgaaacacagagccgcaatgtaaccgactggatgccgctaccagaaccgccgcaggaggtgcgccaatgaactggcctgaagcatttgcaattacaggcgttgctatggctatcacttttttagtatatgttatttgtcggtgggggtaaaaacgttcgccgggattaacaccaaaggagggaatatgtcggatgatatatcactggcaatggaaggtgcgctggctgttattgctgttgtgggcgtttactgcctggttgtgtttttgatggatcgactagggaactgaattcattacgatatggaattcccatatc

SEQ ID NO: 280 - DNA, 1032 bp, Escherichia coli
gaaaaaatcggctcaaacatgaagaaatgaaatgactgagtcagccgagaagaatttccccgcttattcgcaccttccctaatatttctttttggagataattatgaacataatatattcgcttaaatacagttcattgactgatagactggacttgtcgctgtatctgaattaactagaagaatttcgagtaaaacaaaccgaaaacttgtagcaacaatgctgtctctgactgttgcaggtacagtaaatgcagcgaatattaatatatcaaatgtatgggcgagagactatcttgatcttgcacagaataaaggtatcttccagcccggagcaatagacgtaacaatcactttaaaaaacggagataagtccttttccataatctcttaattccgggtttttctggtgcagcagcgttctggcccctatttgaatatctccattgtgtcattattctatccttccgatatcttatcatgttataaatttcagaaaagagaacattgtattgggaggtattgatgaaggctggaaagaattttcattccttgtcgaaacaagcagcttctgcagagaagaatatggatcttgctcttgcttttgagctctggaaactggcctctttattctgtaagaaaatagagaacatagagtggtgcatgaatagagcaatgttttgcgaggcttatataagcagaaatcaggacggtcagaaactgtagtagtcaacaaaaactgtctagactggcctaatctcttattttaagatacatctactgtctggtatttcaggggaccagtctaaatagctgcgcggaatagtagatcactttgagggaactcagcccggattgtgcgatctgatcaatcacccaaaagaaaaaattaccaagcggactgagcgatgccgatcatagcaccaatccccagaaccgaacgatgcctgatgcagaaaactatcataaaacaaaggacaaaaawccacgcccgggctcaccgccatgctgatgctgcatcgtggtgacgccg

SEQ ID NO: 281 - DNA, 2191 bp, Escherichia coli
caactgcaggaaccagtagcccgttcccaccgctgacgtggtgtatgacacacctgttgtgattttttccatctggttcataccccgcctcccgcaatccggaagctcacaacaataaaaaagaccaccggcacacaccgatggtccctgacgcatgcttacatcatcatgtcgctgtccggtgtggggtcaccgctatctgaagcactcccctcacccgcgatgccttccggctccggagctgccggtgcgcccagcagttcatccagaatggcatccacttctgcatcaagacgcgcttccaggttatggcgaagtttctgtttcagtgcgctccggacttcttcagagcgcaggacttccttcactgcttcagcagtgaccagggatgtaatttctgacatgggattttctcgtcgaaagatgtgattaagaaagttgccgctaaatgagcggctcttcgggtttgcttccggctgactgactggcgctgattttctcagcggcccttttgtcaatctgtctgcgccagaagtcacgcatggccctgtacccacccgaaaggagatacagcacacagaccaccgtacagaagtacagcattaactggttcagaaatgtcataatttcttaccgttatggttgactaagtaaacagttttcatttaaaaatgccgatgacgaaagtggtagtatctttccttgattctccatgaatctcacaccgccagaggtctcaggcaactggcggcttttttatcatgccgcggcatccgcgttgttcacttccaccgcaatgctgtcaatcagcaccgggtaagtcgcattcctggtaatgtctgtcacatgcagtttatccgccgcaaatgcactgaccggtgactgcgtcagcgtgaacggtgtgccatcctgaccatcaataaccggcgtcacctgaaggctgttattcccggcaaagcggaaagccagcatatgccattcgttatcaaatgcgccaaaggttcccagtttcaggttgtttgtcgctactttcgcattgtggtacatcacattcaggtcttttgcatctgtctggatgtagaacgctgccagcaggttattccccccgtctccggtcagggcaacgccctgtggcagtgaagataccggccagtaaaacgccataacatactggttcgcagccagcgctcccgaaaccttaaagcggcagcgaatctgcccccctttctgtaacagagccgcaccgttgcccgcggcgtactccagcacccagctgcttttaccggcttccttggtcagcttcactgccttacctccggttccctccgcatcgctgaccacttctgccctgccgccactggctgaccatccctgtactttcaggcttccctctgactcgctggcaaggtaagagagcagtgttgtgacgcctgtggcttctgcaccggaaggcgatgacgggcgcacctctgatactgtcgatgatgcccccgcgtttagcgccactcttcccgcatggcgcaaaatcgccgttgccagacggtcggaaataatcccgcggcgagcccatgaactgaaatggctcgccctgtcctgtgacgtccaggtggctgagctgtcacgccatttcgaaccgtaataaccgatacccggaatgtccgggtcttcttccggtttgttcgtcggcacattcaccccgttctcatcggtcatgaacggtacgaaatggatattcttttccgttttatttttatagctgccgtacaccgtctggtacgtggattcgttcttctgcttccagaaatacgtcgtgtccccgcatatccagggaacaccgccagcagagccaccgacgcactgacctgccatatccgccaggtctgcacggaatttatcaaccagcgcaccaaactgtgctgcgtgatttaccggcgtaccgccaaaatcaaattccccctgcatccacaccacggcaaacagcacatttttcggattcttcttcagtgctgcttttgttcgaccgataaggtccttatacagcggcttgtccacaccccagcgggttgaattctccgaggcaccactcgcgtcactgtatgtgccatcggctccggtggtgaacgctgaaccaccacgacagcacggaaccagcagaatgcccgcattcgccggtataaacggcagcaatttt

SEQ ID NO: 282 - DNA, 553 bp, Escherichia coli
tgaacttcgctgccacactgtgcccccgaggtgaactgcgcacagagccccatcacttcaacaatcgttctgtccaccccggcaagggcagcatcaaaggaattctcaaaatcacgcataaacggccattccgctcctgaccatgtcttttgccactgaggggggcatcagaattactctgccagcatcaacatgctcaacaggctcacctgtttcatcgtcaacaccgcacaggtaaaaacacttcagaagcctgatacgttccagaataccaacgtcatcctcaccggtgtgcctgcatgcctgctcatgaacggtatcatcaacatctgcgatttcattttccgaggcgcaaacctcctcttcccactctgccacacgctgtgcgatatccgcagcactccccgacatatccgcctcgcgccccagcagaccagccagttcacaaagacgtttctgattttcttcttttgttgccatatccagctccctgtgaaaaaaacacgggggcatttacgccccgctcacggattatttcacctgtaccaccaca

SEQ ID NO: 283 - DNA, 899 bp, Escherichia coli
aaacactctccaggaaacccggggcggttcactggcacctggtggtctcagtccggaacaatttgaaaaccagaacctcgcttagacctgtgtccatattacgagggtgggatcaatcacaagaaatgtcattcccaaaacgctggataggaatccagcgtggagagttgaaattttagctagagctagatattatttaacccattcggttagagcactatatttttggactccaaccttatttgtcttgttaatgtcttggttcgtatttacaggtgtggagggggtaacaacccctttgaagttgcttgttgtgccgtccttataataaaataccccggagacagacaccccccttactttcccttcattaaggccttgcatacatactgggacaccgctgttataagtatactgtactccagacagttttatacattgggacgggtccacattatctgcgttccaaccgctaccacccgcaaaggcattcaggctgatacccaagatgccagaaaagataacaaacttaatttttttcatatgacttctctctagatattccccatgtatatagaggtatttttcacaataaataattacgagatttagaggttataattcagccaatgccgcccctccttttaggaggttagcataataaagagttgcggtcagataaaaaatagcaacatatatcgagtgttgctcgtttcgactgaggatatccatttctatttttatattattttataatacatgttaactatccatttgttattgtttgcattcttatttccataatattgaataataatttaacaatactaaggaaggtgcgaacaagttcctgatatgagatcatcatattcatccggagcgcatcccagagggacatc

SEQ ID NO: 284 - DNA, 899 bp, Escherichia coli
gggaggtgcttttagattctgagcggcgcggccttggccgctgcaagcgaaggcctctttgtatttattcacagtggtttcagagataaagactttccctgcggcgaagcaacgcaggggattaaataatggggttaagactatattgcaggtttgctgttttaggtttgcggcttcttaaagttctttgtttgcggatttatgtggataactgaaacaacgtggccacgttctgatgactgatgcgtggttttatgggcagatatgcccctctgaggggatttaaggtgattactgcggattttgggctgagtggaaccagcgccgaaagccccggaggggctggcgatgattcagtgctgaaggaatggtgctgtctagtgcggcggtggcgcagccagcgtcagttcaagctgacgcaactccctgatggccagtcgcttcagatggtcatcggaacaaaaataggcttcatccggcggcagacgcttcctgagatactctgccatctcatgaatctgctggtcggcaggcagtttcttcaggcgtctggcgcgcttactggctgccgctttttcacgacggtgtttcagtgcatcctggctgcgctgcagataccagcgttttctggccgcatgtacggagatatcttcatcctcacgcagaacaccttcccgaatgagctgctggcggatttcactttcacgcagtcgtttctgctgctgttcgtgaagttttaccatgtcgacgcccagcatctgccagcctgccggtgttatccagacgtaacgtggcagacgctggcgggtttcacggtcccacagggtttcctctgaaacacccagcacaccaaaacgtacctgttcggccagcaaacgggaaaggcgggagaccgtcac

SEQ ID NO: 285 - DNA, 917 bp, Escherichia coli
gaggtccagggcggccgtcttcacgttctgccttgcgcagatgagatagatctagcgtggactcaaggctctcgcgaatggctcgcgttggaaactttcattgacacttgaggggcaccgcagggaaattctcgtccttgcgagaaccggctatgtcgtgctgcgcatcgagcctgcgcccttggcttgtctcgcccctctccgcgtcgctacggggcttccagcgcctttccgacgctcaccgggctggttgccctcgccgctgggctggcggccgtctatggccctgcaaacgcgccagaaacgccgtcgaagccgtgtgcgagacaccgcggccgccggcgttgtggatacctcgcggaaaacttggccctcactgacagatgaggggcggacgttgacacttgaggggccgactcacccggcgcggcgttgacagatgaggggcaggctcgatttcggccggcgacgtggagctggccagcctcgcaaatcggcgaaaacgcctgattttacgcgagtttcccacagatgatgtggacaagcctggggataagtgccctgcggtattgacacttgaggggcgcgactactgacagatgaggggcgcgatccttgacacttgaggggcagagtgctgacagatgaggggcgcacctattgacatttgaggggctgtccacaggcagaaaatccagcatttgcaagggtttccgcccgtttttcggccaccgctaacctgtcttttaacctgcttttaaaccaatatttataaaccttgtttttaaccagggctgcgccctgtgcgcgtgaccgcgcacgccgaaggggggtgccccccataagcgctaacttaagggttgtggtattacgcctgatatgatttaacgtgccgatgaattactctcacgataact

SEQ ID NO: 286 - DNA, 776 bp, Escherichia coli
ccggaatggccttccaaccgagttgacgaactcctgccatggaacgtagtactcactaataaataagcgtcaatacggtgctccgttgacgcttacgactattactcctgaacaattcgaaattcagcagattaaaggtaagcgttaacggaggtaagcgtaaaccgactgccgtatgtagccattaagccagtattggtaacgtaggtgcccaccttttcaaatgatctgcgccccaaatcttggacatcctatgaaaaatgtttaagtcgatattgaaccggactcatgccatcgagtttctctttaatgcgatggtgattgtagtattcaatgtaatcaattatatcttgctttagatgatgtaacttattgtatttatttaggtagtaacattcttattttaaagtactaaaaagctttccattgctgcattatctaagcagttaccacgtcgggacatgctttgtgttatgccattatcactcaaccaacgttgccaacgaggcatctgatattgccacccctgatcactatgcaacaagggcttatcgtctttattgagttgttctaccgcatctaatagcatgctctttaccattgatgctaatgggcgctcagtaaggttatatgagactatttctccattatacaggtccatgattggtgataaatagagcttcctgccatcgaccttaaactctgtgacatctgttacccacttttgatttgggcggtcagcataaaattgtctcttcagtaaattattacaagtt

SEQ ID NO: 287 - DNA, 751 bp, Escherichia coli
catggtctgtttatcggacagatccgaatggttgagtaaataaggcttatcgctgcccccgcgaataagcgcaccgctcccggaacgcttacctccggaaacaaaaaaccccgtacgatgacggggttcagttgaagccagagttttcagagcgacatttcattcatccgctgttgtaacgtatacagcatctgttgctgaagaacgtcctgctcctgttccatattctgtacgccggtaatgatttctgccgtatgtgcctggttaagcgcatccacataacgctgcccctgtgtcagggcgacttcccgctgtgcactggcattatcccgttgtgcagctgcatgtgccctggcggcgtcagcttccagttttgccactctgccagccatctcgcgcatctggagttctgcctgttgttgctgaagtgcctgttgttgtgccgctacttcctgttcttccggcgtcatttcatccggtgattttggcgtccccagcgcagcacgaatacgctcaacaaactcctgtttctgcggcacatccagaagattaacccacaggtcgagcacaacagcctgcacctgaggcggcagcccctgaataacctctgacattctctgtgcaagctgtgccttaaacgccggtgtctgctgaacaggcgccagcgcaatatgtgtatttaaccttgaaatatcattggtcagttcaccattatcaccttcagcattgaggacaatggtctggcgacgct

SEQ ID NO: 288 - DNA, 567 bp, Escherichia coli
gcccaaagacgagtaatctgatctaactaaaaaggccgcttagcggccttttttctttcaataaccaattgatttataatgttttatatctcttcgttccacgatgtgtccacatttagtggggggaggggagtaagcccgctacattgtgggctttgtcttatagtctgatcactgtttcaagtcggtgaggacaccaaaaagaaaacccgcagtttttatgctgcgggtttgtttcatgtctgtgagatagagtgccttatcgaccttaccctggcaaccgattgacgggggattgctcccccgtcgcggtttccttactgcttacactgtaagaacgccgcaaactccgctccccagaagctcatccgtatttcgcacagtgaaccgtgcagcatccagatgatgaggattgccgtcacgcagaacgtgatggccgtaagcgatttttgcgacatagcacttgctccttttccggagaggcgctaacctttcacttgtcaaggtaatgcggttagggcctcggttaaacagagatgttttccggggcctttccacatctggcct

SEQ ID NO: 289 - DNA, 752 bp, Escherichia coli
gatgtattcatttctcctttgcgcccatctcagatggacctggatgttgtgcctcatacatgctccgtttttacagcagcaaaagattttaatgaggatgttcggggatatctcgttttaaacatgacgcccacaaatatgtttgttaatgaagccaatgaggcagctgaagtacttaaggattaccctgaaatgcatctggcaaactcccgggtatgtgatcgtaaagcacatcgagatgcttgggccgaatcaatgacaatttttgaaacgcaaaatgataaagcccagcaagaaatcgaagcgttagtgaaagaggttattctgtgagaaatagagcaaacacttcacctcgtgacgaggcagcatttattaacggtggcacggctggccttgataataccaaaagtcatcagataaatcatcggttgtaagcaaagcaaaaccagtgagtatttctttttttgaagaaaacctaaaagacattgatgcccttataacggctgagatggtttcaggtaaaggcagagtgaatcgttctgatgttgtcagggcggcggtagaagcacttaaaacactatcaaaaacagaggtatcacgattgatagcagaagtaaaacaaagataacaccttgagataacaagataacaagataacaagataacaccttgttatcttgttatcttgttatcttgtcatcttgttatcttgtcatcttgttatcttgtcatcttgttatcttgttatcggg

SEQ ID NO: 290 - DNA, 861 bp, Escherichia coli
acagtgccatatcaagcgacttctcctatcccctgggaacacatcaatctcaccggagaatatcgctggccaaagccttagcgtaggattccgccccttcccgcaaacgaccccaaacaggaaacgcagctgaaacgggaagctcaacacccactgacgcatgggttgttcaggcagtacttcatcaaccagcaaggcggcactttcggccatccgccgcgccccacagctcgggcagaaaccgcgacgcttacagctgaaagcgaccaggtgctcggcgtggcaagactcgcagcgaacccgtagaaagccatgctccagccgcccgcattggagaaattcttcaaattcccgttgcacatagcccggcaattcctttccctgctctgccataaggggtctgacgctcagtggaacgaaaactcacgttaagggattttggtcatgagattatcaaaaaggatcttcacctagatccttttaaattaaaaatgaagttttaaatcaatctaaagtatatatgagtaaacttggtctgacagttaccaatgcttaatcagtgaggcacctatctcagcgatctgtctatttcgttcatccatagttgcctgactccccgtcgtgtagataactacgatacgggagggcttaccatctggccccagtgctgcaatgataccgcgagacccacgctcaccggctccagatttatcagcaataaaccagccagccggaagggccgagcgcagaagtggtcctgcaactttatccgcctccatccagtctattaattgttgccgggaagctagagtaagtagttcgccagttaatagtttgcgcaacgttgttgccattgctgca

SEQ ID NO: 291 - DNA, 947 bp, Escherichia coli
ggccgcagagaaactacgtggggagcgtcagtattgccggcaggtgacgacatttgtacggacatccccctttgcagtaaaagaaccctgttacagcaatgccgctgtggaaaagcttccattgcccacacaggacagccgggacattattgccgccgcatgcagagccttaaaccatgtctggcgtgaagggtaccgctatatgaaggcaggagtcatgctggctgatttcacaccatcgggtatagcgcagccgggattatttgatgaaatccagccccgtaaaaacagtgaaaagttaatgaaaacactcgatgaactgaaccagtcgggaaaagggaaagtgtggtttgcggggcgaggaaccgcccctgaatggcaaatgaaacgggaaatgctttctcctgcgtataccaccagatggacagatttgccagtagcccagttatgaatatgtaatccacccataatattgttatcttgttatcttgttatcttgttatcttgttatcttgttgtcttgttatcttaattaatctataaatcaaatacttaacaacttactaagttgttaacataacaaaaataattgcatggttcgcgttcagatggcaatattaagttgttaacttaacagcttaatatgaggctataatgataatagtattaggtagtcaaaagggtggggtaggtaaaagtacactggcggtatctatagctgcgtatctgatgtcactaggcaatagagtgattattgtcgacgcagatgaccagaaatcagtattaacctggtacaacaatcgccctgaagatctccctcatattccggttacaggcgcgacaggtaacatcaaagccatgttaaaggaacacgaaaaatcctatgattttgttattgcagactgtgctggccgtgatagcgcagaaatgcgtagtggattgatggc

SEQ ID NO: 292 - DNA, 676 bp, Escherichia coli
gtagattataaattttatggtccgtgattgttcactcattctgaatgtcattatgcaagcctcacaatatagttaaatgcgatgttttttacggtgttttcttcgttacccgtagcgttaacggtgatggtgtgtccgtggggaccaataatgacagaatgggcatgagcaccaatgccgatagtgtggttatgggcaccgatatatacattgtgagcatgcccgcctgcgctcgacgtggtaccagtacctaacgcagcgttaaaaccggctgatacaccattccccgcgccagtgtgaccaacaggtatattgtgtgaatgatttccagcgctattcgtagtttttgtgccgtaatcaaatgaactggtcgttttagtaccgtaatcaaacgacgatgtggttttcgtccccaaatcagtactggatgcgctggcgctgtgggtgtgcgatttaatgccgtcctgttcctgagacaatacggcacgaccactggcaggtttgcccttgatagtccagccacgcatatcagggatcacgcctgacggataagcgactgcaagtttcgggtatgcagatttgtcaaaagtctgccctgcatcaggcataaccagacggaacggtatctgatggccacggaatcgtgcaccgactggataaactcttcaggaggatg

SEQ ID NO: 293 - DNA, 608 bp, Escherichia coli
ctgatattattaattttataatctctttttcgatgtcttgttttaattccatatcatccccacataaaacacaaagttaactctatcacttaacccattactggcccgctgccgcagatattcccgtggcgagcttcatggaaggagatcactcaataacgtccatcgagatcgggtaataaccctctgtgtcagcatagttgtcgcctcaattttttaaggagataacaatgctaggtgaactcaaagagaaaggactgatatggctttgccaccatactgctggtcacatcgtcagatagcccgtaagctgaagatagactagcccccagaatctccagacaaccaatatcacttaaataaggtaagcgtcaacggagcaccgtattgacgcttatttattagtgagtactacgttccatggcaagagatgatatgacctttatatactcactatagcattggtgggatattccagaggaggtcatcatgcattcggaaaatattgcggcttacgtcgggctggatgtgcataaagaaacgttggcggttgctattgctgcacctgaacggcttggcgaagttcgttattatggtacgattaacaa

SEQ ID NO: 294 - DNA, 1148 bp, Escherichia coli
aggaatatcgattatgtctgcaatcacagtctcccgtccggaagtggtcaacgggcatacggacgttatctgctccacctcagtcagccacattctggctgtgcgaaagactacactgctgcaaatcgacacacttatccggcaactggctgaaatctcatcaatgacagaaagtattggaggtaaaacttctctggactgggccatgaaacaggattttcgctgtggctgctggctcatggagaaaccggaaaccgcaatgaaagccatcacccgcaatcttgaccgcgaaatctggcgtgacctgatgcaacgttccgggatgctgtcattaatggatgcgcaggcccgtgatacatggtaccgctcactggagtacgataactttccggaaatcagtgaagcgaacatttggagcacatttgagcaactgcaccagaataaggatgaagtgtttgagcgaggagtgatcaacgtcttcagagggctgagctggaattacaaaaccaactccccctgtaaatttggcagtaaaattatcgtcaacaatctggtgaggggggaccggtggggattgcatcttatcaccgggcaacaggcagatcgactcgccgacctggaaagaatgctgtatctgttcagtggcaaaccaatccctgacaaccgggaaaatatcatcattcggctggatgatcacatccgctccgttcagggcaaagcgtgctatgaagatgagatgttcaacatcagatactttaagaagggctccgcacacatcacgttcaggaaaccagaactggttgatcggctaaatgatattattgccaggcactattcggaaatgttaccttcattataaagctctaagaatgaattcaattatgtattttagcttcattccctcacgcaaatttatttgggggttcttatgggggttattcatttatccaacacagattaatcatttaaaatcaatatattaatactcatattcgactcctgtgatcttccgccaaaatgcctctcctgacgttctccaaccccttgtaatactgtcaatccagatattttctactgctcaatattcaatcggcttcaggaatacctggtctaaggttttgtgatggacgatgagcggctgaagaatc

SEQ ID NO: 295 - DNA, 640 bp, Escherichia coli
atagagataacacgaggagtggttagaaatggctaaagttctggtgctttattattccatgtacggacatattgaaaccatgaagcattaaaaacacagaattaccgaagatcgtccaagagcatatacttttcaatatgttagacctcattttgaccataaagaaatcgattttacaccgttctttatacgttcttttttgccccaaatatgccccaaacaaccacactttgccccaatagcgccccaaagatttaaggggatttaagtatatatttcagataattaacgcaagtttacgatgtgaatttacgttaattttctgggtagggtatttaccgtcattcgttcatcaatatttctgcatattgacaaatacgcctgagctatcgcgggagaaatgcaatgaaagcagcaaaaggcgatgttaatcaccctgctcatctctgtattaccgtcattgtgacggcactgataacgaagaaagacctctgcaagggaggaatccctcgccacctctgatgtgtcaggtatcctcaccctccccaatcacattagccccgcacttccgtacggggccatttctgttaatccactcccacttttttgttgtactcgcggttaaaccgatccacggcaa

SEQ ID NO: 296 - DNA, 403 bp, Escherichia coli
cctttacgcgacattgatgttttcagaccaaactgctcctgtatgacccggtaatcgtatgcgcagtactgtgaacctcgatcttatcggctggtccatgcaatcccggatgacaaaggacattgtcctgaacgcactgctgatggctgtatggcggcgtaatcccgaaaaacagatgctggttcattcggatcagggcagtcagtacacaagcgtcggcatggttctagcgaacagatgtcaccgacagaatatgaaaaccagtattatcaacggctcggaagtgtctagattatccgtggcgattcaactgtaagcgtgcagcaagaaccgtattgacggggatgtgttattcagtcggcagtgctacgcgccaggggagcagttcgccgacccggtttat

SEQ ID NO: 297 - DNA, 370 bp, Escherichia coli
gggacggacgcggtgggcgttcagagtaaggaagcctgacggagattatccagtgacgataatcgaggctgaggctttcttaatctcgtatccgcgtctgcggtagttatgaattagccattcggcctgttcttcagtacatggtgggtgttggtaccagtcggttttaaatgcgtgtgaacgccgcccatgccggatggcaaggtcggtatcagaattgtgaaatttggttttgtgcgccatctgttttctctgctggcgcagcaggtgtcaggtgttcaggctgacgtgcgaattgtaaaccagaatgccagaaaaaaacaaaacccgccgaaccgggttaagtgcgggtgcgttgaggatgcctgac

SEQ ID NO: 298 - DNA, 717 bp, Escherichia coli
caaaaatgctcgaaactgatcaggcgtgggaggtaaaaaaaarwattcgaaaaactggaagactgctatttcagccagggaaaaacagcaccaaccgaacagcagccgcagattcagccacaattcacagccgaagaaatcatcctcctttgctacatgcagctctggatggaaaagcccaggacctcagcaaacacctgtatcccattatgaaagagctgaactcctcatacacgaacaagctgtatgacattgcgtttgagaccatctacatggtgacgaagaacagagacgcgctactaagggaggtaacacgtctcgacatgtcaagttccattatccagcgggccatgccaatgctgaaaagcctgcgggcaagacaatttgaattctgaaactaaaggagcttcggctccttttttgttgggaaaatccagtgagagggaataatgaaccagactatcttcctccgaagtaagcagcagcaacaattcgccattaacgccatccttgcaacaactctcgataaagacaaacccgttacgatccgcatcaccgattacaagcggaatctcgatcaaaatgccaaatttcacgcgatggtcgctgatatctcccgacaggttcagtggtgcggcagatggctaaaaccagaacagtggaaagttttgttaatcagcggtcatgccgtggctacaaaacaggaagctgatgttt

SEQ ID NO: 299 - DNA, 336 bp, Escherichia coli
gactcctgtacctgtctgataagatttacctgcaccacgttggtggcgcagaagtaagtgtcgtcagtgagataaatgtgatgcgcgtcaggttgcgaacggtgacggtcgagcgttttaatcagccgttcgtcaatttcgtattcacgccctctggaggtgaaacgaatgacggaaaaacgcttaattgccattgcgctcaccgctctgtttctgacgacgaacgcgagatagctgaatttccagtccttcaatgtggtcgtgtagttcgtctatttcggtgagaagcgagttgatggtcgatgagagctcctctaacagagctttcgctgtcag

SEQ ID NO: 300 - DNA, 1112 bp, Escherichia coli
aaatgcctttgccggcacagccctgagtcacgcggctctgccgtaacacgttatcaggccaccatggtggcctgactgatttcttaatgaaaggaactgatttatgggattgtttacgacccgccagttactcggttataccgaacaaaaagttaaattccgtgcgctatttctggagctgtttttccgccgtacggtgaatttccacaccgaagaggtgatgctggacaaaattaccggaaaaacgccggtggcggcctatgtctccccgatcgttgaaggaaaagtgctgcgccatcgtggtggtgaaacccgcgtgttgcgtccgggctacgtcaagccgaaacacgaatttaattaccagcaggcggttgagcgccttcccggtgaagatccggctcagctgaacgacccggcctaccgtcgtctgcgtatcatcactgataacctcaaacaggaagagcacgctattgtgcaggtggaagaaatgcaggcggtgaatgccgtgctgtatggcaaatatacgatggaaggagaccagttcgagaaaattgaagtcgattttggccgatcgacgaagaataacatcatacaaggtagcggtaaggagtggtcaaaacaggatcgtgacacgttcgacccgacatatgatatcgaccttttctgtgatcaggccagtggtcttgtgaatattgccattatggacggtaccgtctggcgtctgctgaatggctttaagcttttccgcgaaaaaatggatacccgtcgcggttcaaattcacaactcgaaacggcagtgaaagatctgggcgcagtggtatccttcaaggggtattacggcgatctggccattgtggtagcgaaaacgtcttatgtggcagaggacggtaccgaaaaacgttatctgccggagggcacgctggtgctggggaatacggcagcagaggggattcgttgctatggagccattaaggatgcacaggcgttgtctgaaggggtggtggcttcttcccgttacccgaaacactggctgaccgtgggcgatccgtcctgtgaattcaccatgacgcagtccgcgccgctgatggtgctgccggatccggatgagtttg

SEQ ID NO: 301 - DNA, 825 bp, Escherichia coli
ctgccgtgttggttatacaaagatgttgctgggagtggaggcttattttattgagcataaatcacgcaacagccttctttttcagcccacggactcagctgctgaagattttatgaaatctcatgttgagccaacgataagggatgttcctgcattgctggagctggctccatggttcggaagaaaacaccgcgataatacgctcaccctgaagcgtttttcctccggtgtggggttctggtgtctgggtggtgcggcagcaaaaaactaccgtgaaaaatccgtggatgtggtctgttatgacgagctttcctcgttcgaaccggatgttgaaaaagagggttcgccaaccctgctgggggataaacgtattgagggctctgtatggccaaaatccattcgcggctcgacgcctaaaatcaaaggctcctgccagatcgaaaaagccgctaacgagtcggcacacttcatgcgttttatgtgccctgtccgcactgtggggaggagcagtatctgaaatttggcgatgatgcctcgcctttcggtcttaagtgggagaagaataaaccagaaagtgttttctacctttgtgagcatcatggctgtgtgatccatcagtctgagcttgaccagagtaacgggcggtggatctgtgaaaacacgggcatgtggacccgtgacggcctgatgtttttcagcgcccggggtgatgaaattccgccgccgcgttccatcactttccatatctggacggcgtacagtccgttcaccacctgggtacagattgtctatgactggctggatgcactgaaagatcccaacggc

SEQ ID NO: 302 - DNA, 1873 bp, Escherichia coli
cgttgatcagcggaactttgattacagagccaaagttgacgaccgtaattatgcactgaaggaaagggagtttaacgctaaccagaattaccggaatgcgtcactgggtatggagcagcagcgactccagttgcagaaatacaaccagcgacggcttgagtataacgatatgctggcgcgcgatcagcctgtgatggcggcgcttggaaaggctgtggatgctggcgatcgggatgcagcaatgcgtctttacggccagttgtcagagggtaatccgctgaggctgatggcgaatgatggctatgtagcgaaagcgggtcaggccgtgaacaacctgcaaaaaatctttgatgacaagccagacagggctatcgcttcacttaatacgccggagaatcttgatgtcctttccggggtgtttggcccggaactgcaacagcgtattggcatgcccgattcaaccgggaaaaagacgataaaagaggccaggattggcagtatagtaccggcacagcaggaagggtacatacttatcggccttgatctcacatacagtgatggctctacagcacataaacccgttacggaatacggcagtgcacatcctgatgatcaaaccgtgctggcggtgcctgttgataaggctgttgagcttgtcagggatcgcagtaaattcgcggaaatttcgaaaaatttcggctatttcacgccgaagcagcagggactttctgcggatcaacttcagaaaggagccagccaggtagcgataaaggttgcacaggacggcggtgatgcgcagggagcagtgacgcaatattatgcttcgatgggactgccgcagtatcagcagcaaattcagcagcaaaaaattcaacaagggattaccagttgggcgggtgatgatccggataagcaggcatttgccagagaagtggcctcccgtcagccagaaatgctggagcctcagaatcagaaattgctggaacacgggtatgcgaattttctccgtattcaaaaggccaggggggaacaggccagggatgatagcgcggcctctgcatctgagtttatccgtggtctgaaacagaattacgcgcagtaattcaccattcccgttaatactatttcctgatacccggtcattgtgccgggtttttttatggagtctgtatggcttattccgatgaacagcgccctgaagcgcaatttggcaaccagagccgcaacagcctgaacattcagcagccgggagagactgacagctatgatgtgtttttctccgatcccaatcgctggaaggacaacagcacgtcgttcagcctgggcgatgtattgccaactatggggaaaggtgtcgcccagtccgtccgggggacaggggaaatggcccgtggactcggtgatgcgatgattcagagcccggtaaaaacaggggcacgtattttaaatgagttcagccgtatggggctgccgggagtagcaactgttcaggatatttttgtcggtggcagcaagggggcggatgaggtcatcgacactctgcctgatggaaaaaatgcggttactgatactgtcggtaaaggtctgaaggtcacaggcaaggcagtcagtggcggcgctaaagctcggatgaatggctgactggcaagatgtcgccgggggcgcagcgggcgctgaatacaccgatgactgaaggatatgatgattcagcggtctgggtagcgaaaggggttaacctgattggtgcgcttgtaccggatatggttgcaggcggtgtgactaaaaagctgggtgatgtcactctgcgaaaagtgctgaccgccgggctggagaaaaaatacatcgcggcagggatgcagccggaaagagccac

SEQ ID NO: 303 - DNA, 933 bp, Escherichia coli
aagtggcggtgctaaacacctggcaccggcgctaatgccattcagcatcaggctcagaactggagactgtgattatggagtacggtaaatacgaaacacttgcaagatacggttataccggagcagcccgccctcagggggactggcagacatccgcagcgctgacccgccagcaatacgacgactggcgcaccagatatttaccccgtgtagcaaggctggctgaccttggggagaacaacagtctgatgaatgcacagcttgcacgggtgggaggccttgccacttccagtctccgtacagcgcagatggcgcaggataaccagatggcgagatacggggtaaaccgcccggataatcccgacagtaatacgctggggttacgtaatgccctggcaattgctggcgcgaaaaatggtatccgtgaagccgaacaggatcgccagatgaatattctgacgggggcttctgcaccggcaagacagaaactgagtgttggcggccaactggtggcagcgtaagggggcaatatgggatacggtttactggatattgcaaatcagtcgcggcgtgaggcattacagggaataagtgacgcagacagacgacgtgaagaaattgaggctgcgaacaaacagatggcggcgcaacagaaagcgcagaacaagcagaatatcggtacgggcattggtacgggggcggctattggcgcatccgttggtggtcctgttggtgctgttgctggagcagtaattggcggcattgctggttctttgttttaaggagtggtgaatgagcggatttgcacaggggttacttgccggattcagcaccgttgaccaggcaatgacccgtcgtaaggagcttggtctgcgtgaagcacagcttgcccggcaacagaaaaataacgagcgcgattttgagtttgcgcag

SEQ ID NO: 304 - DNA, 804 bp, Escherichia coli
gacggtggcagagactgccgtattcgctcaaataactgttacggtcaggtatcccgtcgtgaccaggagagcgcgctggcgtgctggggaatcgacagataagcagaatattttgctaataaatgacgttggccaaggcggacggataacacgaaatcctgcgaactggcaaaatgtaagtgaataaaagtaaaaaccccgtttgttggcaccaagcggggttttgtgtttctgaccttgagtaaggcaagggagaacatggcgaagtataaacgaattctgttgaggttgactatgaaaaatggccttgaactgaaagcgcctgtaactgatgacatcagcagagcactggcttttgccattaagtgggtggcggtcggtgttgctgtgttcccgatgctgtatgggctggcaaaactggtcattgcgttgaaatcgtgaagggaggattaagcatgtcagacaaactcataacgctggcgaagatcctctgtgtaattgtcggyatttcattttcactaatgctggttgctctttttctttccatggcctggatgatgttgtcttcgtcggggttgctggggtgaacataaaccgaatgctttccgcgtttatcgttattctgctggtggcctgtggtgcgctgtggatggcaacagaccattaccgtgataacgcgattacctacaaagcgcagcgcgataacaaagccagtgaactgaagctggcgaacgcaaccattactgatatgcaggtgcgccagcgcgatgttgctgcgctcgatgcaaaatactcgagggaatt

SEQ ID NO: 305 - DNA, 361 bp, Escherichia coli
ttactgacatgcagatgcgtcagcgtgatgttgctgcgctcgatgcaaaatacacgaaggagttagctgatgcgaaagctgaaaatgatgctcttcgtcgcaagcttgataatggtggcagggtgctcgtcaaaggaaaatgccctgtgccatcctcagccgaaacctccagcgcctccggcatgggcaatgatgccaccgtcgaactctctccagttgctggacgaaacgttctcggtatccgggacggaattatccgcgaccaaacagcactgagaacgcttcaggaatacatcaggacgcaatgccttcgatgatagcgataattttactcatcatccttcacatctggctctgtaga

SEQ ID NO: 306 - DNA, 761 bp, Escherichia coli
gggtaaacgtggcggtgtggcggttgcactgtctcttgccgcagtcacgtcactcccggtgctggctgctgacatcgttgtgcacccgggagaaaccgtgaacggcggaacactggcaaatcatgacaaccagattgtcttcggtacgaccaacggaatgaccatcagtaccgggctggagtatgggccggataacgaggccaataccggcgggcaatgggtacaggatggcggaacagccaacaaaacgactgtcaccagtggtggtcttcagagagtgaaccccggtggaagtgtctcagacacggttatcagtgccggaggcggacagagccttcagggacgggcagtgaacaccacgctgaatggtggcgaacagtggatgcatgagggggcgatagccacaggaaccgtcattaatgataaggctggcaggccatcaaatccggcgcagtggcaaccgacacggttgtgaataccggcgcgtaagggggaccggatgcagaaaacggtgataccgggcagtttgttcgcggggatgccgtacgcacaaccatcaataaaaacggtcgccagattgtgagaactgaaggaacggcaaataccactgtggtttatgccggcggcgaccagactgtacatggtcacgcactggataccacgctgaatgggggatatggcacagaacaatgctgacagactggtcattgacggcggcagggcaaccggaaaaaccatcctgaacctggtgaacgccggca

SEQ ID NO: 307 - DNA, 521 bp, Escherichia coli
cgactctttaggaaggtaataatgtttattggcccactgaactgtcgtcagtggaacaggaataatgagagataaaagccctgttgctatcgcaccggctgcattagctgccttctgcgcgtctgaaatcatcgatccacccgcccacgttttcaccggccttagctgaaacattggaggctttcgcgatttcagttttcaccacatcaaggtgtgatggtgaaatgtccggatatttacgctgtaatgtcaacggcacacgcacaagtatccccgaaatctcctgtgccacacgttgcagaatgaaggtaaacagttcagtttccagcactactccgtcttcacgggcatttttcagttcctgcgcatctgcctgcgcttttgtgagccggtagcgttcatagtcaatggtgccgggttgtaaatctgactccgctgccgcacgcaaatcgtccagttctttgcggagcttttcgttttcgatatcagtttccctctgcgcataccactgaattgccatg

SEQ ID NO: 308 - DNA, 272 bp, Escherichia coli
gaatgacgaatcagtcaggaagggataacaacccgctgctgaacggaaggtatcagcaggaagatgaacgggaatatcgccagcaccaagggcagggccgggttccacaataccagcgctggcattttgcacattgccagcgtaccggcattacaacacgtttcatgctgctgccccccaggattcctcgattcgttgctacatccactgctctacttcacttccactgctccacttcacttttgtaccagcggctgctgcgccccagtttg

SEQ ID NO: 309 - DNA, 287 bp, Escherichia coli
tctattctatatgtacattagatttaagtattcactgacttaggggtaataaaatgatcatacagatgtcactaacgaaaaacacagcaaaacttaactgcttgcattataaaaataagtacaatgcttttatgaaaattaaaaccacaagaaaagtataaaaatcatcatttactaaaaaaatcaagtggagataaaaacttcatactatataatatttagaactgggtgatgctgccaacttactgattagtgtatgatggtgtttttgaggtgctccagtggct

SEQ ID NO: 310 - DNA, 1069 bp, Escherichia coli
gagtggctgaaggagcacgcctggaaagtgtgtatacggcaacgtatcgggggttcgaatccccccctcaccgccagattataagcgcatgttattgtttaacatgcgcttttttatttttccttccagacagtatgccatcgggtatgccatctgaaaccggtttatatgcccgcgatcatatcttatcggacaatttccgatctttgagcatactggcaaagctatactgccagcatatcaggatagtgttttgcgataatatcattcagtctgtcaaccagttctggttttctgaacgtgatatgcgcggagcccttcttaaagtatctgatgctgaacatctcatcttcatagctctctttaccctgaacagactgaatgtgatcatccagacgaagggtgatgtttccccggttgtcggggattggtttaccgctgaacaggtgcaacattctttccagatcggcgagtcggtcagcctgttgtccggtgataagatgaaatccccaccggtcccatctcaccagattgttgacgataattttactgccaaatttacaggggcaattggttttgtaattccagttcagccctctgaagacgttgatcacccctcgctcaaacacctcatccttattctggtgcagttgttcaaatgtgctcagaatgttcgcttcgctgatttccggaaaattatcgtactccagtgaccggtaccatgtatcacgggcctgcgtatccattaatgacagcatcccggaacgttgcatcaggtcacgccagatttcgcgatcaagattccgggtaatggctttcattgctgtttcgggtttctccatcagccagcagccgcagcgaaaatcctgtttcatggcccagtccggggcagttttacctccgatgctttccgtcagcaccgagatttcagccagttgtcggataagtgtgtcgatttgcaacagtgtactctttcgtacagccagaatgtggctgactgaggttgagcaaataacgtccgtatgcccgttgaccacttccggacgggagactgtgattgcagacataa

SEQ ID NO: 311 - DNA, 223 bp, Escherichia coli
atctaattgtacaattgatgtataacaaaagaaggaagtaaaatatcattagaaatgaactcatatttcttgagagagatgttaatatatcagtaaagtgcaagaatattcaggaaggacgtatatcgcaatcagattaaacagcgctaaaaaacactatcaatatctatatgatagtgtttttagcacattatattcatcaggattttattttaaaagctaa

SEQ ID NO: 312 - DNA, 562 bp, Escherichia coli
tcatgtaattccttcgcctcctcaatggtgaaaccaccaggcagaagagccggagttaccggagagctggttgacgcttccgggatttcccgaaaattattggttgacgaattcttgctttcccgaaagtttccggactgaagcatggctgtgcggcaggcgttccatatttcggcagcaatatcgcgctcgctatcggttaatttgtacgtggaaacatagccagagagcatttctacgttttccggagttgcttcttccggcactaccggcgctggcggggcggcaaatagatatccgccaaagtcaggaagctctccaatggcctgcacgaacttttgtttgcctacgtcaactcctaatgggtaatgagctataatctttgccaccggctctgcttccagcgatatcagtgcaattcgtgccagttcttccgcttcttctgctggcagtacaacgttgctacccggtccgtatgtttcgcgccactgcttgattgtcagcagtcgccctttggtaatagtgatcatgccgcgtttccttctttcttattaacaatcac

SEQ ID NO: 313 - DNA, 614 bp, Escherichia coli
ctttccggatttaacgcgcagtgccatggcggcagtgctgcagttgtaccgtggatttgtggtgacacgacgtattactggaaaaatacatacgctacccagtacgacaccgtgtacggagggtataaaaacagggagagtgagggcgtttattttgtgcccttcatgacagacggtaacggcgtcaataccgccactaacgcaccggcagaagatccggatattccggcatcaggatattacggtgcggcatcgagaacgaatggaaaccaggtatcatcaaaccgcccgacacatttcagttcatgggcgcgcaggagcattattccggatcgtatggcaaccgctattctgaacgcagccgggcgcacctcagccttcatcagtggtaaggcaccggaaatcaaaccctcgcccggcgtcgacacgccatcggggccgtctgaagatgcatccgtacgcacaatctccctgttgccgacagccggagatgctgctgcgcagggctggagcattaagaatggcggaattcagttgtcagatggtgtatttaagatcaccaagcagagcaataaagcctggtccctgacgcgcccggtggatgacgcagtctc

SEQ ID NO: 314 - DNA, 260 bp, Escherichia coli
ccgtcgcctccgcagcagcaagactctggtaacgcgcctgacctgcaaggtctttatactgctgagagttgtaatactgattaagtgcctgcccctgaccttctaaactggaaagattctgaagctggttaacatactgctccgcaagcggcgtgaacggagcaaggtttttcatgatcgtctgccactgctgattttgcaggtctgcggcatacttctgagcttctgctgcatactttgcgcttttatcagagctgcca

SEQ ID NO: 315 - DNA, 1613 bp, Escherichia coli
gtcatggtggtgaggatttatcaccggttcttgatgcgatgaatgccgtgccggtgctgaaaacgtggcagaactccgatccggatcgcttctcggttgccgtatccatcgacgggaagctccagaatgaccccgcatggaaagacaaaccgctcactgaacgtttcgccgaagtggcccgccgtacgcagcttgctttcggtgaagccagtgagccgccttctgatgacaaggcagacaacacggatatccggaaaactgcggaagaaaaagtgaaagccgctgaacgggagatggcagtgcctgcttccccgtcagagcttggcaacacggcttccgtcggaaccggtgataattttgaacggttacttggtgcttcccataccgaaattgaagcagccatgcgaggcatgacggacgctgaaattgacgcgattctggaaaaactcgggtaaccactgaaggagtactgacgtaatgaccacagtaacaacagcccaggcgaataagctgtatcaggtggcgcttttcacggctgccaaccgcaaccgctcaatggtgaatatactcactgaacagcaggatgcaccaaaagcagtttcgcctgacaagaaaagcacgaagcagaccagtgccggtgcaccggttgtgcgaatcacggacctcaacaaacaggccggtgatgaagtgacgttcagcatcatgcacaaactctctaaacgtccgacgatgggggatgagcgcgttgaaggccgtggtgaagacctcagccatgctgatttttccctgaaaattaatcagggccgtcacctggtggatgcgggcggacgtatgagccagcagcgtacgaagttcaacctggcatcctctgccagaacgctgctgggtacgtactttaacgacctgcaggaccagtgtgcgatagtgcatcttgccggtgcccgcggtgattttgttgctgatgacaccattctgccaacggcagatcaccctgaattcaaaaaatcatgatcaacgacgtactgccgccgacgcatgatcgtcattttttcggtggggatgcgacgagttttgaaggtattgaccagtctgacctgttcacccttgcgctggtcgataatctctcgttgtttattgacgagatggctcatccgttacaaccggtacgcctgtccggtgatgagctgtatggcgaagatccgtattacgtcctctacgtcacgccgcgtcagtggaatgactggtacacctccacgtccggcaaggactggaaccagatgatgacgcgtgccgtaaaccgctcaaaagggtttaaccatccgctgttcaaaggcgaatgtgcgatgtggcgcaatattctggtccgtaagtatgcggggatgccgatccgtttctataaggactcaaaggtccttgtatcgaaaaacgatatggcagcaaccacagaggagaagcaggccaagaccaacatcgaccgtgccatgctgctgggggctcaggcgctggcgaatgcgtacggccagaagggcggcggccacttcaacatggttgagaagaaaacggatatggataaccgtactgagatagcaatcagctggatcaacggtctgaaa

SEQ ID NO: 316 - DNA, 457 bp, Escherichia coli
gaaatgcctgcctcaatatgctgctcaatcacacgttcatcagcgaacggtgtgtcattcagtgtgaggccatagtgctggtccagcagacggatgagcagtgtctgccagatggtgacgggagacgggcagcatgatgcctcccgtacatgtgtgtcgggtaataatttcatactgaagattttcctgatatgagagattaaattatggggagagtggcgtggtgaaaacaccaggccggagcagaaggttattccggtggtttactttttcgtttcgggggtcggataaacagccagataaacgtaaccacaggagccgagggtgtcggcatcgcaggtcagccctttagcatatagcgtgacggtatgctgatggcggggattcagttcaccgctggtgagcatgagttccagttgtttcatcagcagcggaaaggcctggtccaggtggtacg

SEQ ID NO: 317 - DNA, 416 bp, Escherichia coli
agcatcaaaagtgctgccgctgcagagtcctcaaaaagcgcggtggctaccagtgccggtgcggcgaaaacgtcagaaacgaatgcggctgcgtcacaacaatcagcagccacttctgcatccaccgcgaccacgaaagcgtcagaagcagccacttcagcacgggatgcggcggcctcaaaagaggcagcgaagacatccgaaacgaacgcgaaagcctcggaaaccagcgcagaatcctcaaaaacggctgccgcatcgtccgccagttcggcggcgtcatcggcatcatctgcgtctgcttcaaaagatgaggcgaccagacaggcgtcagcagcaaagggcagcgccacgacggcatccacgaaggcgacagaggcagctggcagtgcgacggcggcagctcagagcaaagt

SEQ ID NO: 318 - DNA, 449 bp, Escherichia coli
tggtatctaatgcaggcaatggtggccgatggcctaaaaaaaaaamtacagacatctcacctgattccccccagcacggcagcgtgccggagtggtattacgtggtggtacttgctggtcaatccaatgccatgtcatatggtgatggaatgccgctgccggattcttacgatgcgccccacccacgcattaagcaactggcccgtcgcaacacagtgactcccggtggtaaagcatgcgcatttaacgacatcattccggcagaccactgcctgcatgatgttcaggatatgagcgcactgaatcatccgaaggcagacctgagcaaagggcagtacggctgtgtcggccagggcttacatattgccaaaaaactgcttccgtatatcccgaataacgcggggatcctgctggtaccatgctgtcgtggtggttcggcattcacccag

SEQ ID NO: 319 - DNA, 811 bp, Escherichia coli
gttgtggctgccagacggaagccggcacgcacatgttgtgcactgccatgcccgaacttcacataaccggcgttatcctggccgtcatccagggaaagtccctgccaggtatactgcagttgtggctccagcatcaggttgtcagtgatactgaagggcagaccggtttccagtgaacccagccagccccaaccccgggcgcggaagtcgttattgtccgttgacgctttcatgctgtggcgggttcccagggccacaatgtcagcccacagtccggaggcgttgtgtatcagattcaggtatccgcccaggctgccggcatcatcccggaccgtgccggcacgggagccgtcatcatccttaacatcaacggaagaatggccagcagcaccatatacccccgcggtcacagacataccggcaacctctgttctcatcaggtcaccctccagacggacgaatccatagctgccgctgctttccggcgtggccccacgggcaataccgccattgttatcgtgaccgagatgaccgccctgaatgctgagacggacgctgttgttttcaccatttacaccggtctgatggctgcgggagcctgccacaatccggtcatagtccattgcctgtgtcagcatggaggcatacagggggacttctgcacgataagcattttcactgcgcagataccagctctcatcactgtcccggttgagggagtagttaaaggcaccggcctgcagcctgttcccctggacaaaggccccttcctccgtggtggcaccgttaatggcttcaaccacctgaatac

SEQ ID NO: 320 - DNA, 232 bp, Escherichia coli
ccgactatcttaactggttacgcgagttccgctttaacccggaacaagtcaccgtgtccaacgataatggcaagctggatattcgcttaagcggtccgtggcgtgaagtcatcctctgggaagttcctttgctggcggttatcagtgaaatggtacatcgctatcgctcaccgcaggccgacgttgcgcaagccctcgacacgctggaaagcaaattagtcgacttctcggc

SEQ ID NO: 321 - DNA, 274 bp, Escherichia coli
aaaatcattatggtaacatatgaggctttccaaaccacctgaccattttcattggttaactcggcaatgtgtaaattgtagctctcataatgactagaaagtatgtgagcaactatcggccccccaaaaacaaaaaacaaacttatgcacaaagtcatttttttggaaaataaattgcgctgtttgtgtttcactaacttatcaccaatgccagaatcattaatatgcacaaactcatctgacgaaacaaataatagattgcaatgtcattttg

SEQ ID NO: 322 - DNA, 234 bp, Escherichia coli
aaagatcccgtacgtaatcaactggcaggtagtttacgggccgtgttgtcacaaaagctggaagtggataaacaggaaggacgcgtggcgctgtttgaattattgattaacactcccgcggtggggaatttgattcgcgaagggaaaacccaccagttaccgcatgttattcaaaccgggcagcaggtggggatgataacgtttcagcagagttatcagcagcgggtgggggaa

SEQ ID NO: 323 - DNA, 218 bp, Escherichia coli
ggtcgagcgacaggtcagcgcctggctgtaggcaattttcgttacgtggcacattctgactgggtcagtatggatcaaatctcgccgtggatgggactggcggtgattgccgcagaagatcagaaatttcctgagcactggggctttgatgtcgcttccattgagaaagccctggcgcacaacgagcgcaatgaaaaccgtattcgcggtgcttcaac

SEQ ID NO: 324 - DNA, 577 bp, Escherichia coli
aaatattttcaataacaccagacaggaaaaacaccaccacaggcggtggcgtttctttggggcgtctttatttaatccgggccatcgcgtttctcagtgccaaatctgcctcttccgttatatccaggcttttctgcaataccgcctctgaccgggtcagtgcctgacgtgctgccagcggtttccggatatgctccatcgccagcatcgtgtcttcatagccctgctgacgccaggcgtcggtatgtgccgatgtaaaactgagcagaccgccgctgttgccaccatcacctgcatatttcagccttttccggggacggatctcaaggattgtggtgtccggaaaagcctggcgatcccataaagaaccgtcactcagatgcgtcacaatcaccatattgcatccggcatcgaccagaggcgtcacaggggtatttccctgcatatttcgccatcctcccataccaccatcaccgaacattgtcccctgaacctcacggggacggaacagcaggggcagcgcggctgacgcaagcagagcctctttctgctgtccgcggggcaggctctggatatg

SEQ ID NO: 325 - DNA, 228 bp, Escherichia coli
atattgttgggagcaactaaaaacatctattcccgaggcttctcaacgcaaattcaggaacacttagcaatgggcgttctactttcattaggagcacatcatgttaattgtttacttttatcagatagtaaacaatcattaataagtcgttgttataacctaatgctatccgaacctggaacaaaatggacagcaaacaaggtagcgagatatctctacatttctgtt

SEQ ID NO: 326 - DNA, 214 bp, Escherichia coli
cagtagcctttgttgatgccgttcctgcgctggaagacgctgactgagccgacgtcgcggcctgcccggctgatgtgctggctgcacgtgctgagcctgcagcatcagtcgcatgggttgccgcctcactggcagatgtgccggcatcgctggctgacttcttcgcggctgccgtgttctgtgccaccgcggacgcgttacgcgccacctcttc

SEQ ID NO: 327 - DNA, 222 bp, Escherichia coli
tgttttttttcttcctcgaatgttttcgcaaaacaccaggggattgtcaaagcaaaacatcgatttttagtacaacatgccagatattcattaacaggggcgtttattcatcatttaatcggcttataaagcgggaaatttaagtagcagaggtgataatgacgggagaatttgacctgcttatcgatgctgccgattgcacaaattgttaacaaaatcgtc

SEQ ID NO: 328 - DNA, 250 bp, Escherichia coli
gttttggttagttttttcggtgatgcgaccttgttcaagtaacgcttgttctatggtctgctgcagcatccgaatacgctgttccatacttgccgcgtagtcacgagtcttcgctttttcttgcgctaactcatagctgatattcaatgcggcaatgaagaccaactgttcagtatttgtgactctagtgcgttctttcagatcttgcaaccgttggttcagatcgtccgctgcctgattcaacgcatcc

SEQ ID NO: 329 - DNA, 281 bp, Escherichia coli
gtatctatggtgtgctggagcgtcagttccgtaactactacaaagaagcagcacgtctgaaaggcaacaccggtgaaaacctgttggctctgctggaaggtcgtctggacaacgttgtataccgtatgggcttcggtgccactcgtgcagaagcacgtcagctggttagccataaagcaattatggtaaacggtcgtgttgttaacatcgcttcttatcaggttagtccgaatgacgttgtaagcattcgtgagaaagcgaagaagcagtctcgcgtgaaa

SEQ ID NO: 330 - DNA, 750 bp, Escherichia coli
tcgtgcctacccggatattatcgtgaggatgcttcatcgccattgctccccaaatacaaaaccaatttcagccagtgccacgtccattttttcgatgaactccggcaccatctcgtcaaaattcgccatgtacttttcattccgctcaatcacgacataatgcaggccttcacgcttcatacgcgggtcatagttggcaaagtaccaggcatcttttcgcgtcacccacatgctgtactgcacctgggccatgtaagccgattttatggcctcgaaaccaccgagccggaacttcatgaaatcccgggaggtaaacgggcatttcagttcaaggccgttgccgtcactgcataaaccatcgggagagcaggcggtgcgcatactttcgtcgcgatagatgatcggggattcagtaacattcacgccggaagtgaattcaaacagggttctggcgtcgttctcgtactgttttccccaggccagcgccttagcattaacttccggagccacaccggtgcaaacctcagccagcagggtgtggaagtaggacattttcatgtcaggccacttctttcctgagcggggctttgctatcacgttgtgaacttctgaagcggtgatgacgccgagccgtaatttgtgccatgcatcatccccctgttcgacagctctcacgtcgatcccggtacgctgcaggataatgtccggtgtcatgctgccaccttctgctcagtggctttctgtttcagg

SEQ ID NO: 331 - DNA, 387 bp, Escherichia coli
ctgtcggatcgccggaaaggacccgcaaatgataataattatcatctgcatgtcacaacgtgcatctacgccatcaaaccacgtcaaataatcaattatgacgcaggtatcatattaattgatctgcatcaacttaacgtaaaaacaacttcagacaatacaaatcagcgacactaaatacgggacaacctcatgtcaacgaagaacagaacccgcagaacaacaatccgcaacatccgctttcctaaccaaatgattgaacaaattaacatcgctcttgatcaaaaagggtccgggaatttctcagcctgggtcattgaagcctgccgccggagactgtgctcagaaaaagagtttctcctgaagcaaacaaagaaagagtgacat

SEQ ID NO: 332 - DNA, 275 bp, Escherichia coli
tgtattctacgcacatgtttatgctaagtgccagttatttggggaggttcatcgggacttataccaacatccctaactgattatcattactgggagcctatactcaaagacaaatgttgtcagcatcccacaaagcatcttttgctttgttattgtttgttaaatacttgctggccaacgtatgcaggaagtcgtactaataaaaagaaagaaatctttaaaagtcataagaaatacagttttcatatagttgaaaataatactagtgttagcaa

SEQ ID NO: 333 - DNA, 248 bp, Escherichia coli
aagagatcataattgcgatggcagacgtactgttgagatccacaaactagatctctctgactggcaagcattcaataagttagcaacgaagtgtaatgcttacgatggagtaacaatgaatggtgataattcttttggatggaaccatgaagctacattagataatattcacgcccagaaatacaataaagcttacgcgggtgcgaggttaaccgcagaactgaaatatttattgcaagatgtcgaat

SEQ ID NO: 334 - DNA, 1113 bp, Escherichia coli
gtgttgaaggcctgaagtcattgccgtcaggacgtgggaggcgctggccgttcgaacatatttgagcattgctgcgtgagcttgttaagtattctcctggcgatttcggttatcagcgttcccgctggagtaccgaacttctggcgataaaaatccgtgatgttaccggttgcccgctacatgtttcaaccatccggcgatggttacctgctgccggacttgtatagcgcagagccgcgtcgacactgtgtatccgttacccatacaaagaagaaaaaatggccgctattcatgaagcgctggcgaaatgcagtgcggaaaaccccgtgttttacgaagatgagtggatattcatctcaacccgaaaatcggtgctgactggcagttacgcgggcagcaaaagcgcgttgtcacaccgggccagaatgaaaactattatcttgccggtgcactgcacagcggtacgggtaaagtcagcaatattggtgggaacagtaaatctttatcattatttatcaggatcttaaaacatctgaaggcgacatgtcggcgggcaaaaacgattacgctcattgtcgataactacatcatccacaaaagccgtgaaacgttgcgctggctgaaagcaaatccgaagttcagggtgatttatcagccagtttactcgccgtgggtgaatcatgtcgaagggttgtggcaggcgcttcatgagacaataacccgaaattaccagtgccgttcaatgtgacagttgttgaaaaaggttcgtcactttatggataccctcagcccattccccggtggaaaacatgggctggctaaagtgtagcggcattaggatcagttatttagtctattcgatatctaaactgactcctatcggtactgaactagcataactatttttaaagttgagcaagaaacttaaaagaggagcataccccccaaccaaactagctcaaaatgataaaaaaataacatcttgcgtttttttggttgtttttccgcttaccttaataaaaattatattacaccaactaaaaaacagatgcttagtaattgatattagtagaatctcggactgctccatccacatccaatgtaattaatctt

SEQ ID NO: 335 - DNA, 496 bp, Escherichia coli
agatcgatttcccagagcaccacgctggccgactgctccgcacgggtgcattcattcagtgtttcctgccggatatcctgcatcagttcaccacctgtttaaactctgcgctgaacccaacacgcaacatactgacctgcgacgaccattttgcgcaggtcacctttatctgcctgtaaccataaggcggcgtccacagaaaggccttccagcccccgtgctcagccagaaacgactccagcgccatggcctcctcacgggagacagacagcgtcacgctgtacgttttcaggtcagcgttcagcccggcaggcgcacgctgggaatagccatcaccaaagcgcacctccctgacggaaggagccgatgtcacatccatcccgggtttcactttccagcggaaggttttcatcgtccacctccggagaacagtccaccatcacgcatctgtgtctgaatttcatcacgggcacccttgcgggccatgtcatacacc

SEQ ID NO: 336 - DNA, 372 bp, Escherichia coli
acttgaactgagaaaattaaaacgatgtctatgaatcacacagcttatttatatccttattttttacttacctgtggacttacttggctttagtcccgaggtattgccaggagtatctttattatcgcgtcggcgttgatccggttttcctgtcgacttagcaattggttttggacctagtttaagacccatgatagttatccttcgagatgtaagaggaatgccctcaacattggtatattctatactgagaaatttttcaatgggaatgttcaacggccgaatgattaactcgatattgtgagcaatgtcttttttggcatttttttttttcaagcgaaccgttagattgcgcgtatttttatggaagga

SEQ ID NO: 337 - DNA, 204 bp, Escherichia coli
gggcctgaaggctcctatccttgaagcccttaacgatctgggttacgaaaaaccatctccaattcaggcagagtgtattccacatctgctgaatggccgcgacgttctgggtatggcccagacggggagcggaaaaactgcagcattctctttacctctgttgcagaatcttgatcctgagctgaaagcaccacagattctggt

SEQ ID NO: 338 - DNA, 223 bp, Escherichia coli
tggcaggctcatgaaagagctggggctggtcagctgtcagcagccgactcaccggtataaacgtagtggtcatgaacatgttgctatccctaactaccttgaaaggcagttcgccgtgaccgagccaaatcaggtgtggtgcggtgatgtgacctatagtgtgcccggagttcagggcgggcatggatgcttaaatgaaccgcgagtctgtctggaatattga

SEQ ID NO: 339 - DNA, 237 bp, Escherichia coli
tatcgcgccggtgaatcactgatctattcattattttcctggctcccggcggttcgcaataagcgacagtaccaaatacagctgtttctcgaagataaattaggcgcgctgattgcaggaaatcagtggtctgatcctgaaactatcgaacgtaatattgatgggctgctcaattccgctgagcgcgagcaaacaacataccggcagcagattgactccgcccatgaaatcgttctt

SEQ ID NO: 340 - DNA, 204 bp, Escherichia coli
agtgtttcacgtaagttactcgtcttacaggcggtggctcgatcttagcgatgtgtgtaaggctgcgcaaatttctctattaaatggctgatcggacttgttcggcgtacaagtgtacgctattgtgcattcgaaacttactctatgtgcgacttacagaggtattgaatgaaacgtgcagtgattactggcctgggcattgtt

SEQ ID NO: 341 - DNA, 693 bp, Escherichia coli
ctgccgttgctggcgcatcatgttcgcctaacggccttgtaggccgcgataatacagggcaatactttcgtgccaatccggtacgtggaagacttctggttcgctcaatggttcttacacaaacttaggttcacatagaggttcattctcagggcggaattcagggggcagtacattgtttatttatgcatctggaggtaatggaggatctgccggaggtgcatgtgcaaatacatcccgactgcagggatatgttggtgggacgctaattagcgtgaatgccagtaataaccctgcatatggaaaaacagcctttatcagctttgctgtacctgcaggtacttcctatcagataacatcctatccaacagaaaatacatcatgtggtgccggggtattttcagtatttggatatcaaacttaattgagcgttacacacgacgcaatacaacctgtcttatgctcgtatttgtaccatttgcgtgaacctgctgggctctcaactacctggcagtagtgggcatcctctgcgttgcccattctggcaatggcacagaagtcgaattgccccagataacctgtggtggaaagctgagtaactttgagttttccacctatgtcccccacgtaccggattggcacgaaagtattgcccctgtattatcgcggcctacaaggccgttaggcgaacat

SEQ ID NO: 342 - DNA, 213 bp, Escherichia coli
acggatacacgccttttgtgcactttgcccacactggtggcttaccatccggatactggatcttgtttgtaaaaacctcgctttcaataaatttttttccgtgacagcaggggcactgttttttgctcgccgcgctacgggcataatcttcaaacgcatacgaagccataatgcgcatcactaccggttttatttctgccggaagttttctca

SEQ ID NO: 343 - DNA, 231 bp, Escherichia coli
gtttgcagcaatccctctttgtagacctttaatccgctgaccataggcgctaacatagcgcctcattattttgcgggtgatgatatgcgtgtgttactggcaccgatggagggagtgcttgactctctggtgcgtgaattgctgaccgaagttaacgactacgatctgtgcatcaccgagtttgtccgcgtggtggatcaactgctgccggtaaaagtttttcatcgcatt

SEQ ID NO: 344 - DNA, 209 bp, Escherichia coli
tacgctgatcgcacagttgatcgcccttctccagcgcgataaatcgcgcaagtttattgcccagcagattgttcgctggctggagagtgagcatccactgaaagccaaaattctccccaccgaatggttgggcgaacatagcgcggagttggtttctgacgcggtgaattctttgcttgatgatatcagccgtgatcgtgcgcatcaga

SEQ ID NO: 345 - DNA, 253 bp, Escherichia coli
atcttcagcgcgatggggattcacttcgaactcaattgtgaagtgggtaaagatgtctctttggatygcttttggaacaatacgacgcggtcttcgttggcgtaggcacttaccgttccatgaaagcgggtttacccaatgaagatgcgccgggcgtttatgacgcgctgccgttcctcattgccaacactaaacaggtgatggggctcgaagagctaccggaagagccgtttatcaataccgccggacttaa

SEQ ID NO: 346 - DNA, 201 bp, Escherichia coli
ttacgggcaatcagatcgtcggtaaattgtttacccgctttcattggtccaacggtatgagaactggaagggccaatgccgattttgaaaatatcgaatacgctaatcataggaaatacatcgcgttaaaacggaggaagcgccgcccgaaagcggcgcgaaaggacttagctgaacagagagtagaagattgcggagatt

SEQ ID NO: 347 - DNA, 218 bp, Escherichia coli
aacatagctgcagagcaagcaattcggttgttggcaagtcaagggcaaagcattcgcgtgagaatgggcgtatgctttgtgtcaaaagcaaacgttgctaattctgcactgttcagcgatggcgcagtagcgacaggcactgccactgtccagtcggcaaaagcgaacactttgcactgcggggataamstgattgaagctctcgcgcaaatcactta

SEQ ID NO: 348 - DNA, 208 bp, Escherichia coli
caaaggcgatttggtgtttcgttggggaggcgaagagtttgtcttattgctaccaagaaccccactggataccgcgctttcgctggctgaaactatccgcgtaagcgtggcaaaagtgagtatttcgggcttaccacgctttaccgtcagcattggtgtggcgcatcacgaaggaaatgaaagcatcgatgaactgtttaaacgcgtt

SEQ ID NO: 349 - DNA, 227 bp, Escherichia coli
tccagggttggtaaaagagttagcgaaatatccgtttaccgctatcacgggcgttaacaccttgttcaatgcgttgctgaacaataaagagttccagcagctggatttctccagtctgcatctttccgcaggcggagggatgccagtgcagcaagtggtggcagagcgttgggtgaaactgacaggacagtatctgctggaaggctatggccttaccgagtgtgcgc

SEQ ID NO: 350 - DNA, 207 bp, Escherichia coli
gtctgctggcaccgctggatgaagcccttcagcactatgtcctgaccgacggcaaactccatgctgacgatatgcctgtcccggtgctgttgccgggcaataagaagacgaagaccgggcgcttatggacgtacgttcgagacgaccgcaacgccggatcagcgctggcccccgcagtgtggttcgcttacagccsgacagaaaagg

SEQ ID NO: 351 - DNA, 276 bp, Escherichia coli
gttcgttagcctgtgcgttggctgtaagcccccagatgggtaaggaagaattttgctcacggagtttgcgagtcaactcaaaaccatccatattcggcatattaacgtcagtaataagcagatcataatgttgcatactgactttgtgtagcgcttgcacaccatcagtggcttcatcaacatcatatcctaatagatttagctggcgtttgagtaatagcctgttggtcggatgatcatccgcgattaatatgctcaacttttcaggtagtgtga

SEQ ID NO: 352 - DNA, 290 bp, Escherichia coli
tactgcagagcagaacgggttactttggtagggtccaggatacccatgtcgatcatgttgccgtattcttcggttgctgcgttgtaaccgtagttgccgtcgccgcctttaacggtgttagcaacaacagacggttcttcgccgcagttcaggacgatctgacgcagcggagcttccattgcacgcagtgcaactttgatacccacgttctggtcttcgttctgaccacgcaggtcagccagtttagacgctacgcggatcagcgcaacaccaccaccagcaaccacgcc

SEQ ID NO: 353 - DNA, 206 bp, Escherichia coli
catcgattgttagggaaaaataagaaaaaaaataatcatcttctacatttgtggatattgatatatccaccgctacgtgcgaaaaaatctgggagccatgtaaaaactccatcactttctggtattgccatatagtttatgtaatgcttacttacaagagattcatctttgtgtaaataaagataagtagtcacgcataaaaacaa

SEQ ID NO: 354 - DNA, 208 bp, Escherichia coli
ctttgactaccgacgcaggtcgctcgaccacctcacctgcggcaatctggttcgccagttgtggcggtaagacctgaattggcatcaatcgtccttagtttggcagcgtgcgatctggcgtcgtcaccgtactggcagtttgtgccgttgcccctgcggcgcagattgcatcggatgcgcaaggaaataattgcgcaggcctttgtaa

SEQ ID NO: 355 - DNA, 250 bp, Escherichia coli
ggtgatcgcgcatggcgcttaccgctgggtgacgagtatcaggaacaactggagtccaattttgccgatatggcgaacattggcggtcgtcctggtggggcgattaccgcaggttgcttcctgtcacgctttacccgtaagtacaactgggcgcacctggatatcgccggtaccgcctggcgttctggtaaagcgaaaggcgcaaccggtcgtccggtagcgttgctggcacagttcctgttaaaccgcg

SEQ ID NO: 356 - DNA, 207 bp, Escherichia coli
ataacgccagcgtgaagcagagcgggcagctcatcgaacaactgtcgctgggcgtgtacgacgcggtgcgccgtttattaggacggttacgtccgcgccagttggatgatctctccctggagcaggccatccgctcactgatgcgggaaatggagctggaagggcgcggcattgtcagccatctcgaatggcgaatcgatgaatcag

SEQ ID NO: 357 - DNA, 289 bp, Escherichia coli
ggaaaaaagcgcgcctgattaattgcactttcaatgaaccgccgctggccgatgcgccgcagaccgttagctggaagctggaaggtactgactggactatccacaaccatgcgaatgtcttctcccgcaccgggctggatattggcgcacgcttctttatgcaacatctgccagagaatctcgaaggtgagattgtcgatctcggctgtggtaacggcgttattggcctgacgctgcttgataaaaacccgcaggcgaagttggtgtttgtcgatgaatcgccgatggc

SEQ ID NO: 358 - DNA, 258 bp, Escherichia coli
aaaacccttttatcttttctgtaggaaagtccgattattgcttcaatacggacttcctcatttttatcctgaagcatctccacaaaacaatccctaatatcactattatcatatttattgatatttattgcaaatgcggcccagtttctgacatctccatttggatcttttaacagattaatcaatagtggaattgttgctttatcattgataacagaaatagcaaawraaaaatgctgtagcacgtctgacattagt

SEQ ID NO: 359 - DNA, 227 bp, Escherichia coli
ctttgtcagcgttgaaccattttacgataccagtcattttaccggacatagtgtattacctttaataattaagtgtgcctttcggcgatatggcgtgctttacagattttgaagcgttaaaggaatgtgcactacgaggggtatcaacgataactcttgaagggacttgccttactacactgctttaatggtctgtacgtcaaaccgttgatgtgcattaagccacg

SEQ ID NO: 360 - DNA, 225 bp, Escherichia coli
ccttttcacattcgtaccactattggtaactttgcggcgctgttccgtcataagcgtgtcctgagttatatgcttgccagtggtttcagctttgccgggatgttctcgttcttaagcgccggaccgtttgtctacattgaaattaaccacgtcgcgccggaaaactttggttattactttgcactaaacattgttttcctgttcgtgatgaccatttttaacagc

SEQ ID NO: 361 - DNA, 226 bp, Escherichia coli
ggagaccgtcacccgtcgccgtcggcagagtggcgtatggggaaccgtttgtcgatggtttggcaccagtgacctgggctgggaaactatgacgaggatgtgagtcgcagcgtgatcaatatcaacaaggtcagagaggaagttatgtcactgacccgggcatatttcggggagctgcaggcatccattgagcaggatattaaccagcccgtccgccaggaaatcg

SEQ ID NO: 362 - DNA, 227 bp, Escherichia coli
aatatcgcggtgcaatgcgtatgcaacccgcgatcctgccaaaatccgtgaaattgtgctaatgggcggcgcttacggtacaggcaacttcacgccatctgccgagttcaacatctttgctgacccggaagcagcccgcgtggtgttcacctctggcgttccattagtgatgatgggcctcgatctcaccaaccagaccgtttgcacccggacgtgattgctcggat

SEQ ID NO: 363 - DNA, 291 bp, Escherichia coli
tttcgtaagacattaccccatcatcttctaattcaatagcttttggtcgccagaatagtttcaatgcgtgctgcatagtgacttgcatcacatttttttatctgtttttggcggtatttctcgcacgttaaaatagaagagcgtttctctgtcattaggcagttgagcaatttttcctgacttatcattcttatttgaatttgctcactgggatttaaacgtaccatagggggaaccgtgacaataaagtcacgtgatttattgcctttcgtatcttctttccatgtttgc

SEQ ID NO: 364 - DNA, 259 bp, Escherichia coli
tcaaacaagaagtggatcgagagctggaaagtttgctggtcgcgcaatatcaattaatgcaactctgtatcaagcatggcgatggtgaagttgtcgataaagcctggggcgacctggtgcgacgcaccacggcgctacaaggcatgcgcagcaacctgaatatggaatcttcccgctgggcgcgggccaatcgacgtttaaaagcgatcaatacgctatcgctgacgctgattacccaatcctgcgaaacttatcttat

SEQ ID NO: 365 - DNA, 248 bp, Escherichia coli
cgaagcgcgtgttgatgaggttgaacgccaggtaaaggaggtgctgcgggaatacggttttgctgaggcaaaactgtttatcaccgcagcaaccgaaggtcggggaattgatgccctgcgcgagcatctgcttcagttaccaggacgtgaaaacgccagccaacatagtttccgcctcgcgatcgaccgcgcatttaccgtaaaaggtgccgggctggtcgtcaccggtacggcgttaagcggggaag

SEQ ID NO: 366 - DNA, 243 bp, Escherichia coli
ggtaatcacccgctgttcgttgccggtatcaatcagcgcctgtgacggaatgagcagcatcggttcgctggcggtattgagttgcaaccaggcgttcattcccggttttagcgcctcgtcggcgttgtcgacttccagacgcagctgcagcgtgcgggtcgcggcatccacgccaggtagcagcgtccatttgcggatggtgagtgttttatccggtcgcgccggaacggtgagggtaaactg

SEQ ID NO: 367 - DNA, 239 bp, Escherichia coli
tggcatattttacgtaactccctgccgccgctgatcgtgcaggcatcgctggatatcggtagcgcgattttaatggccgccacgttgggatttattggcctgggtgctcaacaaccgagtgctgaatggggcgcgatggtagcaaatggtcgcaactatgtactcgatcagtggtggtattgcgcatttccgggggcagcgattttgcttaccgccgttgggtttaatctctttggtga

SEQ ID NO: 368 - DNA, 230 bp, Escherichia coli
tatcgtcgttccattatcaaccactcgcgatcatgacaagttaaatcgtggaatgcatgttgaaatagccagtaatgttatcaatggcctgcaattctttgatcagcagattcgttgggccaaagccgacctggtacaacaagtcagtcgaaaccgattaaatagagcaaggacttacagagggtatcttaatcaatgtttgccacatgagttggttgcagacatacaga

SEQ ID NO: 369 - DNA, 243 bp, Escherichia coli
cggcacgtttcactgcataagcagtgccgacgttttgcattaatacgccgatatcggatgaacgcccgccatgtggaacctgcttcccggtcagaatgtaggttaattgtttagcaccgccagaaggatatttggttggaatcacccgcagagaaatatcgttagagtccgccagcaccgcgcgcagcatggaaatcgcctgcggtttgttatcttcaatgccgataagaatttcgcgtggct

SEQ ID NO: 370 - DNA, 205 bp, Escherichia coli
ttctgacgattggcgttatggcccccatcgccagcgggacgctaccgccctcaaccttgattcactcgtttctgaactggaaatcgctggtggcaattgcagtaggcgttattgtctcctggctggctgggtgggcgcggcgtgaccttaatgggcagccagccgcaactggtcgccgggctgctggtaggcactgttttaggcg

SEQ ID NO: 371 - DNA, 209 bp, Escherichia coli
gctgacactatcgggttatcaggtgcggattctggagcaacatgactgggatcgagcggctgatattgttgccgatgccggaatggtgattgttagtgtgccaatccacgttactgagcaagttatcggcaaattaccgcctttaccgaaagattgtattcttgttgatctggcatcagtgaaaaatggaccattacaggccatgctgg

SEQ ID NO: 372 - DNA, 267 bp, Escherichia coli
tactcacggtgcagatagtcatggcgattatgttgatgawttttttcaagtagcgataaaaatcttgtaagaagtaaagataataatcttgaagcattttatctcgcaacacctgatggacgatttgaggcgcttaataataaaggagaatatatttttatcagaaatagtgtcccgggattgagttcagtatgcataccgtatcatgattaattttagtgcttttattagtggggcctataaggagattcaatgaaatatagttca

SEQ ID NO: 373 - DNA, 280 bp, Escherichia coli
ggcatcctgtcattgctgagcaggcaacaccaccagaggagccacggacagggatgttctttacagcccgatacacgccaggttctcagcagactgaatgtgcaggtgcggttattcaccagaaatggcatgctgcggtacatacccatcctggtgacaatatgtacgtggcgacagcgatcccggcactgtggaagagactcactcagcctgcaggatattctttccggcatccgggaatgtccgcctgaatgcaaacaggatgatatttgaatccgta

SEQ ID NO: 374 - DNA, 314 bp, Escherichia coli
tctctgctggaagaaatctggcaggacgacagctggctgcctgcagcatgagtaccgtttatcaccgtccggctgacccttcaggcgatgacagttacgtgcgaccgttgtttgccgatcgttgccaggccggttttccttcgcctgccactgattatgctgagcaggaactggatctgaacagctattgcatcagcagacctgcagccaccttctttctgcgcgccagcggtaaatcgatgaaccaggctggcgtgcagaatggtgatctgctggtagtggacagggccgaaaaaccacaacacggggacatc

SEQ ID NO: 375 - DNA, 205 bp, Escherichia coli
ccagacccagcgtggtgttaccgattttaccaatcagcagataggcaatacgtttacctaaaccggtggtcacaaatgcggcgcttaaggtaaacgccgagaacaccagccaggtagtacctgaagagtaaccgcttaatacggcggtggtcttaaacgcaccgtcggataagttaccgaccaccaccatggaggcagcaacggc

SEQ ID NO: 376 - DNA, 206 bp, Escherichia coli
gacgagagatcttctcgaactcaggatcaaaacgcagcgtcaggtcggtcaccagcatcgtcggtttacgtttcttcgacggatcaaacggatccgggataatttccggtgcgtctaccgcttcgaactggattgcgccagccgggctgcgggtctgtacccactcatacttgaacaggttctcgaagaaatagttgctccactgg

SEQ ID NO: 377 - DNA, 241 bp, Escherichia coli
ggctttctcatatgcacaccatagtgttcaggagacacggaaaggtatcaggcagcctgctaacgagtggtttaatcacgaattagtacgtaaaatcggtaacggctggaaatcattcaatactcacactatcgaaagttcccccagccaaccgcggtacgttcttacatacgatgtaccgctgttctctttacgatttttagctgtactggtgaattatgagcaatctgaatccatgcat

SEQ ID NO: 378 - DNA, 256 bp, Escherichia coli
gaccaaaaacgagaaaacccggcaacaaacgtcaccgggggagcggagattacgtgcagatttcgtagcaagggatgtaggctgagctgccaaggcacacagggatagctgcttttggggggtatactgcattghgmtttttttttttaaaaaaaaaaagggggggggggttttttttttttgggggggggggcccccccccccaaaaaaaaaaatttttttttttcaccccccccccgggggggggggccccccc

SEQ ID NO: 379 - DNA, 209 bp, Escherichia coli
aaatacgcgcagcgggttgcgggtatattcaatcggcgtggctatcgccaccagcggcaagacgacatcacattttttgacgtgatactcaatccattcggaatgaatactgatatcgccttcaacaaagtgaaaatgcggatgattcagaaaacggcttatcgcatcactgccaatatccagaccgtaaacttcataatgatcttcgc

SEQ ID NO: 380 - DNA, 620 bp, Escherichia coli
acggggttttccgcactgcatttcgccagcgtttcatgaatagcggccattttttcttctttgtggggggcacggatacgcggtgtcgacgcggctctgcgctataccagtccggcagcaggtaaccatcgccggatggttggagcatgtagcgggcaaccggtgacatcacggatttttatcgccagaagttcggtactccagcgggaacgctgataacctaaatcgccaggagaatgcttaacagctcacgcagcaatgcgcaaatatgttcaaacggccagcgcctcccacgtcctgacggcaatgacttcaggccttcaacacccgacagcgtgaaccagttaatccagcgaccaatcgatgaacgggcacagcagagcgttctggcaacataactgacggtgtcaccacgatgcagcatcagcatggcggtgagccgccgggcgtggttttgtcctttgttttatggatagttttctgcatcaggcgtcgttctgttctggggattggtgttatgatcggcatcgctcagtccggttggtgattttttctttttggcgattgatcagatcgcacaatccgggctgagttccctcaaagtgacctactattccgcg

SEQ ID NO: 381 - DNA, 231 bp, Escherichia coli
cgttccgtcgtctggttgtcacactcatccggcgttatggcgtcagcctcattcatctggatgccagcgctgaatgcctgcccggtttacccactttcgactggtaaccaggaacaacatgaaatcattaaccacggaaacagcgctggatattctgattgcgtggctgcaggacaatatcgactgcgaatcggrattatctttgacaacgatgaggataaacggattcgg

SEQ ID NO: 382 - DNA, 327 bp, Escherichia coli
tccaccgatttgagaacgacagcgacttccgtcccagccgtgccaggtgctgcctcagattcaggttatgccgctcaatgcgctgagtgtaacgcttgctgataacgtgcagctttcccttcaggcgtgattcatacagcggccagccatccgtcatctataccacgacctcaaaggccgacagcaggctcagaagacgctccagtgtcggccagagtgcgttcaccgaagacgtgcgccacaaccgtcctccgtatcctgtcatacggacccccccccctaaacaccagcgctgacgtgatttagcaccgacgtagcccaatgttc

SEQ ID NO: 383 - DNA, 329 bp, Escherichia coli
tgggaatgtacgcataccgttcactgcgggaggtgtgccggtcttccccaaaaatactgggtacatggcgtatcagttcttcatgtgtcagcggacggtcacggcgtatctggtttgcagcataaccaaaacgacttgctaatcgcatactttgctccttatcggtggttaagatttactggtgcaataaatgaaaaagccgcgtctcccggagaagacgcggcctgacgggtgaaatgaataaggtttattgtctgagaggcctttcactggcgagccacgcattaagcggctttccggtaacaatggctggggctgtatttaccttt

SEQ ID NO: 384 - DNA, 447 bp, Escherichia coli
attatcaaaacgagaatgacgcgggtttagtggcaccgggctgaactcaccgggaggcacccggcaccatgcaatggcacatagcgccactctccagcccctctccggaggggctttcttatggacaaaaagcccgcgctgggagacgcgggcggcaaggaatgaacaatgaaacgtgaagtaatatttcagctggcgaataataccccatagtaatcactctgcgcaactgcgcgacctttttcgaattgcgggctgtagtctcccttctgccattgtcctgtaacttccggacttcagcccgctccttattttactcacaatattatcccggccgggaggattcatggcatttaaacactatgatgttgtcagggcggcgtcgccgtcagaccttgcgaaacgaataactcaaaaactgaaggaagggtggcagccttatggtag

SEQ ID NO: 385 - DNA, 227 bp, Escherichia coli
gcgcttctgcgatgtgatacagcgcagtctggcagctacgacgcgccacactgtccgctttggcggtgtactgacggtctttgatgatgtcgaggtagaaggaaccatctcaacggagcagaagcgcatcagacgctgtaccacttcgtggaaatcgtatgcttcgtacgccttgaggatgtcttcctgtgccgctttcgcacaacctacggcccagcgatccagta

SEQ ID NO: 386 - DNA, 237 bp, Escherichia coli
gtccggcagaccgcccatgtctttgataccgcccaggctgttttccagtttctccagctcacgagtgcgcatcagcgcttctttcttggtcagcttttcgaaagtaccgtcctgagactgccaaggcacacagggatagcgatgcgctgggggggggggcccccccccccatgtmcagcgttaatattcattgtccccgttgtcagtcagctcaggtttaccgccatggtcagaacc

SEQ ID NO: 387 - DNA, 206 bp, Escherichia coli
tctgattcacatggagtcactgactgtggtcacaaacgatttcgttattgcgaactacttgctcgacaacagtaattgcacaattattcacactggcggtgcagtgtgtcgggaaaaccgttcctgtgtcggggaagccgctgcgaccatgctgcgcagcctgatgattgatcaggcttttatttctgcatcgtcatggagtgtgc

SEQ ID NO: 388 - DNA, 259 bp, Escherichia coli
acctgttcacggccatgctgaagcagttccgtactgacctttccggatttaacgcgcagtgccatggcggcagtgctgcagttgtaccgtggatttgtggcgacacgacatattactggaaaacacatacggcacacagtatgactccgtctacggcgcgtacaaaaacagggagagcgacawyktttaacgttttctttgtgccgttcatgaccgacggtaacggcaacacacgcccaccaacttaccggcagaagac

SEQ ID NO: 389 - DNA, 247 bp, Escherichia coli
cggagcttcatgttctaacagccaggccgttctgcgagcaatcgctgcgccagaatccaccagccgggttccctctggcagcacctgtaagagttcttcttgtagtagagggaaatgggtgcaacccaatacaacggtatctggcggctctttcattcttaaccacgggcgtaggatacgttttagtgcatccagagaaacatcttcgccatgcagcttcgcttcagccaactcaaccatctctgcc

SEQ ID NO: 390 - DNA, 271 bp, Escherichia coli
tttacggcagtgagagcagagatagcgctgatgtccggcggtgcttttgccgttacgcaccaccccgtcagtagctgaacaggagggatagctgatagaaacagaagccactggagcacctcaaaaacaccatcatacactaaatcagtaagttggcagcatcaccatcaacatgatgataaaagccggatgagtcagacatccggcgagcagatttgttttaaggttccagtttcggatctggtccaaagcggttttcgcctggcgtacc

SEQ ID NO: 391 - DNA, 215 bp, Escherichia coli
aggggtatggcgaagataacgaagagcaggaagaagggctgcgatgcattgcggtaccggtatttgatcgctttggcgtggtcattgccggtttgagcatctccttcccgacgttgcgtttctctgaagagcgtttacaggaatatgtcgcaatgttgcataccgcagcgcgcaaatttctgcccaaatgggttatcacgactatccgttctgat

SEQ ID NO: 392 - DNA, 250 bp, Escherichia coli
gactctgcctgtcggtttatgccgtcaatatcaacgcaccggatccccggctaatacgagaaaacctcagcagaggtcggtaatgcccgaaaatcggcccattaccgcccgcacctccgtacaccattcccttttgatttcgaattctttgttgtcgctataccgcttaacgttcccggtattacctcggcctccaacaacaggaacatattcagctttgcagcaaccagagaagagcaaaagaatcaca

SEQ ID NO: 393 - DNA, 1738 bp, Escherichia coli
taacgttggttcaaatctaagccatcatgacacatctatgcaacaccttgttgcgtgttgtcgcatccaggatgcgacaacgttgtgtcatcctggatgcgacaggtaaataaaaaacacactaaaaaaacaaccacttacaaatcggcgtaaaagatctattctaggcaagggtgttgcgtgcaacgcaacgccctttgggggtgtcggggcgaagccctgacccagtcacgtagcgatagcggagtgtatactggcttactcctatgcaagcctcgccagccgtgatttttgccagatttcgtggttttcacgttcaacagctccatcgtttttttgccgtccgttcaccgttaaaacgcctcagaaatcgggacaggatgtgtaatcgtataaccgcgcatgcacgccgatacgattaccacttggtcagggcttcaccccgacaccccgcatcagtgcgtaagtgctcaatgtggcttccagttctcttccgcttcctcgtcgattcgctcgctacgctcggtcatcgacttgcggcgagcgggatcacctctcgcatgttgtcggtgatcccggtgttgttcttttggggatgagtcgccagatagcccctcaaacgcgctcaaaagctctcagacgcacgaaacgggttttagatgcccgccagggcatggaaggcgcgaaaaacgcttacagaggctctcaggaggtcaagcgcgccgatacccctaaccaggggctttcaggtcgccaggaaccgcgccagccccctgcaaagcccatttgcacggaacaggcagccatgcggttggtaggtggtcgtagaccgtcggtgttgcagcgatgggggtctggggttctccccagacggtttccggtagcgctcaaggcgcggccggaaccgtggcggctcggttttttttggagaacggggagcaaaaacacgcaaaggattttgaggcggcaaaagagcaatgcaggatagacaatcatggtcagaacgttaacacgtagcccctgattgtccgcctgccgctagctcaatttgaaaacatggccatgattcggcgctgaatatcaccgtctttgttgaccagtgttttagtgacaaacgctgcatggtttttcgtagtgttgtatcccttccagacttcatgtggatcgagggcatacgcacaaaccttaccagcaacggggattctaactaatgcattttttgattctaagtaattgagccaccgaataattgtgcttctgctaactccaagtttttcagctagaaattgctgatccgcaacgacagcgccacacgtaggatcgatatgctccgctaaaaatgagtacagcttcagtgctgatatgccttggctatccttcagcagctctcgaacacgttcccaaccttttggggatacctgtgtaaaccttgaatttttctttgcttcttcgagatcctcggtgtttttctttgcctcatctgaaagttgtttcagtcgtttttctgaatcaataaacatgattttttccctctgaaaatcccatgcactaacgttggttcaaatctaagccatcatgacacatctatgcaacaccttgttgcgtgttgtcgcatccaggatgcgacaacgttgtgtcatcctggatgcgacaggtaaataaaaaacacactaaaaaaacaaccacttacaaatcggcgtaaaagatctattctaggcaagggtgttgcgtgcaacgc

SEQ ID NO: 394 - DNA, 592 bp, Escherichia coli
gatgatttcggtgtatgacgaccagagcgttttgttctgcagctggtctgtggtgctgtccggcgtcatcctgcgcatccgtatattgaacgggcgcggcggcaggttacccaccaccaccgaggccagatactgcgaggtggttttgcccttaatggtgatgtctttttccgtcacccagccaccattacgctggatctgaaccagcaggcggacttccgacggattccggtccccctttgaggtggtttccaccagtgcctgcacgccgaaggtaaagcgcagacggtcgatgtttgcagacgtaatggtgcgggtgatcggcgtgtcatatttcacttccgtacccagcaccgtctcggagccggaggattcaaaaccctccggcggtgtctgctcctgctcaccggcacggaacaccaccgtgacaccggagatgttggtattcccctcagtgtccagcaccggcgtactgttcagcagcacgctttttaatccatccaccggaccttcaaccggcccttcgctgatggcatcgatcacactcagcaactgcgtggacttcaggttgtcctcgcttcgcgcgggtatg

SEQ ID NO: 395 - DNA, 599 bp, Escherichia coli
tctaatcagagcccgtgcagcagctaaacgagacagcagagttgcccgacagcgaattctgagcatgctattgcgaacagacaaacgttatgcaggaaagcactggaccggcaaacatcgaacctggttagccaatcaatcatttagtcagccatctcaacagattgcttttcaacactattgtcagagtctggagcagattgaagatcgcatacttcaactcgaccaggaaatatcccgcctgttacctgagtggtctctgtgcaatctggtctgccagttacaggcccttaaaggtgttggtcagctaaccgcaataaccctggttgctgaactgggtgatttttcacgattttccagtcccaaacaactcatggcttttctgggactggttccaggggaatattccagtggaaacagcattcgtcccaggggaataacaaaagttggaaacagcgaactgagacgtctgctttacgaagccgcctggtcttatcgtacacctgcaaagttggtgcatggcttatatattaccgaccggactctgtaacacaatattccaaagatattgcatggaaagctcaacaacgattgtgttc

SEQ ID NO: 396 - DNA, 555 bp, Escherichia coli
ccatccgtcatggctcagtatgatgacgacgaacacgctctgcaggtgagtatgtggggccggaagcatcattcccgtattttgccgcaccttccggaagcaaccggcatcagttacggttatcgtcaaccgttgtgcggtatgccaggagcacgtactgatccatcagatccgtcagtgctgcgctctgcttctgacggtcgatgatccattcctccagctctttttctgatttccgtttcaggttctctgtccagtcttcaaggctgtttccggtcattaaatcaagccagcaaagccagaccagtttaaggcgtaactccgtgccaccaaactgacggaagagactgatcagtttatttgccagagaatggtgtttcagacgttcacattcagacagcagaatgccttccagcatcggatgatgaaccagcagatgttcactggtgcataaattcactatcagatcatcatccaggggcggcgtggcccgtttgtcagggccataaatcagccggtgcaggctctggggggacgatggcaatctccggtttt

SEQ ID NO: 397 - DNA, 417 bp, Escherichia coli
aatgccgatttgccaacggtgttcacactgcggatataaagtaataatcatggcccggtttgatattgatactggcggctatccagtacagccccgtgccaaggtagcgggctgtggtttcaacctgcctgatatcggtaatccgcgtttccgagaaccagaactcaaactgtaccgtcggatcataaaccgcaagatgcggcgtggcggttatctgaaaatagcccggcgtcagctcaatcctcgacggtgctgccggtgcggcaatccggaacgataccgacgccggatcgccctgctgcccccgggcatttaccgcccggactgtcagcctgtagttccccagcgccagttgcgtgaagcggtatgtggtttccgtcgtccgggccgtgctgaccagtcgctcactgccgtcgt

SEQ ID NO: 398 - DNA, 225 bp, Escherichia coli
gggagcccggcagacattctgcgccggcgtccagatgaatgagactgacgccataacgccgggtgagagtgacgaccagacgacggaacgttctggacaggcccaggcgtttaagccgcagaaccgggtacgaccatgcatcggtacgtaacagatagccgctgcctgtaaaatgaatccattctgtttcgccgtcgtcattagtctggtgtgacagcgagtaca

SEQ ID NO: 399 - DNA, 295 bp, Escherichia coli
ccagcgcaacgtttcacggcttttgtggatgatgtagttatcgacaatgagcgtaatcgtctttacgccttcagatgttttaacagtctgataaataaggatgaacctttactgtttccaccaatgtagctgactttacccgtaccgatgtgcagtgcaccggcaagataatacttttcattctggcccggtgtgacaacgcgcttttgctgcccgcgtaactgccagtcagcaccgattttcaggttgagatgaatatccactcatcttcgtaaaacacgggttttccgcactg

SEQ ID NO: 400 - DNA, 311 bp, Escherichia coli
tatgggaattcccatatcgggtaaaaacggtttgcggtaaagcgagagttaagtagaattgctgcgggtgcttgaggctgtctgcctcgggcatgccaccgtaaggcagacagagaaaaaccccagttaacattacgcgtcctgcaagacgcctaacattaatctgaggccaatttcatgctagacacatgtaggttagcctcttacgcgccgaaaggcaaggagaagcaggctatgaagcagcaaaaggcgatgttagtcgccctgatcgtcatctgtattaccgtcgtagtgacggcactggtaacgag

SEQ ID NO: 401 - DNA, 281 bp, Escherichia coli
tgcggcgaaattccattttgcaaccggaggatttacgggaaccggcggcaaatatgagccagcggggattgttcaccgtggtgaatttgtcttcacaaaggaggcaaccagccggattggcgtggggaatctctaccggctgatgcgcggctatgccaccggtggttatgtcggtacaccgggcagtctggctgacagccggtcgcaggcgtccgggacgtttgagcagaataaccatgtggtgattaacaacgacggcacgaacgggcagataggtccgg

SEQ ID NO: 402 - DNA, 346 bp, Escherichia coli
tgaaggtgatggcatatattccgtctcatacaggtctgccagcaaacagtaccgatattgcaccaccagatattcctgctggctttgtggctgttttcaacagtgatgaggcatcgtggcatctcgttgaagaccatcggggtaaaacggtttatgacgtagcgtcaggggacgagttatttatttctgaactcggtccgttaccggaaaatgttacctggttatcgccggaaggggagtttcagaagtggaacggcacagcctgggtgaaggatacggaagcagaaaaactgttccggatccgggaggcggaagaaacaaaaaacaacctgatgcaggtagccag

SEQ ID NO: 403 - DNA, 270 bp, Escherichia coli
catacctkcaacgtgcgggttttctctttccagcaaccaatgccaccagggataaagcccccgcaacattgcgcctcaccggataacgccggcttgatgtggatactacgtctcaattcatcttcacttcatccctgaaatgtttgcaatgaagagtgcattccggtttttcaacagctgttacagtcgtttcatgagggctctggatgatgcttccagctcgggttgccaatatttacttgtggaagagataaagacaaaaatggccgc

SEQ ID NO: 404 - DNA, 249 bp, Escherichia coli
tgccgggtaataagaagacgaagaccgggcggttgtgggcgtatgttcgtgatgaccgcaatgccgggtcagcgttggcacctgcagtgaggttcgcttacagcccggacagaaaaggcatccatccgcagactcatcttgcttgcttcagcggtgtgctgcaagcggatgcgtacgccgggttcaacgagctgtatcgcaatggtgggataacggaagctgcctgctgggctcatgcccgccgaaaga

SEQ ID NO: 405 - DNA, 272 bp, Escherichia coli
gtgctggtccagcagtcgggtgagcagtgtctgccagatggtgatgggagacgggcagcccgatgcctccgtacgtgagtgtcgggtaatgtattcatcttaagttctctgtaacaggtggtgataaaggggagatatccggggttatacggtgattgcgggctctgccggtgtcggataaacagccagataagcgtaaccacaactgccaagggtatcggcttcgcaggtcagccccttcgcatacagtgtgatggtatgctgatggcggg

SEQ ID NO: 406 - DNA, 275 bp, Escherichia coli
tcctgtgaacccgggatatccatctcaaaacttgctcttgaaaatggcattaacgccaatctgttgttcaaatggcgacaacaatggcgcgagggaaagctgctattaccttcttcagagagcccccagctacttcctgtgactctcgatgcagctgccgaacagccagaatcgctcgcagaggacccgaaaaccctcagtatcagctgtgaggtaacgttccggcacgggacgctccgcttcaatggcaatgtcagcgaaaagctcctgactct

SEQ ID NO: 407 - DNA, 272 bp, Escherichia coli
ttctgcatcttttcacccaggctgtgccgttccacttctgaaactccccttccggggataaccaggtgacattttccggtaatgggccaagttcagaaataaataacgcgtcgccggaagccacgtcatagacggtttttccccgatggtcttcaacgagattccacgatgcctcatcactgttgaaaacggccacgaagccagccggaatatctggcggggcaatatcggtactgtttgcaggcagacctgtatgaggtggaatgtatgca

SEQ ID NO: 408 - DNA, 360 bp, Escherichia coli
gaaagtacagacggcgctgaaagacgattcccatgtccggccatttttcattttccgggccgggggggggggcagcgcagtcaggttaaactgctgtggtccaccggtgacggactgtgcctcctgaccaaacggctggagcgtgggcgcttcgcctggccgtcagcccgtgatggcaaagtgttccttacacaggcgcagctggcgatgctgctggaaggtatcgactggcgacagcccaagcggctgctgacctccctgaccatgctgtaaatctctttatcctggttgtcacagaataagcccggtaaaatacgggcttatgaacgacatctcttctgacgacatcttcctgctgaa

SEQ ID NO: 409 - DNA, 274 bp, Escherichia coli
tgtatactcagtctgcacagactgattctccggacggtaaagcagacggtacaccaggcgcacaggtcatcatcagaaatggaacgacaccccggcagcgcctccggggcgtcgggtgattctggtgcctgaatcacgccttcagggacatgctgcatcagcgcaggctctccagcagcgtttctgccatcacccacaatgcgcggttgagcttaatatcggtgtcgatgttgtgaatggcacgggtgtggatacgttttcctttgcactgcgg

SEQ ID NO: 410 - DNA, 276 bp, Escherichia coli
ggaccaggccgcaggagtgaaactctgcggcctttttcgtaagaaaaatgcaacggttgcaagcggataatattctgcggaatgcgcagcacagagtgaagatgagacggattccggaacagaaaaacagtcgtagaatcagcgtcaagccggaaggattccggtgaggcgcaatgttgcgggggcttaatccctggtggcattggttgctggagagagaaaacccccgcacgttcccccgcaggtatgcacctgacaacaccacgggggccattc

SEQ ID NO: 411 - DNA, 273 bp, Escherichia coli
gtttgccgctgaacagatgtagcattctttccaggtcgacgagtcggtcagtctgttgcccggtgataagatgaaacccccaccggtcccacctcaccaggttgttgacgataattttactgccaaatttacagggtgagttggttttgtaatcccagctcagccctttgaagacgttgatcactccccgttcaaacacttcatctttgttctggtgcagttgttcaaatgtgctcagaatgttcgcttcgctgatttccggaaaattatcat

SEQ ID NO: 412 - DNA, 347 bp, Escherichia coli
aaggctgttgcgtgatttatgctcaataaaataagcctccactcccagcaacatctttgtataaccaacacgggcagatttaatcaggttaaccgtgcgaatcagatcgttgcccatacagttcatgatgccaacctgaaacggcagtgtttcccaccgcccgggggtataagacgactctttaggaaggtaataatgtttattggcccactgaactgtcgtcagtggaacaggaataatgagagataaaagccctgtagctatcgcaccggctgcattagctgccttctgcgcgtctgaaatcatcgatccacccgccacgttttcaccggccttagctgcaacat

SEQ ID NO: 413 - DNA, 285 bp, Escherichia coli
ctgggcttcgttgttaatcgtaccataataacgaacttcgccaagccgttcaggtgcagcaatagcaaccgccaacgtttctttatgtacatccagcccgatgtaagctgcaatattttccgaatgcataatgacctcctctggaatatcccaccaatgctatagtgagtatataaaggtcataccatctttatgttctttggcagcgatcacggcggcgagcgtggagcactgttgtacgggctgatcggcacctgccgtctgaacggtatcgatccggaagcg

SEQ ID NO: 414 - DNA, 300 bp, Escherichia coli
gggggctttatccctggtggcattggttgctggaaagagaaaacccccgcacgttgagaggtaaaacctgacaacagaacgggggctaatcttgaaccagaacaattcaagaatagccgcaaaatgttgtcattacaacaaggcggctatatgacgctcgcgcagtttgccatgactttctggcacgacctggcagcaccgatcctggcgggaattattaccgcagcgattgtcggctggtggcgtaaccggaagtaaggtgaaaacgggcgtcaggctgccgtgatggcaatatgcgcc

SEQ ID NO: 415 - DNA, 451 bp, Escherichia coli
ttactgatttagtgtatgatggtgattttaaggtgcttgcgtggcttccatttccatcagatgtccttcctgctccgctactgaaggcatggtgcgtaacggcaaaagcactgccggacatcagcgctatctctgctctcattgccgtaaaacatggcaactacagttcacttacaccgcctctcagcccggtacgcaccagaaaatcattgatatggccatgaatggcgtcggatgtcgcgccagtgcacgcattatgggcgttggcctcaacacggttttacgtcacttaaaaactcaggccgcagtcggtaacctcgcgcatacaaccgggcagtgatgtgattgtctgcgctgaaatggacgaacagtggggctacgtcggtgctaaatcacgtcagcgctggctgaaaaaaaaaaatttacgcgtatgacaggatacggaggacgg

SEQ ID NO: 416 - DNA, 214 bp, Escherichia coli
ggtgccccaccggcgtggcctgttcggtgtgccccggcggagtgacgtccggccatccggtcaatcccctgctcggtgcaaaggtccttcccggtgaaaccgacatcgccctgcccggcccgctgccgttcatcctctcccgcacctacagcagttaccggacaaaaacgcccgcgccggtggggagcctcggcccccggctggaaaaatgcct

SEQ ID NO: 417 - DNA, 200 bp, Escherichia coli
tgcaggctgatgcctacgccgggttcaacgagctctaccgcgacggccatataaaggaagccacgtgctgggcccatgcccgccgaaaaatccacgatgttcacgtccgtaccccgtcagccctgacggaggaggcgctgaaacggatcggcgagctgtatgccatcgagtcggagctcagaggtaaaagagcagaggaa

SEQ ID NO: 418 - DNA, 236 bp, Escherichia coli
ccagatgctgccggttacttcaggttcgtctgccagaacggctgcgtctgtggccagtctctgggggaagtgcgtgttccacaccggggaaatgtagtggagaaagttatcgaaggggcttacgaggtggtgggggtttttgaccggattgaagagaaacgtgatgccatgcagtcgctggtcctgccgccaccggcacgccaggcgctggcacaggcggcactgacttaccgtta

SEQ ID NO: 419 - DNA, 359 bp, Escherichia coli
ggtaatcgtatcggcgtgcatgcgcggttatacgattacacatcctgtcccgatttctgaggcgttttaacggtgaacggacggcaaaacgatggagctgttgaacgtgaaaaccacgaaatctggcaaaaatcacggctggcgaggcttgcataggagtaagccagtatacactcgctatcgctacgtgactggtcaggcttcgcccgacaccccaaagggcgttgcgttgcacgcaacacccttgcctagaatagatcttttacgccgatttgtaagtggttgtttttagtgtgtttttatttacctgtcgcatccaggatgacacaacgttgtcgcatcctggatggacaacacgc

SEQ ID NO: 420 - DNA, 294 bp, Escherichia coli
caggtttctctttgccgaacatggtctgctttaacccgtcacaaccacatcacacctgttttcacttttatcttctgtcttcagaggtatcacactatgaaaatcatcacccgtggtgaagccatgcgtattcaccgtcagcatcctgcatcccgtctttttccgttctgcaccggtaagtaccgctggcacggcagcactgagacgtataccggtcgtgaagtacaggatattcccggtgtgctggccgtgtttgctgaacgccgtaaggacagttttggcccgtatgtccgg

SEQ ID NO: 421 - DNA, 226 bp, Escherichia coli
gaacaacggcgggcatttatggcacccgaaccggatgacgatgatgacgaaacatgggtactgttcaatgccatgaacggtaaccgcgctgaaatgagcccggaagccgccggcattgctgcctgtctgatgacgtacagtcatcatgcctgtcgtacggagtgttatgccatgacggtccaattattaccgcatgcgggatacgcctgcagcatccggaatgcag

SEQ ID NO: 422 - DNA, 562 bp, Escherichia coli
  modified_base (3)..(3): a, c, t, g, unknown or other
  modified_base (6)..(6): a, c, t, g, unknown or other
  modified_base (34)..(34): a, c, t, g, unknown or other
  modified_base (42)..(44): a, c, t, g, unknown or other
ggnaancgtatttgacgcactgaaagcaatgggnaaagccannncggtagaactggcggcgcggcttgatatcagccgtgaagaagttctcaacgaactgtgggagctcaaaaaaatggcgttgttgataaaacgggtcacacctggtttctggctgtcgaaggtgaagccggggtaaccgaagagcggccagtaaaatctgaaacacaggatatgctgaccgaagaggtcgctccaaaagttagcgctgacatgatgattgagtttatctctcaggagggggctaaaacctgtgaggaactggcggggaagttcggtgtcagcactcgtaaggttgcttccacgttggcggtggtaacagcaacgagacgcctggtacgcgagatcagcaacggaaaattccgttacaaaatgcctgatgtcgaaaacggcgatttgagcgccttatcatcgcagaataagcaatcacaccatgacgcagaaaacagcgcggcaggcgatgaaatgaatcgttttccgttggcatcagagagcacggcaaaggccagtacagatgagttta

SEQ ID NO: 423 - DNA, 5677 bp, Escherichia coli
  modified_base (2)..(3): a, c, t, g, unknown or other
  modified_base (8)..(11): a, c, t, g, unknown or other
  modified_base (13)..(17): a, c, t, g, unknown or other
  modified_base (22)..(22): a, c, t, g, unknown or other
  modified_base (28)..(28): a, c, t, g, unknown or other
  modified_base (31)..(31): a, c, t, g, unknown or other
  modified_base (36)..(36): a, c, t, g, unknown or other
  modified_base (41)..(41): a, c, t, g, unknown or other
  modified_base (56)..(56): a, c, t, g, unknown or other
  modified_base (97)..(103): a, c, t, g, unknown or other
  modified_base (108)..(109): a, c, t, g, unknown or other
  modified_base (111)..(111): a, c, t, g, unknown or other
  modified_base (119)..(119): a, c, t, g, unknown or other
  modified_base (122)..(122): a, c, t, g, unknown or other
  modified_base (5651)..(5651): a, c, t, g, unknown or other
cnngctgnnnnannnnngctgnctgcanaantttgnttacntcgtcagcggtaacntttactggctctggttgtgcggtcgtgtcagatgcaccagnnnnnnnttgtnnanctgagtangtnccgtttttacgtgcgaagtattcctcttttgtgatttccgtagctcccaaggctagtgctttttccagaccagaaagtttgtttgcgcgaccgtatttttcgccatccttgtcggtgaagaggaagtagaacggcccctcacgctctacagatggttcgacttccactttgcattcggttttttcgttgcccggaattgccgtttccactgcatcagtttctggtactggcgacgagagagtatcagttgcgctctgatttcttccttcatcttcaaacacgccctttgtagtcaggtattcagtaatgtatttgttcagtgccacagggtctttgtgaatgtcgatcggacgttcacggacaaggccaaaaatagtctggcggtcgtagcgaagggcatcaggctgtttgcgcattgatgccgagatacgcttccagtcttcgcggtcgttgtcgataacttcattttttgcccagcgatggatgctgccgtcaatgtttccggcatccacatcaccaggccagagagcgtaggccagttcgtcatccagtgttttccatgtctgcttgtattcgcgatgaatggcagcaatgaccgggctgatttttcctgttgaattttcactgtgctgttgattggttctggcgcgggcgagatcaacaacagacgtgtattttccggtttccttgcgttcaccttcgcgacgttttttccagatgcgcatctctgcctgaatttcgggccatttggcaccaggcttacatttatgcttaacccacccgatggcatgcagcttaagctccggatacatggcgttaacttctggcattttcatcaacgcttcaacgatatgtccgtcgaatgttgccatgtcttcctgcaacaattcctgtgcgctaataaccatatcaacggtgatgttttcacatgtgtcgaacttaaccatgacagcgttctgtacttcaggggccagcttgtcaaaagtgacgttcatcggatcggattcagtctcaaccgggacaaaggaagcagactcctcatcccagcggttttcctgcatatattcagcatcccaggaatcgagggcagggcggggtataccgggtttatcctcgcagacaagaaatttataagcgcagtcctgagcagccggataatgctccaggaattgccagtgaaattttgcgcgggcgcgacgttcatcaccggcttcaatggcagtggctacagcgacggcaccttcttcctttattgcctgttcgtccggaatggcggcgcaaataaagactttactcattttgttttacctcattacagatttaagggtgaacaaatccctgccattgctggcatataagaatgaatccggatatttattacggaactgttttaaagacctgccgggatttcgttattatcctggtgaataactttatcgaccgggtaacagttaccgggaattttctgttcggttgctgcagtcacacactcctgcattgtcctgtgaacactgactgcaatatcaactggctctccggaaacaagaaaaactgtcagaacaagtgcaaatgctgtattcattgccagcatccttttgtatcggacgtaaacgggccagcattgaaagaatgcatattttatttaatagctcccgttcgtgttttctcttgttaatggcatcttcagtaaatacagggttactgatagtgacaccaatttcaaaacaaccttcagacgtattaacgtttggtaataacgtttccattatcgcgtcctcaacaatgaattttgtgatgcggtgcctggtgcctccaggtgacgttaaccagttaacaattaacgccggatacagagaatccacccataacactgtttttggttttaactgttccgcgtgcgctcagccgcattcaccacatcacaaaattcactttaaaaaagggcggcagagcagtcacggagtaaaactgataccgccaaacgtcaccagaaaattgataacagagggcgttgcagcggggttgtcacttaagcgtatggtcaacctgacaacccggtgtcctcaacgggggaaggaataaccccgccatacttaccgccgcgccatttcgcggattgccacaaccggaagcgcacggtcgacgaaaatttaacgacaggctatctatgaaccagctacctcgccgtgcgctttcgcgttatggtctgacttttcagggaaatatcctttcagtaaactgtcagtgccggattcttatccgtgtccggcgcacgaccacacgctgtcacgagaggtctccattctcaaccagtaacctcaatggaggataaaatgtcagagcaggagttaaaacttggtgcatgttattgtgttctcaaggagctggtacacatgcttccatctactcagtatcaacagttagttggcaatttaaatcagcgaatcgaagctatgttaaaatctgatggttttaataacgtagaaacgctgatgctaaaaagatatcttgatggattaatcagataacatttttttacggcgttcatattcgttaatatttatgaagcctgttgccagaagcagttcgttaatttcatggttgtttggctgtttctggctctttgagctgggatcttccacttctttttctgcaaattgttttgctgtatcctctgtgccatggatatttaaagctgtatctgaaaacagcccagtaaacgcatcgcgcacattacgagccatattatcagtgtctttttttgttaccgattccaattcaagttcgttcagacgatgacgaagtgtgtgtgctgcaatctcctggattgaaggaggtaaatctttaaattccatcgtcaacctcatcagtcagtgtttcttgctaaccagcgatgcgcgccagctgcggttttaaacgttttacttttggtatacgtcatcgcggtgaaggtgccgtcctggttagggaacacaccgcataccagagattcgttgttgccaagatcgatagtatccatgctgacctcatttccccttaacgccggggtagcggaacaaaaacctgctgcatagttattaaagttgaaccctgccgtcatgttcttacgcctcgggctggctacttaacccctgaccactgcctggtaactcgaagtattgccctgcattctgtggggcggggtggtggcaggtatataatgtactttgcgttcattgttgtaaagtacttttggtacattttgtgtgtaaaaaaatgagatgggataaagtgaagcacaaacccggaggaaggcgctaccggatttatgctggtttaagaggctttttgttttttctttcgtgctaactcttcgtaaattgcattgtacttctgtttttctcttcaagagtttttaaaagttcatctgtctcactgtcagggagctcgtccagaaggtcaatgatgattttttgtcttggatttaactcctgatagaaacgtacctgtccactttcttctgtatcctctcccaaaagataggttggtgttgttcctattagtgttgctaattcccttaatttctcccggcgaggaattgtttcgccattaaaccatttgctaaccgcttttggtgttaatttcattcgacgggcaatttctgcctgccttccatgttgttcataaccagcgttttcacaggctagcgcaagcctactggcgaactctttacgcgctttatcttcatgaaccataagttcaatgatattcgctcttgaatgtactgtcagttctgttatagcatgtactcaaagttcacattgtgagggtgatatgaaccagaaaacacttgaagatgtaatcaaaactgttcgcgttgctgttgtggccgacgtttgtggtgtcagccaaagagcaatctataaatggatggataacggaaaattgcctcgcacagaatataccggcgaaacaaattacgctgaaaaaatcgctcttgcatcaaacggattattttctgccgatgcaattttaactattggcaggaataaaactactacgaaaaagctgatgggagttgattcatgaaaatcaagcatgaacacatccgcatggcgatgaatgcctgggcgcgtcctgatggcgaaaaagttccagcagctggaataacccaggcttattttgagttgggtatgacgttcccagaactgtatgacgacagccatccggaagccctggctcgcaatacccagaaaattttccgctgggtagagaaagacacccctgatgctgttgaaaaaatgcaggctctgttaccggcgatcgaaaaggcgatgccgcctttgctggtggcccgtatgcgcagccacagttctgaatattatcgtgagatcgtcgaacggagggatcggctggtgaaggatgtcgatgattttgttgcgtcagcggttgttttgtatgaccagatgaatcgcggcggcccggcagggaatgctgtggtgatgcactaaaagcacggtgttcgggggttttatgagcagcaagcttcatggtcttgtctgggaagggtgcgccttcaccggcatgatcttatccagggtggcggttatggcccgtcttgcagactacagcaatgacgagggcgtgtcatggcctgccattgaaactatccggcgtcagatcggtgcaagaagtgaatccacagtgaaatcggctattgcagaactggcgaaagagggctggctgacgaaggaagagcgtaaggtcggtgggcgtaatgtaagcaatatctatcggcttaatgtggaaaaactcgaagcagctgcggcggcggcgcgtgagtcatataaaccgaaaagaaaaattagcccggcaaaaaatgacccgttaacagttgacccgtcaaatattgacccctcaacggttgacccgtcaaattttgatggatcaactgttgataaaaactgccgattaggggggcgatgattgaccccgatccgtcagtattaaaacctgatccgtcagataaaagatcttcttgtccggacgcttcgcaaccggacccgcagacggctgaacaggattttttaacccgacaccctgacgcggttgtgttcagtgcgaaaaaacgccagtggggaagtcaggaagatttggtgtgcgcacagtggatctggggacgaatcgtgagtctttacgagcaggcggccagcgatgatggcgagatcactagaccgaaagaacccaactggacagcatgggccaatgacgttcgcacaatgcggatgctggatggcagaactcacagacaaatttgtgaaatgtttgggcgtctccagcgggattcgttctgggtaaaaaacatcatgagtccggcaaaactccgggaaaaatgggatgaactggttatccgcctggggcgttcgcctgcgcagcgttgcgtgaatcacatttctgaaccggacactgaaattccgccgggcttcagggggtaagtgttaatttctggtcatgaggtaattttcaggagggcttgtggcaaaagttttncacaagaagagcgggagaaaattaaa

SEQ ID NO: 424 - DNA, 4594 bp, Escherichia coli
ggcgaaatacgccgctacgacaggcgcctgaatataatctgtcgcgagtgccggaagagcgaagctatgcagcgtgtactggcattttatcaaggaaatgttaggtattttagacgttactagattaaagagcattagttcagatgtgaattgacattttcatggcgcagggtagagccagcgtggttgtccgctttgcgtcaaaaccagatattaccagatttagacatatattcccgatagccctgctctgatgctacactctgtgctattttcatgaccccaataaaaatatttatgactattgctgatttcaaacggcctaaattggagctcccaaacggggcaaacaaactactactgcactcttgctgtgctccatgttccggtgaagtgatggaggcgcttcaggcctcgggaatcgactacaccatctttttctacaacccgaacattcatcctcagaaagagtatttaattcgtaaggatgaaaatattcgctttgctgaacaacacggcgtgccgtttatcgatgctgattacgacaccgacaactggtttgaacgtgccaaaggaatggaatgggagcctgagagggggatccgttgtaccatgtgttttgacatgcgttttgagcggacagcgttgtacgctgctgaaaatggtttcagtgtgatcagcagttcactgggcatttcacgctggaaaaatatgcagcaggttaacgagtgtgggcggcgagctgttgcgcattatccgggtatggtgtactgggattataactggcgcaagcagggcggctcgtcccgtatgattgaaatcagcaagcgcgaaaaattctatcagcaggaatattgtggctgtgtgtattctctgcgcgataccaatctacaccgcaaatctcagggacgccctcttatcaaaattggccaactccactacggaaaagaagagaaggagtgattttatggatcacctttctgattgatttcatattggcgaggtgacgtgagttaagtagaatggctgcgggtgcttgaggctatctgcctcaggcatgaacactgaaaggcagatagagaaaaaccccagttaacattacgcgtcctgcaagacgcctaacattaatctgaggccaaatctatgccacacaaatgtaggttagcctcttacgcgccgaaaggcaaggagaagcaggctatgaagcagcaaaaggcgatgttaatcgccctgatcgtcatctgtttaaccgtcatagtgacggcactggtaacgaggaaagacctctgcgaggtacgaatccgaaccggccagacggaggtcgctgtcttcacagcttacgaacctgaggagtaagagacccggcgagggagaaatccctcgccacctctgatgtgtcaggcatcctcaacgcacccgcacttaacccgcttcggcgggttttttcacttactgtggttgtgaatacgattggtattaggctatgctaacaacattagcctgactaattttgtattgacttgatttttgttaaagaacaggacggagaagtaagggtacacccaatgagctacgcactaaaaaaacacccgcgattgactattccccctcgcgataaaagcgttgtggcagctccgcgcccggctatcgatgaaaattgcactcatcgtgagcaggtgaaaaatgctttcgatttcggtttttctcgttacgagaaggcaatggaagaactttcaaaagtgtaatgatgggtattgtgctctatggctgagattgttgaaggagtgcactacctttcgtttgatgatcttaccgaaattaatcgccttttaattgagcttcaaacaccagatgaacctgttagtgtgctgagtgttgataatttaagttcttctcagtctcgtcccagcatggttcgatggtatgaacagactaatgacatgtttgtactggcatcagtattgattgaaagtctgattcagaatcatccatttgctaatgcaaacaaacgaacagctatgatggctggttatgtcttcttgttgttgaatggctatgagttaacagcaccaggcgatgaaatcgtggaaatggcagagggactggcctgcaaaacctatactcgagaagatctcgagaactggttgtgttattggtctcgtgcgtatgacagccgggaattatgtaaaacaggcgcaactattgttttgtatgaaactatcaagcttaaaatagaacagcaaaactaaaggtgcttctaatgaaaacccgcttcggcgggttttgttgtattggagtatcatgatattacctggattccgtttttctctacgactgaaagaaggcgaagagcggcacctcccggccgttttacaccacgttcccagtctgatatcaggtttttactgacgttgaggtatctggcaaaaacaggttgagacagatgctctcgttcgcgcagtgcacggatcctttccggagacattaccggcgctggctggagacaagtttcatcgaattctcgcatagtctgtttcgttactgcgccgatatcatgaagcgattccatcatttcatgtacggatgcaagcgcatcactgcggtaatttttactcattgggtacctccgtaaactgaccctgtagaatcagttgtgccagttgttcatctgttagattgagtacgtgaggagccccttccgaaatgcactttcctcagtagcggttatattttcacgttcattttttgcgtatgcatatacgaaaaaggcccttgtgccgacgcgatagaaaatgattgtgcgataaccgccagatttgccgccaccgactcgtggcagacgttgcttgataacgccgttacccaggtttgctgagataagcccgttatcagcctgtttaacaatttcgcgcagtgattggtcggatattttgttttgcgtgcaagtcgctcaaaccaggcgtttttaaaaatgcgcattttttgttccgttattaatgtataacacatagtgttacattgcgtagggatctgcaatgccatcagtttgacaacgtcgcgtatccgggattatattcatcgcacgccagcaaaatctggcgtcgggattaggaaccccggatagaaaccgcgacagagacacgccgcgagcgtgttttttattgtcgtatgcacacgcacatctgaattatggtggggcgtataggggagctgaaaagctcgccggttggtttcccggtagttcctaaccctgtacgtctcgccacccgatgattaggaacctgacggtggtgatagtttagaaaccactcgagggcgtcattatgacaactcaagtttctgttgaaacactctccacgattacttacaagcagatccccgttatcactaccgaacttttggcgcacctttacggcacagaagctattcgtattcgccagaatcaccacgaaaacaaaggtcgtttcattgaggaaaaacacttcttcaaacttgaaggtgaaactttacgtgagttcaagcacagagtagcttttaactactctgtgaaaattgcccgtaacgttcgctccctcatcctatggacagaacgcggcgcagcccgtcacgcaaaaatgctcgaaaccgatcgggcgtgggaagtgttcgaaaaactggaagactgctatttcagtcaaaaaatcccagaacaacttcagcttccagaatcaacgctatctatcaactaccctctctcgtggttctcagataaccatccctacgccacgatgaactatgttgatcgcaaggttatcagccttgatgcttccgtgctcttcgatatgccaagcccaactatgcgcatcctcaatgagctacacagcaaaggctataacgttgacgccgctgtcgccgaatttaacgccttcaagcatctgacggaagaaatgcgccgcacgctacaggatatttcaagactgtcagatcgaaattcccgaaaaggcttctcgttaagtctttaaagaacagatcgtttgacaatgctgcattaacggggatatattctgcctcatggtgctcaaaacaccttagcaagtagcggttaccgcgcccgacagacatgcggtttttttgtgtccagtcttcttggtttatgaccgggcgtgcggctaatacaataccagcaatgggaatatgcccgccgactacttgcggttttgagcgcccggtcaccctctcaaaaggggtaaatcaaaatatcaagtaggacgcaaagcatgaaaaccatctccgtggagtccctctccataatttcatttagtaatatacctgtggtgactacagagcttcttgccagcttatatggcacagaaccagattacatccgaaaaaatttcaatcggaattctggacgatttgttatcggtaagcactactttttacttgagaatgaggagttgcgggaatttaagcacagcatgtctttaagaccttctgtgaaaatcgcccgtaacgttcgctccctcatcctctggacagaacgcggcgcagcccgtcacgcaaaaatgctcgaaaccgatcgggcgtgggaagtgttcgaaaaactggaagactg

SEQ ID NO: 425 - DNA, 2040 bp, Escherichia coli
  modified_base (56)..(62): a, c, t, g, unknown or other
  modified_base (88)..(88): a, c, t, g, unknown or other
  modified_base (91)..(92): a, c, t, g, unknown or other
cgtcgttcgtttcacctccaaaggacgtgaatacgaagttgacgaacggctgattnnnnnnntcgacaaacaccgttcgcaacctgangcnnatcacatttatctcactgacgacacttacttctgcgccaccaacgtggtgcaggtaaatcttatcagacaggtacaggagtcacgcaaatgaccattctggactacatcgccgccaatccgggttgtagcggtagcgaaatcgccacagcactgaataccccaaccacagccattaattcggagttacgccgactctggcgcgacggcttagtcatcagagaagaacgcaaaacaggcggtcggttctcttacctggtaaacccgatgccgttcgggtgtggcaacccacttactcacatgtttaaccagctactgaaggaagccagagcatgagcaccatcaaccaccagaagctacgcgaactggcatttgccctgcaacgaatggcaacgcctcaaaaattactggcatttcgcgcaatgctctcgccgtctgccgtgctggcactgctggatgagctggagcacgccagaaccacggctcctgccattcgcctgacgctccatcatgaaatcgctgatttctgcgcgacgttgaaggcgccaggcgaaccggaaacaccggaagcaatacagcaagagctgctgcaacgcattgacaaggtttttgatttttttctgaaccagtaagaaaccagaacatgcacacacaaaaaaaccgcttgccatgccgcaatcagtcaggttacatttccgctgcacctcataaaacgggtgccgggatttccaccccgctgactatacacgcgcacaaccgcgccagcggtttttttgtgcgtaccgcatcgccacgtctttttcgcacacgaattatggtggggcgtatggggccgactttggtcgggccgggttcgtgtatagccggttgtggaaaccctgtacgtctcaccaccccgagttttccacctctggatggtgagttttcaaaacttactatacacgaggccacaccatggcaaaccgcaaacaacagcgcgcatacgctgcgcgtcgtcacatccagactgaaatcaaccgcagactttaccgcgcatcacgcgtcgcgcaaatcatgcacatcaatatgctgcatgagcgcagccacgcactatcaaacatttattccgcctctgttttcagctatctggcggatgatctgcacgagcttcaacagctcatccagcagcaaaacaaactccattaattcctgttccgggcctttcctgcaccttgcggcgggaggccttcgcacatctgtagtaaagagaattgcagcatgattgacgctcatgacttcacaagatgggtgcgcacacaggacacccgtctggctcccgttcttcaggggttatttgatctctacatccgtggtcgtgacaacagagcacgcaccacaaaaccggagaatgcagacaccctttatttcacagtagacgactgctaccgcgtggacttcacaccacacggactggcgttgcactgcctgacaccgcacggcgaatcactgctggcgtattacgactccccggcctccgtatttgcagcaatgctggcgcatcgcactgctggcgggtgtgcctcgctgagtgaatacaccgctgaatttaaccgcctttccgccctcttctcgcaggagtggcagcgcgtgacgggataccagccatgagtgcgtttgcatggagctggaatgaaccacgaccagctattgatccggccagatttacggagcacaggcaggaaactgaaaccgacctgcaacgcgccatccgttactaccttgaggcggacaaaagggcacaggaagaacaggaagcgaagaaagaagcctttttcgcacaatccgccatgggtaaaaaactcatggcatcccttgaggaagccggacagcgtgagaagctggcacagagcatcatcagtaagcgccgggcaacagaacaagacccggtagcccgtgcctttgccacactga

SEQ ID NO: 426 - DNA, 8577 bp, Escherichia coli
  modified_base (3)..(3): a, c, t, g, unknown or other
  modified_base (8292)..(8293): a, c, t, g, unknown or other
  modified_base (8345)..(8345): a, c, t, g, unknown or other
  modified_base (8352)..(8352): a, c, t, g, unknown or other
  modified_base (8357)..(8357): a, c, t, g, unknown or other
  modified_base (8361)..(8361): a, c, t, g, unknown or other
  modified_base (8372)..(8372): a, c, t, g, unknown or other
  modified_base (8374)..(8374): a, c, t, g, unknown or other
  modified_base (8383)..(8383): a, c, t, g, unknown or other
  modified_base (8389)..(8389): a, c, t, g, unknown or other
  modified_base (8392)..(8393): a, c, t, g, unknown or other
  modified_base (8573)..(8573): a, c, t, g, unknown or other
ggnaggcggaagaaacaaaaaacagcctgatgcagatggccagtgagcatattgcgccacttcaggatgccgtagatttggatattgcgacggaggaagaggcatcgttactgactgcatggaagacatatcgggtattgttgaatcgtgttgatacaacagtagcatcggatgttgagtggccagtcgccccgcaataaaaggataaagccatcgatagaaatattgatggcttcatgtactctatttatacaatacaacaccgctcttttttgttatatatgtgcagttcgatggtatatctttatttataaaagacattgcacctatttttacattatccccaattttacgtgataatccaatgatgcaacaattggctccgatatcaacgttattaccaatttttactcttgaaccaggcatgtcaccatctatctgtccaatggtagtattctgtcgtaacaccagattttcaccagcatcaacagcaaaatgaacaacaattccagcatgatggggaattgttaacccttttccaatatttgcgcccaatccaatttcacaaccaaatttgttaattattttaccgtttaactttttggctgctttcttatgtaatttattaccattaatatacatttcgttagccaaccgccaccagaaaaggaaattccggttacgctgttttttctctcttaaaagcctccagatatccatacgtttccgccgaattacttcatatttccagaagttttttaaattagtagagtccccaaataaaacaaagtgaattgccattaagtaagacagcacgataatctccttaattattatttcagaccacacatattataaggttaagagattataaaatcctgttgtttattattcaaaaacaattttctgagaaggacatacaacagcaagtcgccagtcaccttcatcaggaaattggcgacatacgttaaatcagagcagccccttaactgagctggccgcgctattaagggatgatgtcaccttatctttgaagccggacaacatatcgctgaacgatgaggattgcaggcgctcccgcaaatcctcatcacagcgttcaagagtcagtgaaaattctatctttttcgccttaccgtagcgatcaaactcggaacgggtcgtattcgtttcagtcagtacatacatgccgtaaatctgcccgacaccatcaatcagaggccagggccgtcctgtatatgcctgcgtggtcagcaatgaaagcgacacttcgccacctgtaatttcaggataaagcacgccggaaagcacaatgcgatcatcacctgcaccgatatactgccagcttgctgaacggttaacgcgttcatttttcacatgccgccagcttttgttttgctgtaactgctgatgcggcaatgtgcgcagctcaaaaacaaacatgccgtagatcatcatcatgaccatgactcctcaatctttatcgtaaaaactgccacgtccggcacgggcgcgccgttccatctctgccctgaccatttcaccgaccagtttcgccagttcgcggggattctgcgtaacaacgttatgcagatgaacatgaatttcaccgcaaaatccggagacagcaggctcccggttacgggaagttgcaggaactgatgccactggcgatcgtatggcctccgccaccgggcgggagctggccgcaacaacagggaccagcgccggaggcagcggagccgagaccacgggtgtgatattaattgcgggggcaggcttactgacctgcgcaatcttccgctcctgccactccccacgaacagcaagtgcgcggggcaggttcttaaagacaatatcgccggggccaatgcgttttttcgtctcatcaaccagcttacctgtgttatcagcaattttgctgagtctgcgtagcgtcccggtattgctgtctgtgagcggtttgttgtctttgggtttatcacctccggtgccattgccattttccacaggcttcggcggattgattttcgccaggtccccctgaagcaaggcaaccttgtcctgaagaatggccgcacgctgtgcgtcttcgattttcttgcgcgccctttccgcttcatccggaaggacaccaagtttttcaagtatccacgccagcgtatccagtagcatttttgcaggtgtcagaacaagttgtaacgcaccgccaagaacgttaccgaatacctcgccagcactggtgcatttatccagcgtttccttgctggactccatcggtgacaacagcgatttaaaccagttaaacaccaggctgatcccgcttccgattgcgtcaaaaacagggccaaaccgttcaaaggtttcacgcaacggggtcagcctttccataatcccgctgaacaccccggcaaaaaatgccctgatgggatcccagtatttccagataagaacggcagctccggcaagcgcagccacgataagaccaaccggactgaacagcgccccgatagcgccacccagcaaagaaacagaacccgtcaccattccccacagcgcaggcaacaccctgatgacattcattgaccgggtaagaatgtcgaaaccaagacgcaaggtggccagcttcccgtaaagcaccccaataaccagcgacaacgagccaatcgttgcagtcattgccagcaacgcaccgcctgctatcagtagctggcgcgtcagtaccggatgggcctgcgccagcgaggtgattttttcaagcacccgcgtgagccactgcgtgacagaacgcagcggaccgtcaaccagatcactgatgcgaatacgaagaccttcccatgcgctgtcgagatttttcaggtctccatcaaggttatcggccattacttttgcaacgcgatcggcctctccccttgccccctgcaattctctggtcagtttttgcagttctcctgaaccagccgccgcaacaagcgtctgcaaaccaacgaacgcctcttctccggcgatgtccttgaagaaggagacctggtccacctgccgtatttttgtgtcgccttatagagatcaagcagcacatcctccatcgggcgcattttgcctctggcgtcagcaactgacacccccagctctttcagtgcatcagccgcagcttttggcggtgatgcaaggcgggacagacttgcgcgcatggccgtaccagcatcgcttccgcgaagaccattattggcaagcatcccggccatggccgccgcttcttcaagactgataccaagttttgcggcaaccggaccggtatacttcatggtttcgcccagcgcgcgtaaatcagtattggtccgggtgaatgctgctgtcagcgtatcgccaacccggtccatttgatcggctgtcaggttgaactgtgtgaggatattggagcctatatcagccgtctcgccgagttcgacgccacctgccagcgccatattaagaacaccgggcaatgcggcctgaatggcctgcggagtaaaaccagccattgccagaaagctcttcccactggcggcatcactcgcagtaaactgtgtttcagaaccaagttttaacgcctgctcacgcagcgccttaaactgcgggctgtttttgtcgattcgcgtcagtgcctgaacgcgggacatctctttgccgaacccgatcgcaggctgcaaaaaacgcccggcagcatagccgccagccgctgcagcaccaattgccagcgcaccacctgttttcagttttcccgcggtttcctgcgcgcgcgaataccgctcacgcgcccgcgttacacgcgcaagcgcctgccgttcgcgttcaagctggttgttgtactgttcggtgcgtctgatggcctgctggatggtgttatcgctgcctgtcagggaaatgccgtggcgtttcagctctccgccaagttcccgcattttctgaatttcccgtgtgcgcgattcattcaggcgttcaagccgggtgcttaactgctgcatcagcttttgttgtttttcgctgagcactgtacccgtgcgttgtaactgattaagggcgttaagctggcgtcgtgctttcacgatacccgcatccgctttcctgacagcgtcgcgggcgcgctcaaatgaacgcgcctgacgctcgagatttttgatcgccccctgcgttcgctggatggagtcaccaaactgccccatcaggcggcgggcgttttcggcaggccgggtcagcctgtcaacggcgctgaaagcgacccggatatcaagagtcttcattgtctgcactcccgctgcgaagtgccgcccgctcacgccagctaaccacttcgccgggcgtcatcatgaagatttcggcgggcgaccagttaaaaataacggcaatatctgccacaaagtcttctatgtgctcaaagcacacaaccgtgatcaggcttccgtcgcctgttcgttcttcccgccagagtccgcaccgctcaaaaaatttacggcaaccgcacataactgaataaagtcacgggatgccatttttttgatcgtcacttcatccagtcgcggtgatgtcacgcgtgacagcagcgtaaacatggattccgctttcagattcagcacatcagacagcgacaaatctcgcagagatccagcctgctcaatagctccggtgatctccacatacgtgattttttcgccgcctcgctcaattggttgggtaagttttacgccacgctcactggtttctttcacagtgtcagcaacgaccgtgttttcggtatcgatgtttttcgtctctttcatcaggaaactcctttcagtcagaggcgacgcactgcgccgcctgcatattacttatcagccaagcccaagcgcggaacggatgcgatcgggcacaatgtccttgccgtccttccggtaaatgaagttcagcaggtcaatctcccacaacgggcgatcgttaacactcagcttgtagtaggtgtttttaatggcgtaagtgtgtgatgtggcttcgccctgtttggcttcccccatatcaatttccgtcacacgtccgcgcatctcgatttcatacagatcgctttctgcatcggtgtagtattcacccgcaaaacgcagcagcgtgccgtcaatcgtgccgccatatttaaggaacagcgcacgaacagctccccccataacaaaactcgcatcaagcgcggagtcgtccagaccgagatcaatacttaccgcccccatcatgccaccaccacgatagctgtcggttttgcgcgtcagtttaggcagggtaacggacgtcaccttacccacttcgttttcaccatccacaaacagcgtaaaaaagcgaagatgttttggtacagccatcagacacctcccagcaccgcaaatgcgggaccaaagaattcatcagtaaacgactggtaaagctccatgtcttccagcgggggaacaggcgtatatttgtagcgaatacgcacgcgcccctgacgtaaattcgtggtgccgttatccaccacgtcataccagcacgacgccccaatcagtttcccggcagtaaccagtgaatccagttttgccctgatggcactgataacatctttcacgttcgcaggcgtcagtggactgtcgatggtttcaaactgcgcttccgcaattgaatcagccagcacctgtgcggttcgggtatacacctcaaagatgtaggcgttcgtttccggtgtgcggttgccccagaagcggaacccgttgcgacgaataatggtcgtgatttctttgttgttgaggctattggcatcgctgtcttcggcctgcaacgaccagaacacatgcctggacatccccagcacatttttaaccggaacgttggacagtgatttgtgccatccctgctcatggtcaatgtacgcacgaaggccgcacgcataggcaggcgcggggaacgtttcgtttttgccacttttcgggttgtaggcgatgaagtccggccataagagcatcacctcacgttcgttgaatttctggcggtaggtaatcgcctcagccatcgtgttacagccgtgacatgaggcatacacaaacgcgcgcagtttacccgcaatcacgcacagggattttgtcaccgcctccgtgtccagctccggcgcggccagaatacgcggacggtatccgatgctttcatcctgctctgcaacaagcagcgcatacatccccgtatagctgccgtcagattcagaaccaccgataaccagttgatcctgcgtctttccgtcttcttctttgtgttcagccacgcgaacgacgatcacctttgtgctcacctggtctgcgatggccttaagcgcacgataaagcgtccccgttgttccgcattttcccagcacgtcattaacgcgggtcagcagtgtgggcttgttcagcgggaacagcttcgcgtccgcatcatccgccgttgccacgataccgataacgctggaatcaacatcgttaatcgctgttaccaggtcggtattttccgtaacacgggcaccatgaaaacgagtttcactcatagcttcagccccttgtatccgttaaatgattcggcaacaatcatcacccaccacgcgcgtaatctcacccctgcgccgttctcccaccacggcgacaacaaaaagcagtaaccccctccgcacgcacatgcgaccatgccgcacagggagggaacagatgaccgacaccaccatgcaattgctcagtcagggcacagaccccgtgaaaatgccggattttgatattctcgcggagggtaaaacgctgtcaggcgtggcagagcgcctgatgagcctgtcactgaccgacaaccggggatttgaggcggaccagctcaccatcacgctggatgatgctgatggtcagttgcagctaccgccacggggcgcgcgcctgacggttctcattggctggaaaggagaaccgctgacagaaaaaggcacttacattgttgatgaaatcgctcacgaaggaccgccggacaggctgactgtttcagccagaagcgcagattttcgggatgaatttaacgttaaacgtgaggtgtcctggcatgatgtgaccgttgagcgcgtggtatccgccatcgctcatcggtatggtctgaaaccgcaaatcagcgaaatgctgatggatatcgaaatcgaccacgccgaccagaccgaagaaagcgatatgtccttccttacgcgcatggcggaaatgctgggcgcaatcaccacggtaaaaagcggcaatctgttattcatcatgccaggtggtggcgtgaacgcacagggccagccgttgccatcgttcgccatcacacgcagcagcggcgatcgccatcagttccgcattgctgaccgcgaggcgtatacgggggtacgcgcttactggcttgatcttaattacgggaaaaagaaaaaagtcagcgtgaaacgccgcaaaccgccaaaacccaaaaaggagaaaagcagcagccgtgaaggtgattatatggaaggcgcggaaggcaatgtgtttgtgttacgcaagacttatcagaacgagcaggcagcaagacgcgcagcggcggcaaagtggcagcagctacaacgcggagccgcatcattttccatcacgctggcgcgtggacgtgcagaactctaccccgaaatgcatggcacggtaacaggatttaaaagcgagattgataatcaggactggattattgcaaaagccgagcacaccattgataacagcggctttaccacgcagcttgagcttgaggcaaaaatcccggaatggatagcagaaacagcgtgaatgtcttaaatataacagaagcaccacgttaagggaggtctctatgttccgttgtccgctttgtggcgcatctgcccgtatccgcacaagtcgtccggaaaatgattcaaacaccgtgcggcaaaagtattaccagtgtaacaacctggaatgcggcgtatgcttctcaacactggaagccttccataaattcacatcaaaacacgcctccgccgttcactcttcagaaggtatcccgtggcatgagctgccagcttcacacaggggaaacaatcagatgagtttgcctttacctcagaactaacaggcagaattgccggattaacaaaaaagcgatagattacgcgcgggtgcctttcggctgatggtcggagggaatacccgaaggccagatgtggaaaggccccggaaaacatctctgtttaaccgaggccctaaccgcattaccttgacaagtgaaaggttagcgcctctccgnnaaaggagcaagtgctatgtcgcaaaaatcgcttacggccatcacgttctgcntgacggnaatcntcancatctggatgntncacggttcnctgtgnganntacggatgagcttctggggagcggagtttgcggcgttcttacagtgtaagcagtaaggaaaccgcgacgggggagcaatcccccgtcaatcggttgccagggtaaggtcgataaggcactctatctcacagacatgaaacaaacccgcagcataaaaactgcgggttttctttttggtantcct

SEQ ID NO: 427 - DNA, 10141 bp, Escherichia coli
  modified_base (18)..(18): a, c, t, g, unknown or other
  modified_base (45)..(45): a, c, t, g, unknown or other
  modified_base (48)..(48): a, c, t, g, unknown or other
  modified_base (50)..(51): a, c, t, g, unknown or other
  modified_base (10134)..(10134): a, c, t, g, unknown or other
  modified_base (10136)..(10137): a, c, t, g, unknown or other
atacttatcagccagagnagtaaacgagcaaggttgttcatgatngtntnncactgctgattttgcaggtctgcggcatacttctgagcttctgctgcatactttgcgcttttatcagagctgccacctttcccgcctttttcagggcaataaggttcctcgccgcgcagttttctgcccagcttaaatgcatataacatagctatctcccgtgattcaggaagtcgattagttcttcgcgtgtggcgctgtaaaacgtcacgtcatccacgcctttgaagtatttcttgatggttcctacacgcttaaggccaatcattgcgcagtacatctgaccgtggcggaatttgcgcgcagcgaacgatgtgacgcactgaacggtggtgttagtcagaatgtatcgccagaacgccagcccgatttccttgctgaagccgcgaatctctgacaggtacatggcgtggcaatcgaatgtcagcggctgaatctcctgatagtaaacaatgccgccaaactgaccgtgcacgttaacctcaaagtaacggcattcaggcttgtaatcgtatccatcaccattgttgcttccggcaataatgtcagggtgatttccgactgcttcgatcaggtcgatgtttcgcgttggtttgaactgaatcattactgctccgcgattatcttgatggttgtggcagtaaacgccgcaccatttgactgaatggttaacgtgctgccatttgtggcaagaaagccgtctttatccacgctgaagaacgtagctaacaagatgttgtcggttgttgtcaccgcattacgactgctaaccaacgtgtcaggaacagaaccggaaaatgttagctgcattgacctgttggcggttccgctgggccacgtcccgacaatcgacagcttgaagaacagggttttgttctcgttgaacacaaccatcttgttgttaacagtgtcgaagaatggtgccaacgtgccggatgacggcgtgagcgttttcagcaggctaacaaggttggtcggcgctgtcgggatggttactgatacgccagagtaaacaacctctgacttcttgcgagtagtggcatactccagagcatcgatgcgcgattcatggtctgaaacctgcgactccagcgactgaactctggtatcaagcgacgcaatatcgctttcattctgagcgattcgcgtttcatgttcctgaagagttgattctgcctggctgattctctcctcatgattaacaagcgttgcttccgcagcagaaattcgctgctcatggtcagcgagaatcacatcctgctcatcgttcctgacttgtgcgtcataagcgccctgtccggcctcgttggccttgttagccacgttaccaacatcagtaccctgtgcgataacgtacagcagatatgactgcgaaaagatattgcgtggaaggactgatgtgtcgagccgtgtagcctgaatgattaccggcacattgagattcgaatccgccattactcaatccttatctggcagccagacagagtgacaggtgacttcgtgataacgcgcaatttgaatccgacatttttccttattcgcccgacacgcttccacaaaacgcgtttgtcgtaaacgaacggttcattctgctcaattatctgctcacgcccgtaattgatgccgtcagtggttgcagagagaaaaaggcggtcagcatactgcgcaactccagttgaagattcaacttcaaggtcgaaaactctggcgttatctgctttgaacaacggagtaaacagcaggtgttcctgttgaagcccatactggctgctgatatcgaactgcaatttgccggtaaccgattccagcttatcgccgcacgttatctgattgccttcgtaaatgaagtcgatagcgcggtacacatcgtcatacaagccagttttcaacacacaccattgcggaccattggcgcttgaagatgcgtcgtacacgagaacatggcgcggaaggtggataatcagcaactcatgagcatcaaatctcagcgattccatcacaccatcagccagttcatcagcagtgtaggagcggaggattttctcaatgctcgcgctggcgattggtgaaacctgaccggatccgatgatgtatacagacggagcacctgttgccggattgctgatgaacgcataagaatcagcgaatggcgttttgcagtaagtcccggcgatgcctttttgcaccatcagtgatggctgtgcgacatacaaagcggcaccaacggtggttgcgccagtcagggaaaaatactcaatcgtcgatgaaccaaagcagacgatgaagtctcgccatgttccgattccgatgatgccgtcaggctgcgactcggcacgatattgtgcgctgtagcggtcaggatgcgattcgtcttcaaggtcagtgataaaccatgaatcagtgccgtcttttgaccacgcataacgcccgcgtaagcgcgtaatgtcacgaacagaacctaactcatactgcgtaaacccgctgtctgcaggccagtttgagacggttttaaccgtgccatcatagcgatactcgaccagttgaccattaacgcctacagcctgagatgtccgaccatgtgccattgatacgcgaccacttccagcgacgtcaccgacttcgctttcgcctttgtagagcttcccaccacacacgcgataaacagcattctgcgccatgttgtactcgacaccgcgcgatacaccattcacatcagaacgtttggcaatgccagggaatgagcgaagatatccgctgctgttgagtatttctttgggtgtagccaacatattcactggcagatagtcgatatagtcggcgtttcgaaagtctttgccgacacctttcataagcggaagttgctgaatcggcatttattcacctatgcgtttgggatatcgccatcaatcagagggagatcgcctggataatatcggtcagatgtaaacacgtcatatttattaccctgtcctacaggaaaatctccacgtcgtcgcattgaaggaacaaccagagtgtcggtcatcaaggcatcatatgagcgtttggcgttactgagaacttgcggagttggttcaaggctgtaatcagatagcagtctcagcaataactgatagcctactgcgtgtttgtattttcttggaagacctgactcatcatctggtaatggctgctcatctccagttgcgaaagcgtaaccaatgtcgccggggttaatcatccactcggacatcatatcttccagatcatttacaccatcttcaattgattgcggctcaacatcagtcagcgatgcattagaagcaatagcaaacttacgaagcgcaaaaaggacgatctcaccctttgtcagtactgttgccattgtctgccgccttacgacctcgcttactggtcggtttcaattcatcaactgaggcaacaaagcccaacttttcgaaaaactggaagtctttttctgcgataacggcctgtacatgtccggattcgttatctgcggcaaggaatacactcatgcgatccatattgtttccttaaaacataaaaggggcggaagccccttgttattacggattaccgaagaactgaccgcccatgtgagggttaaagcacacatatgcaggcagtaagtcaaagcgcattttttgcacgttggcatcgccatctgcgtatttatgtacgcggatggagaaaccttcatatgttgcaacagcagaatcaatactgtgcagtttcggcagtgggatagagccaagtccacagaagaacttgttatagaacaggtttggcttcattgtctggctagcagtgcctactacagatacggcatcgcctgccgctacctgacgacttacagagttgtactgcgggtttgtagtgtcataaatcggaacaccagaaagcgtaaccgtcacatcgccactgctgtctgaattagcatcagcagtaaccgttgcagtgaagctaattggtgtggctccgttatacaacgcctgtttggtctgctgttgcagccagtaggtattggtgaatttaacctgatcaccagctttcagaaaacctgtaacgctggctgtcgctccggtcaatgttacagtgaactggtatgagtctttaactgcgttataggtaacagttggctgtgttttgactgtcagtgttccgccaaatgccccctgcgtacgagaggcaagcccattagacatcagtgcgcgaatgccgccaaaattggttggaatctgcgcattctcccatgcagtacgaaccaattgatctgaagcgtgcaaaccagtctgcgcatcagcaagtcgctgtgcagaccatggatccattacagcatagttttcaccttcattaacgccgaggtctttcaggaaagatgccgtctgcgcaacatcagaccatttggtgattggagtattggggctaccaagtgacaacgcaccgttattcatcatgaagtgagcaagctctgtttcaaggtcggtaacgattcgctggcgaaccggcgcgagaatttcttccagttggttaagcttgatcgcttcctccagttgctgatattcaacagcaacagtgatgtagttacctacacgccccgtagctttacctgagttcaggttgtttttattttgccctgaaatatcaccagtgggagtacggagggatgagaattgatgcggacgtttaaagctaacgctatcgccagtgctggagttgatttcacctgccagcaactgacggtctacggttttcgccagaactaaatctgacataaaaccaggaaggaattttttcagaacgatttgactgacgttactgtcgagattgttaggcatttatcttttccttattcgatttttgcgccggggcataatttgttgaattcgtcttgtttcgcatcagcaccgccaccacgtacttccggctctggcttgatggctttctttggttttggagcaaggcttacctgtttgctaatctgccccaagaggaatgctgcgcgaattggatctgtctcagcggctacacgctggcgtaattgctggctcttacctaagccataggcgagtagttcagagccttcgtctgcacagtgaatgatgatttcctgctgaattggtggtagctcactaagaacaatggcttccatttcctgataatctttcacaggaagtttggctgcccgttgtttatgcgcttctaccctttgctggaaacgctgctggtattcctgttgctgacgtagtttttgttgctgctgctgttcgacacggccttttttctcatgccaatcagtcaatgcctgttcaaacgcctgttcgtcataatcacacgactcaagagtcggttttggtggaatagcgtctggttgtggttgctgatgttccgcaggcttggctaatgcttcctcaagctggcgtcgcaactcacggttttctttctgtgtttctttgaagactttgcgaagatctttcacccattgcggtgcaggttgcccgtcaatgtgatcatcatcgtcagcgttaagctgaatttcttcatcaccaatacgcaaggcgtaatcttctggtgtctcttcggttttttcaggatcagttgccatctcttttccgttgtcatcctggctttcattctcaggctgtgactctgtttggatgatggtttcttctgcattttcctgtgtttcagacaggtcaataacctgaccgtcgatgatcagttcgttttccattgattactcctggttaactcggcattaagtctgccggtgactgtggtggtgactggaattgctgttgttgtgactcggcgacatctttcagaaggcgtattgcctccatcactgctttgtcatcgatgtttctggcttgagccagtttatagacagtgtttgcctgactctccatcgcatcctgctgggcagtaaatgctttgatttgagtttgagcagtttcgttagttgctttttgcgcttctgcctgcgctgctaccatttgcgcctgagcgagaaccatttcaggatttggctggctttgtgctgccatttgcgcctgttgaacaatctgctgctctttctcattgcgtggttttgcaataccagatatcagcagttggtttcggttgtactctttgaagtcatcaaggccttcgccatcgatattgtccagaataataccctgaattgccgggcgcattgggtctgttggaagcatagagctaaggacatttgtcagtacagaaaccgttgcatcacgtcgtgctgtgtagcttggtccaacatcaaccgtcacatcgtatcgaccgacagaaaggtcatttaacgcaacaacagcccctgtttgcctgtcaacaacctgtgcgctcatgacagcgatatcatcacttccatcttcgttaacgatgcgcacttcacgttctgaaccgtacacttcacgcgccattgacagccatacttcaccagcgcgtttaagacttttcgccatattgtccagatagataaacgaagccatatctgctctgttcatcaagttgttaaccgtttcctgagcaatattacttggcatctgctgcatggcctgactgccgcctgtaacctcctgaatatctgcactggtttgctgtagtaatgcagccaatgcctgattcataaccgcaggctgtgtatatcctgccggggtagctccagcgataatgttgccagatttatctctcacttcgcgcaacggcaagaacgctgggcgtttcttgttacgagcctcccagtgcttctcaagtccacgaatttgctccatgccaactatagggatctgaccggggtcttgcgctgcagtatcagccagcattgatacctgaaggttatacaaacgctgtggatccattgcttttgcaatgtgcccttcgacacgctcaatgtcatcaatgaaccagcgttttccataaaccgggatgagggggatatgttcaccaggaatacgtcgaggtttctcaaggaaaccatcaccatccactacggatacatacacacgacggcgcttcactgagcgccttgccacttcatgaaatccagctattgccagttcatcttcaatatcttcaacctgatcactgtcgtatgttgcaatctctccagtgattggatgtcgataactgatgacgtcaacagactctttacgaacttcgtaatacttcgctatgtaaataacatctgcatcaaaccagtcatattcccaactggtcatagacgttacgtccagagaagcaggaggtttctttccgtattcagtctcatatttttcaggtgacaacgaatacatgcagaacgcccacaacgcgtcagatttgtcgtacttcttagcgtcagggtcaaaccacacagagcgcgacgggtcgtatattggttcaatagcaatacgctgacgatcgtccatggggtcgaattcattgaccagcatcgacgtcaaacggaagcaaccgaaaccaccggtagcagcgtcgtcaaatgcattatcgcaagcctcaccgccatcagtttcttcgtagtcagcacggaacagaccatttaatttattggctaactcttcgcttgcctctctgtcaccagggcgaaacttaacagtgattctgttattgcggtattctgcaatgatgcggttaagttcagttgctaccttattgatttcaaacttaggatacttctcgaactgctcatcaagcttagttctagccgccgttgctccttcccattgacctccggggacacgagcaaacctcgtagcttcaatgcacttttcgcgcacttcctgctgtggagaataggcgcggtcaaacctgagcatgatccgctcatgttttttctctaatgtctctgccatgtttaccaaccggaggatgagggaacgtatatttctgtttcttcgcggaccaatgccgggcaatgcatacacatcatcagcgcatcagccaggttaggagatgggataccgagcttctgcttcatttcgaccttagtcataagctccagcttcccgttgttattgaatttgcgctgaatctgcgtaagttctgcaaacagcttctccagcatcttctcgcctatcgcttctttgtcgaaactcagcatgtcgtcggggtctgcatactcaccgtagacaaccgcccgatatgtcagatacagcctgtcagccagcgcgtaatagaattgcgctctcttattgcggaacacatcaccaatagtgcgaacgttgtcgccctgtacgacttcatcagcccatgctccggcctgatacggtgcatcttcatcgaatggcgattcgctgcccttgaacatcgtggcggtgattttcttgccggagaacgcttccgttgtctgtctgcgtagcccagcaccaacaccatcaccatcccacaggtaatggtcagcgccgtcttcaatcgccagcgaagtagcccagtcagcaccctcgttgatgtccatcagcagaccttcggcaatgcgcttaaccaccgaaccgtgacgcgatgcgtaacctttagcatctggccctgtatctgacgggtcatgtgcagaaacaaccgcgcctttcgctttccatccgagtttcttgtgcgcatcggttgcggcttcaagccattcacgtttgatgattgccatatcacttgcgcttactggctcaccaagccagatgtgacgatacagtgtcggatttctgcgtttgcactcttccatctccagacggagaacttcaggaaagtgcggattgtcggtgtagttcaccgtcagcaggcaaatatcatctggaggatttacgacgaatcgctgataggtatcgtcgagtatgtttttcgggttaaagctcacccatatttcggaaaacggcttgcggatggttggtatcaggatatcccatgattccttcgttaccgcttccgcttcttccacccagcagatatcaatgccttcgagcgatttaatcttcgtcgggttgttttttatgccgtagaacatgaattcagcattcgttccgagatgacgaatcattgaacgctgaatttcaaactcagccgaatacccttcccgctctatggtgtcttcaagcaaccggattaccgaatcgctgatactgttttgcagttcacgagcacagaggatgcgcaccggctgccgacgcgccgcttcaacaagcagccttgcgattgcccatgacttaccgctacctcgaccgcctttggcgactttgtagcgatgcgcctcaatgaacggttcaaagataggattaatcgaggtcattttccgaatagagtgctcatcggtgatgtttcaatctggattgcgccgccgtctttgcctgttagctcgtgatcaaccttgtcgcgccatttatccttctgtcgattcttaagccagaagatggcagctgttgtatcaggcgggtaatacttctcaagcggagtttcgacaattctgttttcaataacacgaatatcgatgtctggagccacgaagcccatagcgcgttgataaagacgatcactaacttctgcatcagcgacggccttacccttttttatggactccgaaaacttaggataatcaagcttccacttgttaatagttgactcactgacttcaaagaaatcagcaagttctgcatcggtgtagcccagcaagcacagtttgcgtgcctgttcggcatacgcctcttgatactttgttgggcgcgccatgtttatgctcctgtagtgaacaggtctaacgcttccttcgatttacgcaccgcttcgatagtgcgggtcgtgatatctgaattagcgccacctgactggaagtgaattttgaatagctcaagcttcagctcgtcagtgccaatgaattgaaatgcttcttctgcggctgcgttctggttcatgaccagtttgtaaatctctaactggaatttctgttcttcagtcatgggaataatctctgccattattggctccgtttatccgttaaaagggatatcagttaagttatcccgtgtagggtataagccattatcaaagccactctgtagggaatggcttttgtgatggcggtaatgntnnctta

SEQ ID NO: 428 - DNA, 7385 bp, Escherichia coli
  modified_base (145)..(145): a, c, t, g, unknown or other
  modified_base (1339)..(1339): a, c, t, g, unknown or other
  modified_base (5001)..(5001): a, c, t, g, unknown or other
  modified_base (5004)..(5004): a, c, t, g, unknown or other
ggacatctgatggaaatggaagccacgcaagcaccttaaaatcaccatcatacactaaatcagtaagttggcagcattaccaagggcctgtatggtctcttcttctggtcgttcctggctgaagtactgacgaatcatgttgccnattataattatctccggtgtcacagaatcccccattccttcctcctttctttcatacgctgcagataacgttcatagtgccggggtttgttcggactgaaggagagggtccggcaccagaaatcattctttataagtgtcttacagatacgccgctaggacggaatatcccggctcccctggtcattctcctgttcatccgggatgtcatccgggaagccccgcgtctgataccagcgcaggtagacagcaattttattacggtaatgttctgccgttctttccggcatcacatccagcaggaacatcgcatagctgcgccaggcgtgatgggccggttttgatatacgtttacgcagggcaaaataggcaccgctttgattggcataaagcgccccgctggcagcgcctgacacccgctcacacatcctggcccaggtttccggctccagaacatggtaaagccacagtcccttacgttgttcaggaccaaaaggttcacagacacgcatgttgcgtaacggcacgccggcacggtacatcaggtcatacagaggattgtagatggcacaggttctggcgttatatatccagatatcgcgggctttccagtcatataacggattcatggtgtaataaaacccttcaggcgacgctgtggtccagggtttatcatctgcatatctcagtttgcgctgagataccagtcccataaagcgattgagcgattcatcagcacggacaccagtcagtattgccactccacaccggttaccggcaaaccaggaagaaaatgccggaacaaattcttcaaacgccatggcataccggtaaaagggaaaatacgtcatgtctgtaatggcctcttccggtggctggcgaacccaggtcacaccagactcccagcatatccactccggctgaaactgcgagacaccgttaaccgtggtcaggggaagtgccacccagtaaaaggtatccgtcacatcccggtacatttcccgcattttctgaatatgttcaatggtgcactgatactgggcctcccagtcaatgaacagaacagagaaatgacgttttctcctgcgggccacctctgccacaagatggaaaagcacggtggaatcctttccacctgaaaaagacaggcataccgacggaaatgtttcaaaaatccactcaatgcgggcgattngcggcacgcaaaacattttctccggtaagaattttttcggttaaaagcgtatcactcattttcctggctttatgtcgaataattctgtttatacattcagacaaacttcattaataactcaccgctttggggataaataataaaaataaaactcgtcagatattaatctggttgttggatttgttatcgcatcctttatccacctgcttcttactggtaacacatctggaaaatccatgcattttcaatatatactatcctttcaacttgtaaataaggaaatatgatgcagatggtgaacgattcaaatatcattttgcaggaagtattcactgtaatagaatcccccctgataaagtttattcactaaggaattattcaacagaaccattccctgttagctttgagtgctttgagcaatagcacttatttttatatgtatcaggaatacgtacgttgatgtaaccaaaacaaagaagcctgtgtccatggggttcgtacaattgtgtgtggcacatgaccaaatcaggtttgagacctcccgctgcaatattttttattcagactttagcctgtcaggcctgacagaaacgctcccaacttcccttctatatcactgtctatagtacgtaatcttagcaatggcaggccgcatttcttcagtatactgtttttaagttcatcacgttcagcctgaacactggtcagatgataacctccatccacttcaataacccctaatggagtcttcccgaccttatagtaaacaacaaagtcacaactggcccggttacgcatgaataactgttcacggtgtgtaaaatccccccgctccagcaacaccaactgattcagcgctatttgtgaatgaaacatcatactccgataactatcctgcgacaggatatcccgcaacaggcaggccacaatctgttctgacttaaagtgtgaatcatttgaattcaatctactattcagtcgttccagtgatttgtcatactcactgtacagcaaatcaaatgctgatatgaccgggctctcgaaaacctctccgtcatcagcgtagtatttgatgtaacgaatcagcgccgcaatatgtccagcgtggcgttcaaatacatcattaccagtcaccagtgtaaatttatttcgggcccttgaaacagcgacattcaccagttcaggattatcaacaaacgcgatgttccgactgtgctggctgctgcgcttcttatccagcacagtggaaaacacaatttcatcgcactcccgtccctgaaatttatgcaccgtcgatttcacaaaatcagcaggcagcactttttcagccagattaacctgtgcattatatggggcaatgtatcccctgctactttcttcatcccagtaatgaccttccagagattcaagctccctgagatttgaaaaattacgggtatggtttccttttgccgtgatgaccagagataatgaggcttcaccggaatcaaccgttaacggtatcagagcattatcataaaactgcttattacaaaattgaatgattttaggatgacaacgataatgctctttaagaagggttactggcaccatgttcctgaacaacatacaaaccgaatcaagtagactatatttctcacaattatagtattctgccggtggagatgggctgttcgggagtaatacaggaacatgtggaagttgcttacgatcccctacaacgattacattacgggcacatcccagtcccagaatgcccggaacaatatcctgctgcgaggcttcatcaataataacataatcaagaagggcccccttgccgatagagttaataatcgaatgcgtactgctaccaataaccggaaaacgctttataaaacggtcaaattcatctctgtatgtctctgccgagaatgaacttcttgttgaaacatttcttcgcagatgttgctttaaataaagcatagaccatgatgtcaggcgccccagtaaaattttaaaatcagattttttaaatacttcctcatattcattcagagaaatttgtttttcccgaatagttttttcataataagaaagctgaagagaagtaaatagtgccagccttctctccggaatcatcaatggtttgactttcagtatcctgaagtttaacaacaaatcaattctgtttctgaatccaatccgcctgtcagaaaggtaatgaatataagccatcaggtcggttgttttttgtgaggaaaatcggtatttgtgagaaaaaagctcctccggtcgaagattctgactctgccattgctgcagatatttatactcaatattcagctcattaatttctgcttttaacgaagcgacctggttaatggcattcaggtgttttttcacttgttgaagtacatcatcaatcgcatttgcagacggtgagtcaggtaagacttcctcagaacgcgaaatcgacgttgaaaaaaactgttgcctgttctccgtactccccagtcgtgccaccacatatcccagttgctgtttgtccatcttttcataaacattactgacagctgagttattattggacaaaattgccactgttttattctgaattaatatattagcaacaatattgagtatagtctgtgttttacctgttccaggtggtccttcaataactgaaatctgtgaggaaatgcccgttcgacagccagcaactgactttcattaagaccaaacggaaaaatcaaaccccatggcgaatcacgttttttactctgtcctgaacagtatgcatgcaaggcggtatccggatgaggaactattttctttatctgcctaaggatattctcatcgatatttctgttattaccacggacataaaaaatacgttcattagccaccctacacaagtaattaaacacggcatgctctgtaaatactgaacactgttgaaagtcaaggccggtcgttttcatgatgtagggtcgttcaccctcgcggtaataaacagcagcatatttatcaccatatataataacccgttcagcccgggatgttacagcgttccctttcctttcaaggaaaacatttcgcaaatttacagttggcgttatctgacatacagaaagcggacgagtatattttctcccgctgcgaaaatgacaggtcagcataacctctctgtcgtcatttccagcccacagcgtccagtcggtaattttatgagtcttattttcaccgtcaacacaaatcgtgaccatattctcactcagaaattatcatttaacttacggaaaattgttaaggcactcccggatattagctccggaggattttccacaactccgggactgttaacatatttctgcctgccatatatacattgaatttagtcataacagtcaataccagaattacaggaatgcgatgccgatacgctggttattgaatactggtagcccctgagcactaattcatcacgatactctgtatttactgttttcactgctttttacaaccattcccccaggtaaaatgctgctcctccggtgatggctgtgtcagaaactgccatcccggaatagccacgctgaccaccagcaatgccgcacagacaccagccacaaacggtttcagaaacgtgggcggggatttctgaagggagggtgtgggcncangttgtgggctctgcttttgtttcagaaacaacatacaccagacgggagtgtggcagggtctgatattcctgtacgtccggagcatcagaccggagtgcctgagccggaagggttaccggagacgatacttcaccctgcacaggctgtttctccaggcgggtgatatatcccttcaccatggcttccggtaaagccactttactgctctgttttagttcgtgccgggccagtgtgtcactcagtgccttcaggaatgtttcggtctgatacagcaggggcaggttgtcacggtcgtccggtggcatggcccggagcgttttttgcagacggttgaacagactggtaataatttccagccgggcgtgtgtattcagcggccacatcactgaccagtgatgccgggtcagcgccacaatcagagccagcccttcattcaggccacttatccgctgcctgaagagataaaggcgatagtaaaacagacatcagtgtcagtgacagcaaggacggacagcgccggaataagctttgttcctcagccctctcgttcctgcaacataattttccagtcaaacgaaaaaccttttattcatgccataccaacaatcaccagcctcctgacgatacctcccaccatgttttgcagtggtacgctaccgcccttccggtatttacccacaccaaccggtaccagaatgctaagtaacaaatccgttcagaattgacttaattttgatcattatagaataatgatctgaactgcggcaatatgacagatttatcgatcgatataacgcaaatgaacagatctttattctgccacatatcgcaaaaacagcacattgcaaaatttataaccataattaatggaaaagtgcagaaaattattccactgaatgcttttaatacagttggttatctaaaaaaatatcattttttgatttcagtcattgaaaattgcaatgcgtgacgactcaacagcatttaagtgagtttcaggatatgggaaggacatgaaaggaggagcgcaataaaatacacaggaagaaggggaaaatgtttcgtaaaaacagaaaattaacagcgcacatcaggaaacgtcgcagtgataccacatgaaattaaattcactgttaccacactgtagaagatgttccattaccgaaagtcgtcaatcagcgatacagagacaatcatggtgcgcttgtcaccgtgaccagtgttgaggaaccccgggtggtgtttatgcgggacggctatccgcatccgtgcatgcggccaatgtacaactttctgggaaaattcaaacccgaaccccgggaagaaacagaataaaacgaaatccctgccggcaatcacactgcctgatggcagcataatccacttattaatcctcatccccggagacaagcccggaaaaccactccgggtgttcactgaatgccgtgttcagcgcatcccaggaaacgttcatataaaacctgtcctgcaatctccgggtaacaacctctgccaggcgattccggttatccaccagtccggcataacctctctctgccagccactcattcagttcatgttccagagacagattgataatatcgtaatcggaccttgccattcccgtgtccttagcacatgttttcaggcacggggataaagtataaagaatgtcgtactgctgctgccagagcaatattccccctgatggtcgtatcagagatggtatgcaggtactttgcgggttgttcccgtcaggttatcgtgcacctccacggtcgtagtcaccaccggcattccggcctttctcagcctcagaacatcagccgcaatacgctgactgccaaaccagaacaggccgtccagtgcagtcaccagtaaacccgcctccagcgcatacttcagccgttcacggggcactttcacttcccgggcaacctgctgatatggcaatgatgtgttttcattcccaaccacgcgacgaatacgatgagacagatgataccggaatgtatccggcacaccagaaaggctggccttcaggctgtacacgcagccaaaccgtttatcgttaaacaccacatttttctggctgattccccattcttcacgcagcgcagcaatcagttgtggtgtacgggtaagcaacaagcgaaaaggcagttcaaaactggtgacgtaatccacattcagcagtgcaatacgcagccgttcttctggcccggcctctgtctgccggcactcctccagaacatcctgccactgctggcgaagacggggcgattcgttccgttctgtaaaacagtatttatccgccagatagtcaatttgtgtacgcatactgaagagcattccgtataaagattcagctgacaaaactt

SEQ ID NO: 429 - DNA, 2906 bp, Escherichia coli
ccgcgcgaagtgttgtatgacaatatgaaaactgtggttctgcaacgtgacgcatatcagaccggtcagggccgttataaagcgacgcttcagcgtggagtaatggcccccgcctgctcatcattgatgaaataggctatctgccgttcagtcaggaagaagcaaagctgttcttccaggtcatcgctaaacgttacgaaaagagcgcaatgatcctgacatccaatctgccgttcgggcagtgggatcaaacgttcgccggtgatgcagcactgacctcagcgatgctggaccgtatcttacaccactcacatgtcgttcaaatcaaaggagaaagctatcgactcagacagaaacgaaaggccggggttatagcagaagctaatcctgagtaaaacggtggatcaatattgggccgttggtggagatataagtggatcacttttcatccgtcgttgacattaatccgtaagacatgggaaaagatagcaactgagatcctaagtttgaatgttatcacgcctgcgtttgagaaacttcgttggaaaagtaacctcggtaaacccccgtgccctgagctcattccggagatgctgtcatagtgaccgtcttgctattggtgggaattggagactgaatgttttgacaagacagtccgggaaattctgggtgtaatcatataagacaggtgatattgcgttctccaaccctttagctcagtggtaagaggactcataatcgcttggtcgctggttcaaatccagtaagggccaccatcacacactgccactggcccattgcgccatgcccggcgcatatcagccacagagcctttcggggataatttgcagagtggtctggctgactttctctgtaggcagatcgttcccgcttgatagctcatcccccaaagaaacgtcacgatatttggtattttcaaaattcaaaaagaaaacccgcagagtggcaacagagattaaaaagtttgagaaacgcgatctggcacaggcggtgattggtgttggagtgatggtagattttatcagccggataatgtcggttctggctgatagctggggttgttggtgtggtcttcctattgatgaaaaaacaagctattacttggcatgttatctgtaacactttaaaactgttaagaagatcacaattcattatgtttattattgtctggccggagggatatttgttaaaaagtgcgccgtgtggtgaatccccctgtgcggtggggcgactggtgtacatagcatttattatgttatgagcgaagcctacgcgggttcagtgacaccgactgaattcaccgggaggcacccggcaccatgcaacagacgcaagttaggctaagccttatacccctgtaagttttttacaggggttttttgtgcacagaaaactcccagctaggctgggggttccggaaagctttcagctttgagccagttattaaaaccccttttgatttgttaaaacaccttgcggtctggcaactgcaagtgtcaaacaagaaatcaaaagggggtcccaatggggaacgaaaagagcttagcgcacacccgatggaactgtaaatatcacatagttttttgcgccaaaataccgaagacaggtgttctacagagagaagcgtagagcaataggcagtattttgagaaagctgtgtgagtggaaaagcgtacggattctggaagctgaatgctgtgcagatcatatccatatgcttgtggagatcccgcccaaaatgagcgtatccgggtttatgggatatctgaaagggaaaagcagtctgatgctttacgagcagtttggtgatttgaaattcaaatacaggaacagggagttctggtgcaggggggactacgtcgatacagtgggtaagaacacggcgaagatacaggattacataaagcaccagcttgaagaggataaaatgggagagcagttatcgattccctgtccgggcagcccgtttacggaccgtaagtaacgaagttggatgcaaatgtcagatcgtgtgcgcctgttagggcgcggctggtaagagagccttataggcgcatttgaaaaacctccggctatgccggaggatatttgttgcacgtcgtcaattgcggcgtgctggctcttccattgatatctgctggattaaatcgtctggcatatgttcctgtaaaatacgccagaggttctcggcggttctattcagtcgggtgttcattcggtaaatataagcctgaatggggactgtcaatttagcagcatcaaggcatatcagacgtttggtctgtagttcatcgacgatcgaccagatcggtaaccaggcaatgccgtatccgttgagcgccatattctttaataactcgctcatcgaagagataaatatcgtgcgcccggtaatacctccaacctctgccagatgacgattgaccaacctgcccatataagatgtggcggtatagttgagcaaaggaacctggggctgagtgatatcgaatacagggtgcccctgtgcgtcggcagcacataccgggtacaactcagattcaaacagtttcaggcagcaaaaaggcgattgcataagatcttcatcgcgaaacgaaataataaagtcactcttgccttcgcgtaacgtatttacggcctggacaacatcaatggcttcaacatgatagacaaattctccgccataggcggtaagtgaatgcaccagtttgggtaatacgctcagggatagtgagtgcgcggctgcaattttaatgttgggaacgccgagtaaactctggccgtttaactcccccaaattgcattcaagctgctgtaataagctgcgagtctgggaatgaaagagcttgccctcttcggttaattgtaaaggggtggtcgtgcga

SEQ ID NO: 430 - DNA, 1823 bp, Escherichia coli
  modified_base (2)..(5): a, c, t, g, unknown or other
  modified_base (7)..(8): a, c, t, g, unknown or other
  modified_base (186)..(186): a, c, t, g, unknown or other
  modified_base (651)..(658): a, c, t, g, unknown or other
  modified_base (665)..(665): a, c, t, g, unknown or other
  modified_base (668)..(673): a, c, t, g, unknown or other
  modified_base (680)..(680): a, c, t, g, unknown or other
  modified_base (1208)..(1208): a, c, t, g, unknown or other
  modified_base (1315)..(1319): a, c, t, g, unknown or other
  modified_base (1321)..(1321): a, c, t, g, unknown or other
  modified_base (1326)..(1326): a, c, t, g, unknown or other
  modified_base (1392)..(1395): a, c, t, g, unknown or other
cnnnntnngccgggccctgaaaccctggaccgccatcttcatgaacccggcgtggccttcacctccacccgtgcggcacgggaatggctgattctgaacatggcgggactggagcgtgaagagttccgggtgctgtatctgaacaaccagaatcagctgattgccggtgaaaccctcttcaccggnaccatcaaccgcacggaagtccatccccgggaagtgattaaacgcgccctgtaccacaatgccgctgccgtggtgctggcgcacaatcacccgtccggtgaagtcccccccagcaaggcagaccgccttatcacggaacgtctggtacaggcactggccctggtggatatccgggtgccggaccatctgatagtcggtggcagccaggttttctcctttgcggaacacggtctgctttaacccgtcaccgtcacaatcaccttcatatcacttcagtttctctttctcagctgtttcttactttcacattcaggaggactattctcatgaaaatcatcacccgtggtgaagccatgcgtattcaccgtcagcatcctgcatcccgtctttttccgttctgtaccggtaaataccgctggcacggtagcacggatacatataccggccgtgaagtacaggatattnnnnnnnngctggcngtnnnnnnagaacgncgtaaggacagttttggtccgtatgtccggctgatgagcgtcaccctgaactgatgttccgtcacccggaaaacgagtacgactggctgagctcagacgccgctgtggatgaggtcctgctcatcaacgaatacacctttaccgaagccggtctgcgcgccggctgacccgtcatcgttaaactatcattcaccgattttctgtgaggattttatcgtgtcagacacactccccgggacaacgcatcccgacgacaataacgaccatccctggtggggactaccctgcacagtgacgccctgtttcggcgcccgtctggtgcaggagggtaaccggttgcattaccttgcagaccgcgccggtatcagaggccggttcagcgacgcggatgcataccacctggaccaggcctttccgctgctgatgaaacaactggaactcatgctcaccagcggtgaactgaatccccgccatcagcataccatcacactgtatgcgaaggggctgacctgcgaagccgataccctnggcagttgtggttacgtttatatggctgtttatccgacgcccgaaacgaaaaagtaactctccagaataaccttcttctccggcctggtgctttcaccacgccactnnnnnanatttnatctctcatatcaggaaaatcttcagtatgaaattattacccgacacacatgtacgggaggcatcnnnntgccagtctcccgtcaccatctggcagacactgctcacccgactgctggaccagcactatggcctcacactgaatgacacaccgttcgctgatgaacgtgtgattgagcagcatatttgaggcaggcatttcactgtgtgacgcggtgaactttctcgttgaaaaatacgcactggtacgtaccgaccagccgggattcagcgcaggagccccatcgcagttaatcaacagcattgatattctccgggctcgcagggcgaccggcctgatgacccggaacaattacagaatggtaaataacattacccagggcaagcatccggaggcaaaacgatgaaactggccctgacgctggaagccgacagcgttaacgtgcaggcactgaacatggggcgcattgtcgttgacgtcgatggtgttaatctcag

SEQ ID NO: 431 - DNA, 1097 bp, Escherichia coli
  modified_base (618)..(631): a, c, t, g, unknown or other
  modified_base (1011)..(1011): a, c, t, g, unknown or other
ccgctctcagttaataaacagcatcgatatcctccgggctcgcagggcgaccggcctgatgacccgcgacaattacagaacggtaaataacattaccctgggtaaacatccggaggcgaaacaatgaaactggccctgacactggaagccgacagcattaacgtacaggcactgaatatggggcgaattgtcgttgacgtcgatggtgttaatctcgctgaactgattaacatggtctgcgataacggctactcccttagtgttgttgatgaatctgaccggaccgcaactgacagcatgccaccctccgctgccctgagcggtatacgctgcagcaccgcacatatcacggaaacagacaacgcctggctgtactcactgtcgcatcagaccagtgacgttggtgaatcagaatggattcatttcacaggcagcggctatctgttacgtaccgatgcgtggtcgtatccggttctgcgacttaaacgactgggactgtcaaaaacgttccgtcgtctggttgtcacactcatccggcgttatggcgtcagcctcattcatctggatgccagcgctgaatgcctgccggatttacccactttcgactggtaaccaggnnnnnnnnnnnnnnatgaaatcattaaccacagaaacggcgctggatattctgattgcgtggctgcaggacaatatcgactgcgaatcagggattatcttcgacaacgatgaagataaaacggattcggcagcactgttgccctgtattgaacaggccagggaggatatccgtaccctgcgccaactgcagcttctgcaccagaaccggtgagtctcactcaccatacttcattccactgacgccagcctgaacagggctggcgttttcatttatctgcgaaaaggaatatcgattatgtctgcaatcacagtctcccgtccggaagtggtcaacgggcatacgatctgctccacctcagtcagccacattctggctgtacaaaagagtacacngctgcaaatcgacacacttatccggcaactggctgaaatctcatcaatgacagaaagtattggaggtaaaacttctctggactggg

SEQ ID NO: 432 - DNA, 6801 bp, Escherichia coli
tgctaattttgctaaccattagcaaaattagcaggggtattatctatgtctggcaaaagaaaaatatgtaacactttgatttgtctgtttattttgtttttcaattaaaatagtatgtttttgtgatccgcatctaattatttcgtactcctggtgctatcccattcatggatagatgtgcatactgcctccattaaactgatggattgcatgttcattgcatctgtaaaatatgccagttttgacattaatacataatttgtaattcggtgtaagctcttgtctggtgaattctgttagtagcttatacttcttgtccatttttacaggttatgcaagtgtgattatcctgattactggtcacttagtatatactgagtcaacaaaacaaatgagtattaactgaagtttttatatagcgattatttttcttgttgggttagttagttcccagagaactacatatggtttcatataccatgaataattaaggttaattagtattattaatgggggtggtggtattgtgtggtggtatctgtggtacaacttacctctttttatcgtaatgtcactcctctttatgctgagtattctgtatgtgcgtaatgcgtctatccccatatgctacagtgtggtggtgtatgggatttagttatgtgtaaattatgttactacactcatagagtaatattgagaaagttaatccgctgaatgtatgtctggtttgcatttaacactggttacgtaccagaacactattagagtatattgtctttagttcgtacgttatagctccgttacactttataagtatgggtaaatattatcttttttgtatgaaacaatcttcttatggtgtgtagcgtatggtctgtatgtcattattcttttatgctactgattaaatatctgtaggctgctctctgcagagtcgctgtttttacttaatggtacgccaatattaatggcgatgttgtctgtggctattctatagctgacttttgtgaatgtcagattacttcctgtaaggaatttaatggtactttcttaaactcaatcatatgaggtgtgtttttttactgtaattcttactggtactcagtttaagagagtcttactgtattctgaatcattaccctattactgtaatgaggtaatacgaaacagttttatcaggttgtctgtgctgctggttacctcgtttattaatgccgcggtacggcgtttctgtactctcagtatttatatgattccactttcctgtcagttttataaagtaaggactataaaatgtataatgctaatcccaattacgaaatggatttcatgattctgaaagacgtgaatgaacacatggaaggtctgtttcaacgtttttctaaactgttacctttcagaattgattttgcctacaggaaagacacgcccagtttcggtcattcctgtaagcacagtatgtgtatggaaatataccgtttactttgcgaaacccaatcgatgttggcgggatattactgggtaatggaatatacaccagacaaagggcttcatattcattttgtcggctacctggatgggcaacgtcacaagaactcttatcagatatccaggcaactgggagatatctggaggcggatcacggaaggggagggttactttcacctttgccgggctaaagacaaatacccggtgcgtatcgatcacgtgatgcactatagtgataagtccgcggtagacaacttacgttacgcccttagctatctggctaaacaggatcagaaagaacacggtattattctgggccgtagcaggcttcccgaaaaaagcaaccggggccgaccacgacataactgaattacagttgtattaggtattagaattaagtttctgtaagttgttgggaggtgcttgagttaataggcagaagagggcggggcgctttgtcatcagtgtaggggacccgaatttctgccgtggtgcctcagtggatcggatacaggtaacgaatatggttcataaatctgacagtgatgaattagctgcattgagggcagaaaatgcccgtctggtctcattacttgaagctcatgggattgaatggcgacgtaaaccgccgatctctgtgcagcgcgtttctgtattatccaccaatgagaaggttgcattatttcgtcggttgtttcgcgggcgtgatgatgtatgggcacttagatgggaaagtaaaaccagcggcaaatcagggtactctcctgcctgcgctaacgaatggcaggcgagaatatgcggtaagccccggataaaatgtggggactgcgctcaccgtcagttgattcctgtatctgatctcgtcatctactaccatctggcaggtacccatactgccgggatgtatccgttgctggaagatgattcctgttattttctggctgttgattttgatgaagctgaatggcagaaggatgcatccgcattcatgcgatcctgtgatgagctgggtgtacccgctgcgctggaaatatcccgttcacgtcagggagcacatgtctggatattttttgcttcacgagtttcggcccgcgaagctcgccgtctggggactgctattattagttatacgtgtaatcgaactcgacagctgcgattgggttcttatgaccgattatttcctaatcaggatacgatgccaaaagggggatttggtaatctcatagcattacctctgcaaaaaagaccgcgtgaatcggggggaagtgtttttgttgatatgaatttccagccttattctgatcaatgggcttttcttgcatcggtgatcccgatgaatgtgcagaatattgaaccgacgatattacgggctacaggaagtatccatcctctggatgtgaactttatcaacgaagaagacctgggtacgccatgggaagggaaaaaatcatcaggaaacagactgaatatttctattgcagaaccgctgaaaatcacgctggcaaaccagatctatttcgaaaaagcgcaattacctcaggtgctgattaaccgacttattcggctggcagcatttccgaaccctgagttttataaggctcaggcaatgcgtatgtcagtctggaataagccccgtgttataggttgtgcggagaattacccgcaacacattgcgttgccccagggatgtctggacagcgtattatctttccttagggacaacaatattgctgcagaattaatcgataaacgatttgccgggacggaatgtaatgccgtttttatgggaaacctcagagcggagcaggaagaggccgtttcggcattactccgttatgacactggtgtgctttgtgcgccaacggcttttggtaagacagttaccgcagcggcagtgattgccagacggaaagtgaatacactgatactggtacacaggactgaattgctgaagcagtggcaggagcgtctcgcggtgtttctgcaggttggtgacaatattggtattatcgggggaggtaaacataaaccctgtggcaatattgatattgcggtggtgcagtccatatccagacacggagaagttgaacctctggtcaggaattatgggcaaatcattgtggatgagtgccatcatattggcgcggtttcattttctgcgattctgaaggaaacgaatgccagatatctgcttggcctgacggcaacaccaatccgacgggatggtctgcatcccattatttttatgtactgtggtgccattcgccatacagcggtccgcccgaaggaaagcccacataatctggaggtactgacccgttcccgttttacatctggtcatttaccatcggatgcgagaatccaggatattttcagagaaattgctctggatcatgacagaacggtggcgatagctgaagaagccatgaaagctttcgggcaggggcgaaaagttctggtactgactgaacgtacagatcatctggatgagatagcatcagtgatgaattcactgaaattgtcccccctttattctccatggacgactatcgaaaaaaaagcgtgcgatgctgatatccgggctgaatgctcttcctcctgattctccccgtattttgttgtcaacaggcagacttattggtgagggatttgaccaccctccgctggatacgctgattcttgccatgcctgtgtcatggaaagggacattacagcagtatgcgggacgtctacacagagagcataccggtaaaagcgatgtcaggatcattgattttgtggataccgcgtatccagtgctgctcagaatgtgggataaacgccagcggggttataaggcgatggggtacaggattgtggctgatggtgaagggctttcattttaaggagtactttaccctttttaaataatttgagctccccgggttgttcgggcaacaaagagtcccagtatacaggcttcaggaatatgttgtagtatcaggcttttcatcgctttaaaatggctaccggcagtaagaacgtcatcaaaaataacaatccagggcctgcatccctccagtaattgttcattcagttggtagtttgccataatcgcttctggtgagggccggtttgttggtaagcgtgcagcaagaaccgtattgacggggatgtgttattcagtcggcagtgctacgcgccaggggagcagttcgccgacccggtttatcggccagtcggctatgacgtcaaggacatagcggagatagctttctggctccactccgttcagtttgcacgtcccgatcaggctgtacagcagcgctccccgctctcctccatgatccgaaccgaagaacaggtagtttttgcggcccagactgaccatccgcaacgcattttcagcgatgttattgtccgcctcagcccagccatcatctgcatagtacgtcagcgccggccactgcttcagggcgtatgcgaacgctttcgccagttctgagtgtcgcgacagggttttcatcttttcacgcagccagctttccagggatttcagcagcggtttcgttttcaactgacgttcggcaaggcgctgttccgccgtcattccccttatctctgcctcgatggcgtacagttcgccgatccgtttcagcgcttcctccgtcagggctgacggggtgcgaacgtgcacatcgtggattttacggcgggcgtgagcccaacaggcggcttccgttatccggccatcccggtacagctcgttgaacccggcgtatgcatccgcctgcagtacaccactgaaccccgcaagatgggtctgcggatggatgccttttctgtccgggctgtaagcgaaccacaccgccggcgccagcgttgacccggcgttacagtcgtcacgaacatacgcccacaaccgcccggtcttcgttttcttattgcctggcaacagcaccgggacaggcgtgtcatcaacatggagcttaccgtcagtcagcacatagccatgaagcgcctcttccagcggagacagcagccggcagcatgcatccacccagcccgacagcagtgaacggctcagctccacgccctggcggccgtacatttcagactggcggtacagcggggtgtgctctgcatactttgagatcagcacgcgggccagcagccccggtcctgcgataccccgctcgatgggccgtgaaggcgctcagcttttccagcagggcacggttcagcgcctcctgttcggcaaggagacgtttcagtgcattgatatcgtcaggaagtgagctgctcataccgggtatattaccaggctcattcagcgtcgaccaggataaagaggcttacaacatagtcagggacgtaagcagtcttttaggctgccgccagtcgataccttccagcagcatcgccagctgtgccggtgtgaggaacactttgccatcccgggctgacggccaggcgaagcggccgcgctccagccgtttggtcagcagacacagtccatcgccggtagaccagaggagctttacctgactgccattacgcccacggaagataaaaacgtgacctgacatcggatcgtctttcagcgtcgtctgcacctttgccgccaggccgttgaagccgtttctcatatcggtgatgccagcgaccagccagatctttgtccctgatggtaatgggatcaacgtttgagctcccgtatcagcaggttcaggatattttcgctgatggcaccattcagacggagtgatccgtgccggaacgtcacttcacagctgatattgagtgattcaggtgtcgcagcagctacaggttgtgaccggggggaggttgtagggacaacatcttcggcatcaagtgttatcgggagcagctcaggcacgttgttttctgttgttgaaggaggacgtagttttccttcgcgccagtactggcgccacttgaacagcaaattatcgttgatcccatgctcacgagcgagttgcgctacggagatctctggtcgatgcgagagttcaaccattttgattttgaactcaacgggataattagggctttttttacgcactgcggttaatgatttcatggatagcgtccatatttggtgtccactattctctcaggaatttcaggatctgccagacggtgctgagacgacgcttacgattcagtgcagaggtgacctgctttatcaaacttaattgtgacaaaatggcgattgagaaggtgcaattgacttattcggattcggtcgtggcgaggtggtgaccctgcattctgctaaccggttatgagtcaggagtcagcgatagacaa

SEQ ID NO: 433 - DNA, 3606 bp, Escherichia coli
  modified_base (2794)..(2794): a, c, t, g, unknown or other
gggcaagtgtcagcatggtatccgttctgctgaagtgtcatggcgttgattttacggtgactcttcgacagtgaaaagaaaaaagccgcagagcggccataaacacaaacaaaaatcaataagttagataattatcaaagacttacagacacacaaaaacacagccaaccacaacaaataacagggatgtggtcactttgtggatcattcactcccctctttttccttatttcgttgaacgccaattgcaacacacgtactaagcaaatctttacatttctctacgtcttcagacttacgcaatttgatgctttttacagactgcgggctactgtccgtagcacgatacatcgttatttcaatatcatttcggtctaagagtcccataatggcttttgcaacctccacacccttcttcgcgaaatcaaagaatagagcaagtttatatggattttcgacggaaaaaacttcaattttgctaaaaccaacatcgtgtagagaaaaatattgcccaacctcatctcgaagttctggatcgcatacaatgtctattctccagtactgacctaaatgcaaatcgctattaactgttttttccacaacatcctccttacccagcaataggattaaatctcaccgcatcctgcaagtaatccggcgcaagatgggcataaatcatcgttgtctgaatctttgcgtgccccagaattttctggagcgtcagaatattgccgccgttcatcatgaaatgactggcgaaggtgtggcgcagcgcatgaacagcctgaccgtcaggaacatcagatgcgaccgttttgatgacatcgcgaaccaatggataatccagcgtcggaaacaccagtttcccgccccgttttttgatcttttcaaacaggctttcagaaataggaacggtacggtttttgctgttcttcgtttttgaaaaagtgattcgacaatgaagaacacggcgctgctccagtaccgctacctcgccccatcgcgccccggtcgacagaaggatttcgacagccagccgttcatcgggattttcagccagtgcatccagcaactgaacacattcagacttactcagatatcccatttcgcgctcgttaaccttcattcctttaaggccttgaacggggttatcgttaagaaaatggccggatgagatgagtgcggtaaacatcgcgcttaacgccccaatctctcgatttatggtgctgggctgtatcccctgctctatcctggacacacgtagctcggtgagcattgttgtattaagtttatgcacgcacgggtcatccattgcctcactcaagcgcagcaatttaaggcgcgtgttatgccctgacttcattagctggccgtggtatttccaccacaagtcaataagcactgacagaggacggcgatcaatagagtttcctttccactcattgttatgctgttgcgccagcacccaccgctcatataaaactgcatccgatttcgttttaaattttttgcggatgcgtttgcctttacgcccctcagggcgcatgtcaagaagataccctcccggaattgattttatgctcattcgtgaaaccccagcgttacaagaccaccatgcccccagcgttccatgattagccgggctgtgtaccagtcttgcgggatttttgagaagacgatgtgttttctggcccatcaggggagagagagggactgatctgcccagcagcctcatttgtttttcccgtcataagccatatagtgtatttttcgaaatccttagaattaattacgcgatcaacaacgcttaaaccaacctctcttttaccgctctcataattctttatagttccgagatttatcccagtaacatcagcaaactcagcttgagttaacccttcacttttccgtatctctttcagttttttttcgtacccacttgacatggtggtctccagacgactaaattaaccctaaaagtcgcctatagacgacttttagcaacaaataaccacagactgaacaggttatcacatcatgacaaagctcttgaacacatacgagcaagcggattttgagcgtttggcggcgttctacccataccgcgatgagcatggattaccggtactcgaagaaagcctgaaagattacgcgaagcgtaccaatcaaactgttaatgcagtgaaaaggcaggctgacagagcagcccttcccatcaaccaagaagaaaaaaactcaaaacgtacagtaaatctcttcgcaattttcctgaaaaccatcagaaacgcagagaaatacgtgcagatgacaaaataacgaggtgtcattttatgctgaagcaacgccgtaattttcgtaccggaacagaacgccacgctaaccatttcgctaccaacgcatcacgcagcaacatccgctacagcctgagcgagacgcacgcaacacctgatggccacacagtaaaacaaattggcgaacacacctggctaattgaaaaagctggaatcgtggttcacagatgcccacgcaatccgtttaccggaaatcgcatttttgcactaagcagcggcgacaatcagttcgggcaggatttcacattatacgaagcactacgcacggttgatcgtctgcttcgcggacaaagttttattaaacaggctgatttataacaggtgctttatgaccaaagagcatgcacaaggtgtatttatccgttttattgattttcgcggtgaactgttattacgcgcatccgctattgatggagtggctccggcgggtaaaaacggagtcnacttacgtttatctgaacggcacgcgactgcttgtggaacttccgtaccagaccgtacgagaaatcattagcgaagctgaaaaggcacgccaggttaatggcgataaaccctatatcgaaattatctgcatagattcagaagctgaaattcagaaagcagattaaagggcgttgcgatgggcaaagaatataaaactctcattaacaaagcacttgagcgtttttattttcgcttaagtgcatcaggcgctcatgctgaacgtgcagcccgtgactcattgaccagggcaatccggagtctgtatgacgtggctttttacgctgatgatctggatgcacttaacgaactttccgagctgatctgtgccgcagaatgcggggaacatattgaaccgtataagctggggaatatcgcatgagtatatttatctcatggcttgttctgattatttcggtggcctgcgccattgggattatgcgaattattcattcagtgaaaaagattgaacgttatttccctgacgaataacagcacaaacaaaacaccagattaaataagaaaacgtgaaaacatctgcattagcggagggattcacacatttaaagaaggggtgacaatgaataagaatgcaaaaatcatcaaaattcacgaaagaatattaataattctcaagcacctccacgatgatgaactggatgaggcactactcgtcgctattgaactcaccaaaaaccttgttgacggaacctgcccggaacataaaccaggcctgtttatggtactgctgacagcgaaagctctgttagaggag

SEQ ID NO: 434 - DNA, 3896 bp, Escherichia coli
  modified_base (1691)..(1691): a, c, t, g, unknown or other
  modified_base (1697)..(1698): a, c, t, g, unknown or other
  modified_base (1700)..(1700): a, c, t, g, unknown or other
attaagttatgacgaagaagaacggaaacgccttaaaccggaaaattttcataaatagcgaaaacccgcgaggtcgccgccccgtaacctgtcggatcgccggaaaggacccaccaaaaatgataatgattgtcaaatacgtttatcacactgatattcagaatcactactgaaagactccctttgtggtgcgcgagggatgcgcataaaaaaaccaccagcaaatgccagtggctaaagatattcattgcgaataaccatcacaaaacaacttaactcgtgagggtagaaattttactcgaggccaaatttcttctttaaataggccttcgttaactccagcccaacatctttgattgtactcaaaggggcatcgctcattgactttaatttctcaaaaccgtaggttcatttaatgcctgggcgaattcttgtccctgcgcagatagtcgcacgtcggtacccatatctagcatatggccacaatggcgcatgtagcccagtttagttatgtcatccgttattagatctttattactgatataaccttgctcaataagaagtagataatgaaacatcccttcattcgagcagatatcgtaccccgcattagctaagtcttttgtagatataaagggagttttcgctttcaaaaatacctcaagcatccccttcatgtattctaaatttttaaccacaaaaacctccttaggataattggaggtctagaataccgtttgcaagcacgttgataaatcattatcacaggcactcaatgaatgcctgctgtaattgcgtacggtaatgaacgtaaaaaaccgcccgaggtatatttagacattagatggcgctttgtcagtatagacccggtacgccctgacaaacatcccgttacattcagagtccgccttgatatacgccaattcgtaaccccgatgctttagctcttcacgagctcttttctcttccttagccatgaagttaagatctttaatttctgagtaggtatatgttcccactataaaatctctgcctggccgtccatttatcagttccatgtgtcctcccaaaaagttggtagtcagaacataccatgctaagcgaggtgaaagcacctttatcaagccccccgcagatagactttgtaatggctacttcttcagaaatgattcgatgaactcacgccggggatgacgatagttcagaatatcttctggcatcctcataaagcggttgttgccgtctttggcagtaacgaaacagcagtgaactccgcagacatccgttttgatcgtgtcgccatactcaaaaagcaactgcgccatcttctcttgccattcttgcggcatagcctccatgaatactctcggcatcacgcagaacgacgcatgcgtcaggccaaaccacaattgcaggtctttacgatattcttcatccatcgtctttacctttgttgcaataaaaagccccgcgaatgcgaggctaaatcctggtgtttgtgatgactggctcttatctcaacgcagccccttaccgcgcgcaagatgctcaatatcaagcatcagcaatgagatgttaaatctggattcactccagaagtgatcaccaccctgtctacagagccagatgtgaaggatgatgagtaaaattatcgctatcatcgaaggcattgcgtcctgatgtattcctgnagcgtnntnaacctgcgcggttatcctgtcgattccacttcggagacggtaataattgagttcagcatctgctgtaagtcttgggctttctccatcgcccatgctgctggctccggtcgttgactttgcacaggtggcggcgacttgcaggcgcttacgaccagcagaaacatcagcacggagactttcgatagtcgcattagcatcagcaagctcctttgtgtatctggcgtcaagttctgctacatcacgttgccgcttctgcatatctgcgatgatggatgtggctttatcgcgctgctctttgtaagcgatggcgttatcacggtaatgattcagccccagactaagcgcaccacagaccaccagcagaataacggtaaacgcggaaagcattcggtttatgctcaccccaccagccctgccgaagtcaacgccatccagtttatggaaagaaaaagaacaaccagcattagtgaaaatgaaataccgacgattacacaaaggcccttcgccagcgttatgagtttatccgatatcattagccaccactccatcaatccgcctttgttattttccctttgcctgtatcagccaggacaaaatcaatcagcagattcgcttcgtttatcaatgtgcggatttttgatacatgcgcggctttaacctgtttccactcattcagcccggtagcaaacacactggcaatgtttttatcccgtttcatgtcagcgcaggcctgattgagttcttccatcacactcattcgacggggattaacgacacccccttcgtccagtattcatagagaacatcgtcgcactcttcctgatactggattaccttgtcgcggatttcgggttttactttgttgggattgatggtttgtaaccagcctgcaagttttcgaagtggcagggacaccatattgcgtcgtttcccatcctcagcaaccataacgatttccgttatagttgacgcaaaacgctgtcttaacttagccaactgtgattgccaggccagccccatccccgcaacgacaggtttcatgggaacgtatggctcaccgttatggttaaccacataaagagaatcgccgtgaaacggcacggtcatcatattcatcggttatttccttttagtgatgaaccctgcgcacaggaataaccagcccaaagagggttaaccagaccactgccggttatccaccagggctcatcctgaaaggttctttggtttatttacgcttgtgcgaagcgcagaaatgacaaagacaccattacggtgcctcagcgtgaaacaatcttcctgactttattcacttgcattttgccagttcgcaggatttcgtgttatccgtccgcgtgagcaaacgtcatttttcagcaaaatattctgctacctgtcgataccccagcatgccagcgcactctcctggtcgcgacgggatacctgaccgtagcaattatttgagcgaatacggcagtctctgccaccgtccttaatccaccagcgaatcgcctcacacgctcccctgcgatcaccagcattaattcgtctataaaacgtcgacgggaaacacttaccgggaccaatgttgtaaggacagaatgacgcgatccccgctttctgaggttcggtcaatggcactctgatgtttttcgccacccatgccagcgccttatcacgttcaatggcgttaacctggtcgcatttctccttcgacaacttcatgcccgggacgacaagcttaccatccaccagaatggcaccacgacagatggtccagatacccacaccatcacggtatgccgtggtgtggttaccttccttttcatccagaaactggtcgagaatgtcaggcgcagaagcaccagcggcaatcagcgccagaacggcagccgacaggccgtatttgattttggtgttcatggatatttatcaggatttatcggcaacagataacgagccagcttatatacgtcctttaagataagtcagtcctggatgaaaccagtaagccggcacttttttaaagggcggattatcaaaatcacgaagaagagcctcccgcacaactgcatccttgtccgcaccactggccagcgcttcaatctcagcagctatctgcagatatcccatgcaacggccaacgcgcttcatcagcccctgctttttattgttcttcaggtaatcaatggcaaa

SEQ ID NO: 435 - DNA, 10819 bp, Escherichia coli
accatacatagccgtcaattgtccaagatatgctccttcgatactatcgtcagatggacggtattctccaactgttacattgtatttcaaatatccttcacgaagagcaatagccggagtagtaaatggcacattaaaggtctgtatagtgccgtctgactctaatacccaaacttgcaagtcaccaccgttccccgtcactggaagatctgttaaggcaaaagcccctggtgagacgatacgactctgtattagatagccattttgacgtacttctattcgtgcttgggttcgggcaatacctctcactacaggagcaaattcacgttgattatatggcaccatattttcatcagatcctaacattcccccacgaaaaggaacactgtcaaaaatatctgatggtgtatagtcatccccaaacgtcaaacgactttttatattgtttaacccacgctcaacacgaatatatgagctttcccactttcctgactgcccggaagacttattccaagttgtcagatttctgattcgccaagatccgaggttgattccaggttccaaactggcccaaaaattgtctgaagaatttcgagtattacttctatactcccaatgaccccctctacttgccagttcaacaaaaatgctgatataccatcatcccacattgtttcatgggcaatgcctgtcaatggtgggtggatcgcaacttgtggaattccgagtattagttgctgttttataaaatgatagtcttctgtagcttggggatcactgataagtcagcacaatcgctactgtctctatttttttcactattttgccgaaaaagattagggtattcttctatttttactccgtaattaatcaaaatatctcgagttaaacagggtttcaggtaatattcaccatgcctattttttttgtgtaaaagaatatatcccttgaatcaatacgcgaaccatttaaaattatatcaaccggataaataccaggcaactgccctcctttctcaagtagagttaagtctatccccccgctaccatggtttaataaagaggcatcaaatgaaaatgtatgtgcgattacattttctattcgaaaacacaaaagaatgactattatgaaagatgatgttttcatatataaaacatgattaaatattaagccctgtttcaaatgttttactaataccaccgtaatcagtcaccactttccatcggacgtccccccccatttacaggcatcggatattcgtaagaagaaaaaggagctatataatgggtttcagttatttctttttcacctactctcaactcagcaatgtccatatagaatggcgttgggtttactccttttaatttatttccgactttttgccacttaatttttcctgctacatcatctggttgccctttcacatctgccggacgaacgaatagtttaatgcaactgcttactgaaacttgtatattcatagttgcttcatctgatttttttccgctaacttcttctttagcccatttgtcctcatattttggaggaatcgcctttacacagatccattgtagactttcacgatctattggaaaagctccttctgttttgacaatacgaaggcggcttgattgtagagcatcaagtcgaaataacggaggtgtaattataaaaggtgcaatatttttttgatcctctgataatacattcgcttggactaatataggatagttatgttcattaataactgccaatgtttctccagaagaattcggcttataaagcatacgtgttgcacctaaatgcaaagaaaatactttggcgttattctccacattttcaaatgattgggcatgcgcaaaagtaaaaacacttaatgctatagctattgttgaaactattcttcgaatcttcatcgctatcacttgaacttgaacttgaacttgaacttgaacttgaacttgaacttgaacttgaacttgattatacaaagactcaaatcatataacgctaaaaaaatagcaacatttaacatatttcaatcttctaacactaggattccgcccccattttctccaaaaattacacttttcgcataaagataattatttatcacgttattagctaggccgtcccggaaatcctggaaactaaactccctgaaagaggtaaataggataacgaaaaatacacgttttcccccgaagtccgttaaggggatgtggacgatttcctgaaccacggcagcctggaggctgcaaatcggggtgtggcagaatatgagctttcagagtaaccatccagaatgagttcccatgtcacacacctgaagcaccagaatggtgaaagaggttctgaaagccgtcgccagagccaataatcccccttatcagtccgtatttgcagactttatcgccggtcatccctcctgcacggtctgtttctgggaaaccttccacaaaatgtacccggattcaccgtacgaatacgtcacgttctgccatacctgccgtcgttttgtatttatacgaaacagaagcggagatgaaggcggatgacccgaagtggtggtgattttcagcctcgtccgctgaaatgctggctgaccgaagacgaaatcagggccgttcttgatgcggtgcgcgatgcagtatgcagtgtcagttgccgggtggcagaagatgggggttcgcgcccatttactcccaaagtctcaccttgcttatgtaattaattgaatttatttagaaaacgttgcaattttagcatcattttttattgttctttttaacctgaagtacgtcgatcgagagatacctgttttttctgtcacactgcccagagattctccctgtgatataagctccaacgctgtaggcgttcgtggatgcttcttcctgccaaattttacgcctgcggcaagtgccgctattcttccgtcgtttgtccgctccagaatacactcacgttccgcttcagctacagcagcaaggatttggataaccattttgcccattgtcccttctgtactgagaccgttctccaggaaccggatggcgatcccctttttgtaacagctatcaaccacacggatcatgtcagcagtgttacgccccagtcggtccatttttgtacagatgattacgtcgtctttctctgcacgggccaacaaccgctgtagtccttcccgttcatcagttgcgccagtcataatatccgtaaaaatacgatcttcccgtaccccggcattttttagctccgagatttgatgtgctaagagagagacttttggaggaaatgggcgcagaaccccataatggtgcgccgcagagagcctgctcactgataccatgcacagcggcggcctgcgccccgatggcgaccgtgggcttcagtctggtttcaaataccacctgaccggacgcatcggtcaggccgttgtttgccgatcgttgccaggccggttttccttcgcctgccactgattatgctgagcaggaactggatctgaacagctattgcatcagcagacctgcagccaccttctttctgcgcgccagcggtgaatcgatgaaccaggctggcgtgcagaatggtgatctgctggtagtggacagggccgaaaaaccacaacacggggacatcgttatcgctgagatcgacggtgagttcaccgtcaaacgactgctgttgcgcccacgcccggcactggagccggtttcagacagcccggagttccgcacactgtatccggaaaacatctgtatttttggtgttgtcactcacgtgatacacaggacgcgggagttacgctgatgtttgcactggctgatatcaacagtttctacgcctcatgtgaaaaagttttccgcccggaccttcgcaacgaaccggtcatcgtactcagcaataacgatggctgtgtgatcgcgcgcagcccggaggcaaaagcccttggcatcagaatggggcagccctggtttcaggtgaaacaaatgcgcctggagaagaaaatacatgtattttccagcaattatgcgctgtaccacagcatgagccaacgggttatggctgttctggagtcgctttctcccgcagttgagccctactcaattgatgaaatgttcattgatttgcgggggataaatcattacatctctccggagatttttggtcatcagctcagggaacaggtaaagagctggacaggactcaccatgggggtgggcattgcgcctacaaaaacgctggctaaaagtgcacagtgggcaacaaagcaatggccacagttttccggtgtggtcgcgctgacggcagaaaaccgtaatcggaccttgaagctactggggctgcagccagttggtgagatctggggagtaggacgcagactgacggaaaagctgaatgcgctgggtattaacacagcactgcagctggcgcaggctaacacggcattcatccggaaaaacttcagcgtcattcttgagcgtacggtacgcgaactcaacggcgagtcctgcatatccctggaagaagcaccaccggcaaaacagcagattgtctgtagtcgcagttttggtgaacgaatcacagacaaagatgccatgcaccaggctgttgttcagtatgcagagcgggccgcagagaaactacgtggggagcgtcagtattgccggcaggtgacgacatttgtacggacatctcctttgcagtaaaagaaccctgttacagcaatgccgctgtggaaaagctttcattgcccacacaggacagccgggacattattgccgccgcatgcagagccttaaaccatgtctggcgtgaagggtaccgctatatgaaggcaggagtcatgctggctgatttcactccatcgggtatagcgcagccgggattatttgatgaaatccagccccgtaaaaacagtgaaaagttaatgaaaacactcgatgaactgaacctgtcgggaaaagggaaagtgtggtttacggggcgaggaaccgccccttaatggcaaatgaaacgggaaacgttgagtcagtgttatacaactaaatggcgagatattcccctggccaggctgggttagttcagtcatctccgaacatattttcagcgtttcttctggtctggtcttcaccgtcatttctcgacagactctgctctgtaagaggagtacagcaatccacagacgaatggagaccagattgtttttccagtaattcaagcaatttcttttcaaccgaaaaagcacctggtattacgctggaaatcaccttattaatatcatccagagtcgtattttctgtcagtaactccgatatcagcaaaggaagacgtttatctatagctgcaaacgccgcaccagtaactaacatcgcgcgcatgaaacgtccccgctccttcagtttttcatttgcaatgagctcatctgctatcttatctcctgtccgttcatccgggaaaagttcaaatgagcagcgtctggatttattttcatcactcattagtcacaccacctttcatttttatcattcccatgactaaatcaaactgcggagatgagctcagataaaagcgctcatcaggaaccttagtcaggttcttcacagcctcggccacaatttcagctccaccaccaacacacattacatgtgtatagtcggtgaaacggctgatgacatcattaactcgtttaataagcaacttctgccgttcattgataacattaatgatagactcacgctgttcagcattataaatgcgacgggaaaggtagtcaggttcattacggtgcacaatgatattgtcagcctggaatgagctcactcttgtattagcatgtacagccatctgttccttaaccccggatgtaatcagggacacgccgatattcggatcacaccaggtttttgtaatccctgtcattttgctacgaacatgcgacacatcaagagttgtaccaccgagatctacgatcaaaagggattcatcatcctcaagccccgcaagaacactgaaaccagcgggaatactttcaggaagaacggaaacactgcgaataacaaatgcatcactcccctgcaccagtacttcacgcatcacattttttttctttctttcaatatttttcttatttttctgattgttggcgtcaaggtattcagagatcggcaatgtgacgatgacatcaacaggctgcgctttcaggccggtctgctgtagcgcatgctgaatggccacaacattcacatcactgtactgatagcgtgtttcagtcgttacgacagcatcagcacttaatggatcaaatgaaaacttctcgccgtcgatctcgtaattagccggggcagcatcatccagtaaactaaaagaccattccggtttaaagctgttagggctgattaacgttttcacgtcaccatcctccaaccaggcaagtttaatgttggtagaaccatcatcaataaagattttcataaccagtctccgttgctcataaacaaatagaaaaaacaaacacacttcatacatgcaacttatattcaattataatgaaaaaaaaggtctttctgaaaggagaatgcaacataaaaacacgataaattgtatgtacattacacatacaactttaagaccagaggaaatcatagatacaaaaacattatgaaggttatatgtgatacataaatgcaatataaaaacatctttgacattatgattcaggttaagggaaaaggaatgaaatggtgagactgagaggaaaggaaagcggtgacgaatcatgtcaccatatacagcaagatgtctaatggggactctttaggtacgtgaagaatccccataacgcatttaaaagacacacatcagatacccttaaggtatccgatagtttattgacctattgcaccatcacgttcaagcttctctcttatagcctcaataatatatgagctaaaatccagagatgttttactggtcgctttaagttccgcatgagcttcaaaatacgacagcggtatggccttaagattcttagccttcgtcctggcagccacgggacgacctgaaacttcctctgcaccttcatttggctgagacgggactgttgctgttacggcagaagaagaagtttgtaatctggcagaatccaccaagtttttcagtttttcagcctgtgcactaaatttcgctttgctcatgagataacccaggatgtttgttagatacccaaaagatatccattaaaagcccaaaagataccatatggatacccaatagatacactttactgtttgttattttcaatcagatgattgatttcttcgataagggcaataacttccttacctcctgccgaatagcgcccatgaacagactcagtgattcccatcccagtctcaatgacatcctcaaattctgcacgagcagaaatgcggctcttcatcagcttcagatgtttgaacgatggcaggattgcatcaagcttagggaatttcttcttgttaggattaactttacagagatacaggtgagcagttatatcggtccccatgatagagctgatttcgtccagtactccatcaaaatgcattaaaccaatacgctcagtcagggagtcttttgaagggacaataacgcagtctgcaaaggcaatcgcagtacgggtaagatctgagtcaaatcccccacagtcaataagtaacgtcttatcgctgttcttgtagggagtcataatttcgattaactcatccactgttttgggtactttcacggaaatttcttttccttcaggtctcagccccagaatgatagaaagcccggtatgagtatccagatcaactgcatcagacttcatttcaccaacaatgtttacggatgaagttgtcttacccacaccacctttgggatgcgtattagcaataacaggcatagtgtatctccagaatccacatgtaatacccataaagaaccccaaagacacctttcggatatccataaggtactcaatagatgttttttactctataccggtcctgcatgtcaacagaatatgaaataccgataatatatccatgagatatccgaaaggaatttaaaaaagtcagagcttaaggaattcttttgagcatagacaccgcatcggactcaggcatcgaaaactgcacccggtgccgtgcagccacatccagcgcaaacaccttcgtgtagacctccgttgagctgatggacttatgccccatcaggctctgcaggaccttcagcggtataccggcatacagcatgtgcatcgcataggaatggcggaacgtatgtggcgtgaccgggacagagaacgtcacaccatcagcggcagcggcgacaaccgcttccccaatccaggtcctgaccgttctgtccgtcacttcccagatccgcgctttctctgtcctgccggttcgtttattacgccgttccagaggaattttcagtgttgctaccatcgtctgcagctggctgacgtacccggtgtcggagagcggaaccagccggtgagtctgctggccggctggcattcttcctgccgtcctggcggctttttcggtccgttgtttcagggtcgcaagctgcacaaacggatacggaggcgcgagcgaaaaatccccccgcgtcagcgccagtgcttcattaatgcgcgcaccggtgttccacagtgtggccagcagcatcttgcggcgcagatccgggacgtaatggagcagggcactcacttccggagccagcagatatttcggcagttcatcatgaaccatcgacatctggcgaagtgccagagctgccggataatcaatgacaacaggaagttgtggaaactgtccggcagaatacactgccggtaccatggctgcagactggctgtgtataacggagcctgacatttatattccccagaacatcaggttaatggcatttttgatgtcattttcccagtggctgagatcagccacttcttccccgataacggagaccggcacactggccatatcggtggtcatcatgcgccagctttcatccccgacatgcaccaccgggtaaagttcacgggagactttatctgacagcaggcgggcactggccagggggattaccatccgtcgcccgggcgtgtcaataatgtcactctggacatccacaaacagacgataacggctctctcttttataggtgtaaaccttaaactgcatttcaccagtccctgttctcatcggcaaaagagccgttcatttcaataaacttggcgacctctgccatcccttcctgattttcagcctgccagcgttcagcacgcagtcgccgggcttcgttctgcatggtcgtactgaccagaccggagatattcacgtcatacgccttgagcagctgatagctgtcgctgtcaactgtcactgtaatacgctgcttcatagtacacctctttttgacatacttctggtatgcatatcagtatatattcttatgccgcaaaaatcagcgcgttaatacacatactgttatctggcttttagtaagccttatttatttttccttgaattatgttaaccaataaaaattaaaatcagacttataaaaacaaagcttaattatcgaaggaccatttccggcagatccgatttttctgttattgacgggtttccggaagtgtaccacactgaggaaatcatcatatcgctgttttccgcccctgcgcgacgcatcacaggtcagggagatgacacaacatatagtgtcatcagcagctgaatccggcaccacatgttgtgcttacaggagatggcgttgtgtggggggagaggaagatcctgaactaccttttttcggatctccgataaaaaagaaagaaatatagatatgttaaacatatccatatgccttacatctacatatgctacagctatacagatgcctcgcatctgcctatactaaacatatgtgcccccccggtgctttgaatattccggatatgattcatatatccatctgttcgggagaaaaaaaacatgagaaccgtatcgatatttaaaaatggcaacaaccgcgccatccgtctgccccgtgatctggattttgagggggtgagcgagcttgagatcgtccgcgaaggagacagcattatattgcgcccggtccggccgacctggagctcgtttgcggcactcgaaaaggccgacgcagactttatggcggagcgtgaggacattgtcagcgacgaaggaagatttgacctgtgaaacagacccgaacgaagacctatatgctcgacacgaatatctgctctttcattatgcgtgaacagcccgccgcagtgatcaaacgtctggagcaggcggtgctgcgtaaccaccgcattgtcgtgtcggccatcacctatgcggagatgcgtttcgacgccaccggcccgaaagcctcaccgcgtcatattgcgctggttgacgcgttctgcgcccgcctcgatgccattctgccctgggaccgcgctgccgtggacgccaccacggagattaaaatggcactgcggctggccgagacgccaatcggcccgaacaacacggcgattgccgggcacgccatcgctgccggggcgatactggtgacgaataatacaagagagtttgagcgggtgcctgacctggtgctggaagactgggtgaagtaagacactcttttcgaagtcaagagacaagggcacaaagaaacagcccgtatacgtaagtgtcaacggagcaccgtattgacgcttatttattggtgagtactacgttccatggcaggagttcgccaa

SEQ ID NO: 436 - DNA, 17267 bp, Escherichia coli
aggtcttcatgtaattccttcgcctcctcaatggtgaaaccaccaggcagaagagccggagttaccggagagctggttgacgcttccgggattttccgaaaattattggttgacgaatctttattttcccgaaagtttccggactgaagcatggcttcgcggcaatcgttccagcctgtagcgtatgcagccgctttgctgctgccttcaactggcgcatcctgccaatacatttcttccggcactatcggcgctggaggggcggcaaatagatatccgccaaagtcaggaagctctctaatggcctgtacgaatttttgtttgcctacgtcaacccctaatgggtaatgagctataatctttgccaccggctctgcttccagcgatgccagcgcaatccgtgccagctcttccgcttcttctgctggaagcacaacgttgctacccggtccgtatgtttcgcgccaatgctggattgtcagcagtcgatctttggtaaaagtggtcatagctatttcaccttaatctcaacatttcgcagctttagctctactggcaggtctgactttcctgttaatgctaatgcgagattttctggagtagtgagaacagttattgttttccccctcgccagacgaataatcatgtgtatctcgctatcgtcacatgctcctggtcgaacaattgagatttgtccgttcatctcactctcctttgatgcgaatgccagtagcgcggattgcatcgatgacttcagaaactttgtatgccattaccgtttggtaatcatcgtgaaaatctgttcgatgaagcatgctgctacgttccgggagcagtatttcccgcgcttccagttctgcaatgcgcttttttgctgcttccagttcatccagtaattccagcacggtagccggattagccttggcaacaaaatcccggactggcttacaatcaatctccgcaatgggttgatacgatgtgtagccatgctgtcttgtataactaccgtgacgaataacgaaaaaatcaccatttatttttttagcctgccacttatcttcaccggctttctctgccgcttcacgcagtgcctgatagtcaatcttgctcactggttgcctcctttgcgaagccgttccgcccattcttcaagggatttctctgcatattcaccggacaggccatcaatcggatgcgattcattagctaactcttcttttgctgacagaatcatgcgcgtaacgtcgaaaacttcacgtaaagacttattgataaatccgtggttgaaagcagcagcaagacggcttgcggtatagttaatcccctcgttgcgagcctccgcacgaatttcagccagaaaagcatcggtggctggaatttgcggcatccctccatctgttgcgcagatatacgcatcagatagctcatcctgctcgccatcaaacacgtagcaactctgtgcgataaatttattcagccccgcattctccgccgccagagccgaaaacttctcgtgtgccaacttaacagccgaatcagcctgcttaattgactcaatcgctttctgttggtcttcggccagcttcgctaaattagcctccagttcggctatgcgttcgtttaatgcatctcgttcatccagtagtgacagcacggtttctggcccggccataattttaaaggcgtgaatcgcatcaatatcaataccaagctccttgagcttcttttcgcttaataaatcatcatcacctggtaatattgacagatgtgtcatcgctgtaattgcgcgttccgacacgtcacgcaatacctgatagtcaatttcggttgtcatattttcgtctcgttatgggaggggaattggttgtaagctggaattgccggatgtttacccgtgtccggcgcacgacctcacgttgcagcgtacgagaatagactattgctcagtatcgtttgatgtcggctgaggacattcgccttgctctcacaacagagcaagaagcatggacaccccctcacgatgtgatgattggtgagtgtcgatccctgaatgattgatgttgttaaactcaaacatcttgctcctggcaatagcctcaacggtattccagaatactaatagttctgttttctgctctgttttatcagcaacaggaagtttgatatgttgttgacatttattaatgcaaccattttgaatatgttcctcgtgcttttcattgtcataagcatacagcccgacaaaaacatctcgcacgttacgggaaatattttccagattcgtctttggttcctttattaaattaagcaccgataaatgggctttaagcgtatccgcagctattttctgaatatccgctggtaaatctttaaattgcatagtataccctccaagaactgtgtattttctcgtgaaatatgagcgatatgtcgtgacgtccctgtcacagatttcatcacactgagaacgtgccgatgaaggttaagatatcttcttcttcgaaacgctctttcagcaggtcacggaactctttggcaatttcttcttccgcagcttcaacacgcacgatacgtagcaccagaacaggctgttcgcttgtcagaatgcttaatcgcagcgtgaattccctgttgcccaggccctcgtatgggatgcattcaaagcggaaagtggcaggcatgatttctttgcttttagcctccacggactccatgactgagcggctaccgctgaagttttgctcttcatattcagcactgcgttttgcatcgatggtaagacgacggacagcagagatagcctgtttgatatccagcacattaccgtcgctgtcataggctgtgaggaagtcggcccagtcttccagccattcagcgagagatttctggagttgttttttgccgtcaacgtcacgcaatgcgcgatatggtgatgtggctttcagttccagcagtgccttgttgtcagcgtgtccaggttgctccagagtgccgatattgaacacagtgactgctttcatcgtttccgcgttaatgaagcagcgggagtgctcatcggcataccctttgctgtattcaacaaagtcatcaatactggttgtggtcatgactccacggaaacgaaaacgttctgtcatgaatcgttccagactttcgatatttacattgtccggcaataacgcaacagggcattccgtaagcggcaaattttcaccagaaaaagcagtagtggtgagttttacaatttctttaatggcattgctatctaactgagacatgtatatttacctttaatttatgtatttagggataatgcgcgagcgttttaaggcggggaatattcagcgtaaaacagcgtcatgttggccctgtttatcaaaaagctgtccctggtctttctggaacaaagtaagctcaccacctttatttacaaacatcggggtgttagttgtgtcttcttctgatttactaccacgcattgtcgggcgtgtgaattttagtttatgggaaactgatacgcgattttcatcaagtgaagataattcgaattcaacacatacctttccttttttgtttgtgctgtttacgccaaaggcaacttcacttaataccgcgccaagtttgttaacaaataccccgccgtcgaggtcgttaatgaaaacattaacatcagtttgatgctggttcatattaatatctccgtgtagaggtgtgttaaggcttcagttgttcactgcatttaaagcctggttttgtttgtgaattaaaaactatcgctgccgtactgccagtaacctgggtcgtccgtgtgattcgggtttacgtttttgctgcgattgtctttgtctttgagagtggaaaccatatttgctaccgtttctggtttctttccttcagctttttctttcagtgtctgccctgtttctgcaatgaatggaatgcggatttccatctggtaaccgtctgcgccagtctttctgtttgtggttaatactttctggaggacgagtccgattttctttccgtgaaactcaggtgcaacatatttactgacggaaaccatatgttgcgttaactgcccaattcctgtgcatcccatcatggcgtgaataatgctcgccccaaatttattttcagtaccgtcattcttctgaacacaaacactgagatattggattttccgtccgtcgtcggattctccagaaaactcaatgaatcgggcacctttttctgattgcttgagttctgcttcggtgatgttaatgatatgcgcacccgtttcggtaataaaactaccttgtccggcggtcagtgctgattcttcgttataagtaaaaatcacttcatccattagttattaaccccccattgttctccaaatacaaaaccaatttccgccagtgcttcgtccattttgtcgatgaactccggcaccatctcatcaaaactcgccatgtacttttcatcccgctcgaccacgacataatgcaggccttcacgcttcatgcgtgggtcgtagttggcgaagtaccaggcgtccttgtctgtaacccacatgctgaattgcacctgggccatgtaagcaggcttgatagcgtcaaagccgccaagccggaatttcatgaagtcgcgggaagtaaaagggcatttaagctcaagaccgttaccgtcgctgcataaaccgtcgggagagcaggcggtgcgcatgctttcgtcacgaaaaattattggcgtttccgagacggtaacatccgcgataaattcgaagagggcacgggcatcatcttcgtattgctttccccatgcgagcgacttagcgttaacttccggtgccacgccagtacaaacttcagccagcagggtgtggaagtatgacatttttgtatcaggccatttgctgccggaacgtggctttgctatcacattgtgaacttctgaagcagtgataacaccgagtctcagcttgtgccatccatcatcgccctggtcgaggctggtaatatccacgccagttcgctggagaataatttctggtgtcatgacacggcctcgctgttattttccgtggtggcgtgaattttcgcttccgccgtggccttgtttctggcagctttctttttgacaaaatcaagcgttttgacagcttcttcctgactgagatattcatgtgatgcaatcgtgcgacggaatgttttggaacataagggaagcaggtcatcccatgtcttgttaatttcggtgattgcctgagtgatctcattgataatctcatctgatgcgggagtgacgtcacgctcagggatgtgatcagcattcaggatgataccttcaccgccctgagtgttcaggtagtcgatagctgtatccaggcgatcgcgacggggccagtatttgctggcgcgcttaacaatggcttttctggccatttcatcggggaaactatcccacgggctacttcctccgttatttccggctttgctgcacgccctgatgacctcgatttccctgttgctcatctcttcggtcagatagtcgccttcggatgtttttacgacacaataaccgccaatgcgtgcgcccctgtctacgaaggggttgtatttgtgcgtgggggcgcagtcaataccgttggactcgtaaatgtccttctcgtaaacaagtttgcattgcccccactgaatggctcctgtgacctgtgccagatgcagaagccccatataactgatatccaggcatacagccttttttcgtgggaccagatacgccagcttgctggccgggttcagggttatgccgatggcggcaacattgatgatagcgttctgtgcgctgggcagatttgcccttgctgtgtcagccagaaaggcatttttctggaattgctgaattgcaaactgactttccttcgcccatgtcagcgtcggttcagttaatgcctcgcagaaaaagcgctcctgctgcttaacaaattcaacgatatcgaacattttttggtcctgaaaatcagaaaggacagggggagaattttctctcccattcttcttccgcccgagcataggcgatcgctgagatataatcgttgtacgcctcttcagctttttcgccagtgagtgctagttgggcttctttgggtaaaaaaaggctgctcataagcaatggtttatcggggaacatgctgataagctcctgcgcccgatcatcaatccatttatccttttcatcctgaatttgctgattaatccagcgacgctcctctatgcggtcgcaggtgaggtatgcgttcatggcggaactcctgattccggttaatgcattaaattaatttgtcgggaaagctgacatacagggcagttacattcttcctcctgctccttagcgaagaaatatgcagcggcctgtaatgcgatatcttctggatgttccgcgataaacataacattgccttccgtatcaataacagaaatagcctcatcagacaggacgacaaaataggcgatgattttatcatccataaaaacttctcccattatcgttcctgctggagttacgacgctttttacattgatatttattttttgattgagcatgatatttcccttcaggctggtgagattaacggttggcctttattgttcaggtaaacttctattgcatctgagataatgcgaattttttcaatcagtgaatgtgcgtaaagtgcattattaacgttcgctgacgccatgtaataacgcccgttgtaaagaattgctgtgccgggtttaacgtcctcgcgagaaactaatgcggttccgtagtgaggtttgagcatgacaaatcctccggttaattaatccagatatttaatttaatccccgatatgtggtcggggatggggttaattaaagatttacgttgaaaccaaagcgggaagacttttctgatgtacgggaaatatccagcaatttacggcgcatttcttccgtcagatgcttgaaggcgttaaattcggcgacagcggcgtcaacgttatagcctttgctgtgtagctcattgaggatgcgcatagttgggcttggcatatcgaagagcacggaagcatcaaggctgataaccttgcgatcaacatagttcatcgtggcgtaggggtgatgctctgaaaaccacgacaaagggaaattgatattcatcgcaggagaagacagggccagttgtttctgttcccatagttgtttttccatgcgatcgaattcagcaatgtaggcttccttgaatgcagctgcttttttgccggtgaagcccatcaccagaaaaacgaagccgtttttggtgatttggtacattgggcgttgttcgcctttggcgtcggtgtaggtaacgtcctcaaaattgagggcgttaaatttctctgagcattcaatatttgcaatggcgcgcaatacgttatcgtgtcgcttgcaaaaatattcggcaacggcaaaggacgtagtaacagcgcgaccattggaaatggtgatttcaggttgagaaaggactgggatagtagccataatggcagcctccttgattggtgattgataaccaccgctggaggtagcaagctcgctggcggtggactgtacagggttgctacaactggcaatcaagggaaccagcccgaccgaagtcggccccatacagcccaccattgataagatgtgcgtgtatgtcgatacaaaaaaagacgctggcgcgtctgtatcgcctcgattgtcagcggggtagcaatcccgacacccgttttatgaggtgttcgccaaatatagccccgacatcacacgcagtcaataccgttctttctcagaaacgctttggcggtgccgcctgcaccccaaaacattccctgtattggtcagcgccaacttcctgccagtgttgcccgttctcacgccgttctcgctctcgcgcggggatactctctcatcgaccggatcgcacccgatgatacagcacgtttacgtgtaggggtctaaacaggtcattgacgctgtaaagctccagattgttaaagagcattttgcggcgggttaagtcgcgccgtacgactgatttatgtagccctgtgtaagggcgcgatgtttctggcttgaaataaatataacttgcggtgattttcatgtaaataccgttggtgctttttaagggcgagaaattattacttaactgatttttaaagtgatttattttttaagggggcagataacaggaggggatatgcaaagaaaaacccggcgcatgggccgggctatttatctggtcctgttctcattcagtagagtaggggccaagaaatcgcactccgttgaagtgaataagatgagaaggtgcatcagccacccatacctctgtttcccatgcgatttcaccaagatatcgccccatgatggagcgatttggaaaagcggtcacatagacaagtccggctgttgatccggcaaacagcctggcaagctcagcatgccgcttcccatcaaccggtccatgactggtgacagactcaaccagtagcagccagtttttcgcagtaaaatgtagcaccacatctggcattttaccgtgtgaatccacatcaacacctagcccggccagcagtggagcgtcgaagtagccccacttttcgccagtgtcgccagcatagaccagcacgctacccggagcaaaacgtggggcgaagtcctctattatggcacggataagttcgctgtgctcgccgggactgagggttatttgctggcccgcagcaatttcaacagggatacgattctgttcgcgctccttagcatagcgggtaaccagcgtttcacgctcggctaaataggttgcaaggctatcgtgccatgccgggctgccgaaagtgcgtagcatggacagagcagcaggttcgatctgataaacagccttcgggctgttcactgggcgatcgggcttgtccggattgtagagggctactccagcagcgcagaactgatgcatagactggcggcggaatgtctcacgagtattgggtgcgtagaccttgccgtagtgctcccgaacccaattcatgattggtgtaatgcccacaagcggattttccgcgtcggcccatgcttttcccggtgtgaggttcaggagtgccagcaaacacaaagcagaacgctcattctgctgcgctctgggcaggcctaaggatgctataatttgctgagcggcctcaatataatcattttggttgttcatgcagtcagagctcctagcttagcgtcaatatgttcttgcgtgagagtttcttgttgcatagcccacttgccaagctctatcagagtgtcacggcttgggtacttaatcatcttgaggtcggttgcattgacctgtgtatgcccgttgaagcgacggaaatacttatccactgcggtagtgttcaggaacacggccaagccacgggccagcgcctcgggtaacccatgtttgttctcatgaaacacgttcatgtgattttcaaatcccaacactgaatactcactgaaggtagcaggatcaacgacgcttgctaccactcggcgcttttcctccttcgacgagaaacgacgcaccacacaataaaaaccgttcgggtaaagccacttttctgtctcgtcgttgcgcatgattgcgttgggtttcttcaaaccttccacaggccagacagtgctactcatactcaaatggctcgggtagatcaggggaacagttccttcttctggcatgctgcgcaaatgagctttcagtcggaaatcaactatcggtccggtcgataccttcacgccaatatcagccagcgaacattgtacggcagatgataactcaatggtgcttttctcgagcgtggtcggcacatgaataaaccgctccgaatcgtccgggtacacaatctggtcaaatgggtgttcgtaggtgactaggtcaaaaaagctatcatcggtcgaagttgtgactgtaacagcctcctgacggcctccacgctccaggcggatgataatattttcctgcaacacatcgtcatccctgaaagctttgctacgtgattcgaacaaatgaatatggcggattgctgcccgctcaagtatgaaattacggaacggacggtaatacggtccgttgcagaaactacgtgggattatggccactatctgcccgccaggtgcaacctcacctacagccagtgcaacaaaggcggaatacagatttaccgtctcgataccgacagtgcgaagagcctgccggtgggctgactggctattgatcttcttgtaaggcggattaagtattgcatgggtataacctcgatcctgtagaccttcggcggttgccagctcaatataatccccttcgatgatgcggggcgtcactctcctgtacccggttaagtgcttcgcaaggtgaccacacagctttttgtcgatttcgtaggctgttgcctcgacagactcaaagccaaactcgccaaccagccaacggtcgaggaaggcgcaagacagtgcgcctaaaccagcgcctgcgtccagtagacggcaagttttcattgtgctcggtggaaacaaggaggccataaaacgggccacgccagaaggcgtcatgaactggccgaactctgctttgtgtttacgcgcggtacggggagacagctcgcgacgcacgctgtctgcgacgtctagcttttgaagcataactaatcctctttacgtggcatgatgatgccaacgtgcttttgacatcctccacattcttcaggcgtgaaggatgtcaaatcactctgtgagctcaatcaaaagtctcatcattccactgcgatttgatgacctttccgacaaactggcagttttcgttacactcaatcatgtcgaatcgtgggttgagcggctccaggtacgctttaccgctctcacgaatgaatcgtttgaaggtaaattcatcgccgttcattcgggccacgcaaaaatcgccatcctcgatttcccgttcagggtcaacgagtatcagcataccttcagggaagctgggtttaccaccctgcggtgcggtcattgaatgccccttgacctccagccagaacgacctgtcactggcttttgtggtggtggagatccatttaatcgcatcttttgcggtgtacgaaatatcatccattgagaatgcgccagcttgtacgcaggagagtaacggatattcgtaagcggggacacgagttaatggctcttcaattgcgagcgccatttctgcaatagattttgccaggctgggactgaaatctccgacctttacattcagtatcttagcaagctgtgctgcgtggctggcatttatggcgttgatgccagccattagctgattaacagcgctttgggtaacacctaattcataggctaatgattcctgcgacaggcctaactctttctttttagcgttaaaaatacttttcagacgcttggcgtcttccagttgctcaggggttaacggtttctttttcatgttcataccatatcacctttggttatatgtaatgaaatatctgcggtgttgacattttaataactgtgcgtaatgatatgggcattttgaaggagtcagttatggcgatgaaaaaagagaccctggctgattacgtatacaggttcggccaaaagaaagccgctaaggactttggcgtggcgcagagtgcaatcagtaaagcgcttctcgtcggacgagaaatatacgtcaaaacctttgatgacggcacagttgaggcggaagaggttcgtccgttccctgcgttcgtaagaggcgatgattaatcctggacacacagcccatcggaggtgtgagtgaacaggcaaatcaaaacggttatgcccgagcagtactgtgatgctgatcgggactggatacaggagcaattgttacagctagacccgaccacccgggtaaaaattgcagcagagtacgcgagagtgtaccaggaagagtgggacaaggagcctgtatcgttcaggaagggcaacagggcaagacggagcgccaacacccggttacgggtgtatgtccagaagtacgcgagagccagccgtggctggatgctttcgccagtagcggtacggaagtttcccccgacaccatgatggcggttagttgcgctagagataatttcaagtgcaactaatttcctgaaaggaagcgaggagggggtaagggggtggagtcgttggtaaggcctgtatcccttggcctaggccagaaggcaggtacataggttaggtagatcactgtataagcgcgcgatagtttctggtgaaatgattatcgagctaactattgagtgataaactatgtcggcagcaaccaaatcggcactgatccgtacactgagcactgtaccactgagaacagaggagcgttacagctttctggctgatgttgtaacgatccttgagtcacaggggatgcatgtggcaagcaatgtcacagtaagaatcgatggcagaaatttccgtgttgatattctcgcaacagcaaaaactggtgggagtgtggctatcgagatcgatcgtagctctccgcgaccccgctcagtcatgaaattgcgtgaattggcacgtcgtggcactgaaggctttgtgttgcttcgaatgccaaagaaactgaccagttatagcgatgctgggatcgatatcatcccggcgaatggcaagggggcgtcatgctgaaaatcaccccaaactttgctcaggagcgcggtttaaaccagctgcggcaccagtggaaacagcatcgcacgtacctgatgtatgcacccactggctctggcaaaactggtcttgcagcattcgtcactgccggaatggttgaacgtggtatgcgggtgatgtttgtctgtccgtacaccatcctgctgaaccagacagcggaacgtttcaccgaatacggtttgccgtgggaagaaatcagttttgtatggcgtgatcaccctaactatgacccgtcacgactgattcagattgccagtgccgacacgctgatccgtcgtgagtttcctgacaacatcgatctgctgatcatcgatgaagcacacatgaagcgtcgtgcgttacttgaggttatccgggacaaagatatcagggttcttgggctttccggcaccccgttcgcagcctggatggggaagtactacgaatgcctgatcaagcctacaacgattcgtgaacttattcagcgtggtgatctgagcgattatgagttttttgccccctcaatgcctgatctggctggcgtaaaaaccagtaacaccgtatttggacgggattacaacgaggaacagctcgcatccatcatggggagttcggatctggttggcgatatcgtcagcaactggcttgagaatggcgaggatttaccgacgatctgcttctgcgtgaatgtggctcatgcgaactttgttacccgtgagtttttacagtctggcattggcgcagaggtgatgacggcagataccccccatgatgaacgacaggacatcattcgccgttttgaagagggtgcgaccaaaataattgtcaacgttggcgtactggttgcgggatttgacagcgatgttcgctgcctgatctacgcccgtccgaccaaatcagaaatccgctggttgcagtgcatcgggagagcgttacgtactgcgtctggtaaaaaacgcgcattgattttcgaccattccggcacggttcatcggctgggcttccccgaggatatcgagtatgacgaacttccgggaaaaaatgacggaatgaaagcgtctgctggcgggagtgaggttaaggctgagaaacttcccagggaatgccccaaatgccacttcatgaagcctgctggcgtgcatatgtgtcccaaatgtggatttcgtcctcttggtggtgatgacgtggcgacagatcgcgatcgtaagctttcacgcgtcaacaaagggaaacgcgaatacacccgtgaggaaaaacagcgttggtggagcgagatcaaggggtatcagaattaccgcaacgcgacaggtaagccactgagtgacggatggtgtgctcatacctacaaggagaagttcggggtttggcctaaaggcttcagtaatgcgccgctgcaaacctcagttgaagtgtacaacttcatcaagtcaaagaccattgcctatgccaaagggcgcaagaaagccatgacaggaggccagcatgcgaactagagatgcagccgtggggcactggagccggatttttgaatattacggcatgcctcctgttactggtgtgaaacattacaacggaccctgcccgatatgtggtgccagaggtaaatttcgctgtgatgataaggatggttccggttcatggatttgcgtctgtggtcacggggacgggatgaatctgttgcaacttgccacgggtaagccctgggtgacgttgtgtgatgaaatcgatcggctgatcggaaatacctggaagagggagaaagtcagccagcctgtaacagagataagcagaaagcgggagctggtcatagataagtttgccggactcccgtgtctgcggggtacaacaggtgaggcgtacctgcaggggaggggaatactccagttaccgaccgaatccgtgcgtttttgtgaccgtcagatcgccagcgggcgcgaatatcaggcaatttacgccattgcaacagatgacaaaggttctctttgctatctgcatcgtacgttgctggatggtgatcgcaaggcgaatgtagaggcggctaaaaaaatgaccgcgctacaggagttgcctggtttgcagcatgccaaatcggtggcaatacgcctgtatccggtgtcgtccactctggggatagccgagggtatcgaaactgcgctttcatgccgtcaaatcttccgctgcaatgtgtggtcaacaatgaactccggttttatggagaagttcattgcgccacctggcgttaatcacctgattatctttgctgacaatgatgcgcacggcgcaggtctggcggctgcctttaaatgtgggcataagaatctcatgagttgcaatgacgttgagaaagtcagcattcgctggcctgacttgccggattttaacgacatgctcattcaggggtgtgaagcccgtgaacatgtgttgacgcgcaaattcaaagcggaggctgcctgatggaaatagagatgatcaaggcggctaatggcgtatttgtaccggcgtatgagcgcgatttaccccgactggcaaaatttaaaaacggtgagctgtatacactggaagcaaaacttacccgtaacccatcttttcaccggaagatgttcgcttttcttaatttctgctttcagtactggtgcgctgaacatgctggatacgaattctctgatgaagcgacgcagtttgatgagtttcgtaaaaatctgacaattcttgccgggttctatgatgtggtcacaaccataagaggcgaggtgagatatcgggcaaaaagcctgagttacgcgaatatggatcaggatgagtttgaacgttgctacaacgcaatgattaatgccgcgttaaaacatgtgttcgggcgctcaaacaatcctgaactgaataaccgcctgctgtcgtttttctgaggtgatgatgaagcaacgtaaaccaaaaaaatgcaaagtgtgcggctcctcgtttgtgccgttccgctcatatcagaaagtttgctgtggtcagtgcgcactggaactggtcagaaaagaaaaggcgatagcttcagcaaaagagcaggcagacaagctgaaagcgcgcaggagggacttacagccccgcagttactggattaagcaggcacaacaggctgtgaatgcttatatcagggagcgggaccgtcatttgccgtgtgtttcatgcgggacgttcgattcagcccagtgggatgcaggccattaccgtacaacagctgcggcacctcagctcagatttgatgaacgcaatatccataagcaatgcgtggtgtgtaaccagtacaaaagcggaaatctcgttccgtatcgtgtcgaactgattaaccgcatcgggcaggaagcagtagacgaaatcgaatcaaaccatagtcgccaccgctggactgtcgaagagtgcaaggcgatcaaggcagagtatcaacagaaacttaaagacctgcgaaacagcagaagtgaggccgcatgacgttcaccgtaaaaaccattcctgacatgcttgttgaggcatatggaaatcagaccgaagtggcccgaatactgaactgcaatcgtgccacagtcagaaaatacattggcgataaagaagggaaaagacacgctatcgtcaacggtgttcttatggttcaccgcggatggggtaaagatactgatgcgtgatatccggcaggttcttgagcgctggggggcatgggcggcaaataaccatgaggatgttacatggtcgcccattgctgccggatttaagaggctgatccccgaaaaagtaaaatcacgtccacagtgttgtgacgatgacgcgatgattatatgcgggtgtatggctcgccttaacaggaacaacagcgatctgcatgacttgctggttgattattacgtgttgggggagacgttcatggcgctggcacggaaacatgggtgctctgacacctgtataggtaaacgccttcacaaagcggaggggattgttgaaggcatgctgatgatgctgggagtgaggcttgagatggatcggtatgttgagcgtgaattgccgggagggagaacctctgtattttatcagcgaaaaatagtttacgatcgtaaaaatctgcatatcatgataagagtggttacattgccacgcagccgaacccgccgatgcgcgggtttttttgtacccagaatcctgtgagctatacggaaagtacacagaaaggaaggtacgaccgcaattaataacaaaatcttaaaaatctcatatggcactattagtttttctaaatattgtatattttaagtattgcaggataaccctgtaacgaagtttgcgtaacagcattttgctctacgagtttgccagcctcccctggtggctggctttttttgtatccgttcaacgggaatgttacatacctcacaattaagtcagttgaatgttgtctgcccggatgagaatttgttagaaaaaactgcatggtgaatccccctgagcggaggggcgactggtgacggtataatctctgattatcaaaacgagaat

SEQ ID NO: 437 - DNA, 10147 bp, Escherichia coli
ggcgcgcggacccgcgccacggccccacgagcggacgccgcagcaggagcgccagaaggccgccagagaggccgagcgcggccgtgaggcttggacgctagggcagggcatgaaaaagcccgtagcgggctgctacgggcgtctgacgcggtggaaagggggaggggatgttgtctacatggctctgctgtagtgagtgggttgcgctccggcagcggtcctgatcaatcgtcaccctttctcggtccttcaacgttcctgacaacgagcctccttttcgccaatccatcgacaatcaccgcgagtccctgctcgaacgctgcgtccggaccggcttcgtcgaaggcgtctatcgcggcccgcaacagcggcgagagcggagcctgttcaacggtgccgccgcgctcgccggcatcgctgtcgccggcctgctcctcaagcacggccccaacagtgaagtagctgattgtcatcagcgcattgacggcgtccccggccgaaaaacccgcctcgcagaggaagcgaagctgcgcgtcggccgtttccatctgcggtgcgcccggtcgcgtgccggcatggatgcgcgcgccatcgcggtaggcgagcagcgcctgcctgaagctgcgggcattcccgatcagaaatgagcgccagtcgtcgtcggctctcggcaccgaatgcgtatgattctccgccagcatggcttcggccagtgcgtcgagcagcgcccgcttgttcctgaagtgccagtaaagcgccggctgctgaacccccaaccgttccgccagtttgcgtgtcgtcagaccgtctacgccgacctcgttcaacaggtccagggcggcacggatcactgtattcggctgcaactttgtcatgcttgacactttatcactgataaacataatatgtccaccaacttatcagtgataaagaatccgcgcgttcaatcggaccagcggaggctggtccggaggccagacgtgaaacccaacagacccctgatcgtaattctgagcactgtcgcgctcgacgctgtcggcatcggcctgattatgccggtgctgccgggcctcctgcgcgatctggttcactcgaacgacgtcaccgcccactatggcattctgctggcgctgtatgcgttgatgcaatttgcctgcgcacctgtgctgggcgcgctgtcggatcgtttcgggcggcggccggtcttgctcgtctcgctggccggcgctgctgtcgactacgccatcatggcgacggcgcctttcctttgggttctctatatcgggcggatcgtggccggcatcaccggggcgactggggcggtagccggcgcttatattgccgatatcactgatggcgatgagcgcgcgcggcacttcggcttcatgagcgcctgtttcgggttcgggatggtcgcgggacctgtgctcggtgggctgatgggcggtttctccccccacgctccgttcttcgccgcggcagccttgaacggcctcaatttcctgacgggctgtttccttttgccggagtcgcacaaaggcgaacgccggccgttacgccgggaggctctcaacccgctcgcttcgttccggtgggcccggggcatgaccgtcgtcgccgccctgatggcggtcttcttcatcatgcaacttgtcggacaggtgccggccgcgctttgggtcattttcggcgaggatcgctttcactgggacgcgaccacgatcggcatttcgcttgccgcatttggcattctgcattcactcgcccaggcaatgatcaccggccctgtagccgcccggctcggcgaaaggcgggcactcatgctcggaatgattgccgacggcacaggctacatcctgcttgccttcgcgacacggggatggatggcgttcccgatcatggtcctgcttgcttcgggtggcatcggaatgccggcgctgcaagcaatgttgtccaggcaggtggatgaggaacgtcaggggcagctgcaaggctcactggcggcgctcaccagcctgacctcgatcgtcggacccctcctcttcacggcgatctatgcggcttctataacaacgtggaacgggtgggcatggattgcaggcgctgccctctacttgctctgcctgccggcgctgcgtcgcgggctttggagcggcgcagggcaacgagccgatcgctgatcgtggaaacgataggcctatgccatgcgggtcaaggcgacttccggcaagctatacgcgccctaggagtgcggttggaacgttggcccagccagatactcccgatcacgagcaggacgccgatgatttgaagcgcactcagcgtctgatccaagaacaaccatcctagcaacacggcggtccccgggctgagaaagcccagtaaggaaacaactgtaggttcgagtcgcgagatcccccggaaccaaaggaagtaggttaaacccgctccgatcaggccgagccacgccaggccgagaacattggttcctgtaggcatcgggattggcggatcaaacactaaagctactggaacgagcagaagtcctccggccgccagttgccaggcggtaaaggtgagcagaggcacgggaggttgccacttgcgggtcagcacggttccgaacgccatggaaaccgcccccgccaggcccgctgcgacgccgacaggatctagcgctgcgtttggtgtcaacaccaacagcgccacgcccgcagttccgcaaatagcccccaggaccgccatcaatcgtatcgggctacctagcagagcggcagagatgaacacgaccatcagcggctgcacagcgcctaccgtcgccgcgaccccgcccggcaggcggtagaccgaaataaacaacaagctccagaatagcgaaatattaagtgcgccgaggatgaagatgcgcatccaccagattcccgttggaatctgtcggacgatcatcacgagcaataaacccgccggcaacgcccgcagcatcgcgaccgtcatcggtgagaagttcggcaggtattgggtggtgacaatgtaggtgctgccccaaatggcaggtgctatcgctgtgaacaataaatcggggcagacggcgcttccagcgtgacgaccatgccgagcacgcagcgggtgaacacgtcgatggcgagggtcaggtacgggcggccaataggttgccggtcgcggtcatcgaccacgatcaggtcgatgaccgtatggtctatctgcacctgctccagcggcgcggtcacggcaggaggctcgccgcccacaccttgtaggtcacgagcggcatcctggccttcccgccggcggatgaccttgcgcgggtcaaggctagcgatccgtaaggccacggtattgcgcgccggcactcgcagtttttgagccttgcacacctgagtgacttcgcggtgaaaggccgctaggctgcgcttctgcttggtcaggaaccgcttttgcagtagctcgtggatgacgcgctcgaccggttccggcaagcgccccttacctttacctccaccggactggccgggcaccagatccgtcacgaggccgctgccttgccgggcacgccggatcagaacgtatacctggcgccgagacaagcccagcgcctgagccgccatatcggccgcttcgtgcccgaccgtctccgactgcgccaacggactgatgatctccgcacgacggcgcgcacgctcccaagcctcatcaggcagagtggccacgccttgttctggaatccgtggggtgtccgtcgccatgctcacctcgctttggtgcacacgagtattgagcatagtcgagattggtgcagatcacttctgatattgaactgtcaggagctggctgcacaacagccattacgcccaatcaactggtgcagtcgtcttctgaaaatgacatccatgcccagcccgtgcgcgagctggatcaccgcccgcacgatagtttggtcacgggcatcatccgggagcctggcgacaaaggattggtcgattttcaatgtggtgatggggcagcatttcagatgttgcaggcaggaatagccggtgccgaagtcgtcggcggcgaagcgcacgccgatggcgcgcaaggcgtcgaaactggcgaacagggctggattgccgaatgcgaccgattcggtcagttcgatctccagaagctcggcgggcagggccatatcggccagcacccgctttacctcgtcgtcgaacgttggcccaacctggctggcggacacattgatggcaagacggaacggttgccatgccggtccttgccacttgtgcatctggcgacaggcctcgcccagcacccacgcgcctatttccggcatcaggccgaacgactcggccagcggcaggaactggccgggcggcaacaggccaagcctcggatgccgccagcgcatcaacgcttccgcgccagcgatccggtgatcgcgcagatcgaccagcggctggtaatgcaggtcaagctgtccgcgcgccgccgcctgcgccaactcggccgccgtccatccggcgggctgcgaactcgtcatgatccgccccggaaggcgcgcagcagccgcgttacggccagaacgaacaagccggtcagcgcgagcgcggcaacaccccaatgctcgccaaggaaggcaccggcggtcgtcccggccagcacggcggcgagaatcggcagatggcaggggcaggtcaacacggccagcgcaccccacaggtagccggaaacgggttggcgcgtctcgggcggcagtttgtcaggggcgttcacggcaatgcctcctcgtgcgcccgctcggctggcatggaggccagttgcgcgtccagatgggccaacgccgcgcgccgccgctcgaccaactggcgcagcacggcaagctgcgctgcggcttgtgcgccgtccgctgcgtcgagcgcacggcacagccgcgccagggcatccaggccgatacccgcctcgaaggccgcgcgcacgaagcacagccgttgcaaggccgcatcgtcgaacacgccgtagccgcccgtggtgcaggccaccggccgtaacaagccgcgcaccaggtagtcgcgcacgatatgtacgctcaccccagcgttatgggccagttgcgataccgtgtaggcgctcatcgcacacctccttgtcctcacccggcgcagcaggaaagctgcttcacatccttgttgaaggtctgcgccgcgagcttcaacccttcgaccatcgtcaggtaggggaacaactggtcggccagttcctgcaccgtcatccggttgcgaatcgccagtgcggccgtctggatcagttcgcccgcttccggggccactgcctgcacgccgatcagtcgtccgctgccttcttcaaccaccagtttgatgaagccgcgcgtgtcgaagttggcgagcgcgcgcggcacgttgtccagcgttagcgtgcgactatcagttttgatgccgtcatggtgcgcttccgcctcgctgtagcctacggtcgccacttgcgggtcggtgaacaccacggccggcatcgcggtcaggttcagggccgcgtcaccgccggtcatgttgatcgcggcgcgagtgccggccgctgccgccacatagacgaactgcggctggtcggtgcagtcgcctgcggcgtagatgtgttccacgcttgtacgcatgccggggtcgatgacgatagcgccttgcggggtgagcgtgacgcccgtcgcatccagtgccagcttgcgtgtgttgggcgcgcggccggtggcgaccagcagcttgtcggcgcgcagttcgccgtgcgccgtggtgagcacgaattcgccgtccccttcaccattgatatacgcgacctggctggcctgggtgtgttccctcacctcgatgccctccatgcggaatgcggccgtgacggcttcgcctatagctgggtcttcgcggaagaacagcgtgctgcgagccaggatcgtcaccttcgctccgagtcgggcgaacgcctgcgccagctccagcgccaccactgatgagccaatcacggccaggcgcttaggaatcgtctcgctgaccagcgcttcagtggaagtccagtacggagtgtctttcaggccgggaatcggcggcacggccgggctcgcgccggtggcgatcaggcagcggtcgaatgccaccacgcgctcgccgccgtcgttgagttgcacgatcaggttgcgattgtccttaaagcgggcggagccgtgcagcacagtgatcgccggattgccctccaagatgccttcgtacttggcgtggcgcagttcatcgacgcgggcctgctgctgggccagcagcgccgtgcgctggatggtcggcgtggtagcggcgatgccgccatcgaacgggctttcccggcgcagatgggcgatatgggcggcgcggatcatgatcttggacggcacacaaccgacattgacgcaggtgccgccgatggtgccgcgctcgatcagcgtgacacgtgcgccttgctcgacggccttcagcgccgctgccatcgcggccccgccgctgccgatgacggcgatatgcaatgcgccgctgctacccgtcttgtcgtttctgcccagcagatcgcgcatcttgtcgagcaatccgcccggcgtcgaaactgagggggcatcggccagcgtggcccgataaccgagtccagctacagcggccgtcagcgcgtcgggtgacgtgccgacctcaatggcgagcttggcgctgcccttggcgtaggagacatccgctgattgcacgccgggcactttctccagggcgtccttgacatgcactgcgcacgagtcgcaagtcatgccggtgattttgagagtgctcataccatcgttccttattcgtgtgggccgccgtgtcgcacggtcagccgtctttcacaagcgcttggcggggagttcgcagccgtccggtccgcaacggcgatgcgccggcgacacgaagtcccagatcgacaccccaatcatcaaggccaggccgacgtacatcaggttcgccgtccaccagttgccgagcagccagaccgtggccgcaaacacgatggccgggccgatcatgccgagcagactgcgcagccattgccgatgactgaaccaacccagcgcgttcgccaggaaggccagcgcggcaaacagcggcagcaggcggctgatgaacagtccctcgtactggctcaagaagcccagcccgatggccgcgccgaagctggcgagggctggaaagcaggcggcgcagcccatcgcggaaacgacgctgccgagcgcgccggttttatcggcaatgcgtgtcatcagtcccatgaagcggctctcgctgttgtcgttggcttgctggctcactgcttgacgctggacggatagccggcgtctgcggtggccttggtcagcttctgtacgctggccttggtgtcgtcaaaagtgacgacggcctcgcgcttctcgaagcccacatcgaccttgctcacgccttcgaccttggagagcgctttcttgactgtgatcgggcaggcggcgcaagtcatgccgggaaccgctagcgtgacggtctgggtagcggcccacaccgggcaacagcggcggcgagggcaagggaggcaaacagtttcttcatgatgaactcctggttaatagaaaaatggaacgacatagggaaatccaagcgcgaccaggaccagcacggccacgatccagaaaatcagcttgtaggtggcgcgcacctgcggaatcgcgcagacctcacctggcttgcatgcctgcacgggccggtaaatccgcttccaggcgaagaacagcgccactagcgccgcgccgatgaacaacggtcgatagggttccagcaccgtcaggttgccgatccaagcaccggagaagcccagggcgaccagtactagcggccccaggcagcaggtcgatgcaagaatggcggccagcccgccggcgaagagcgcaccgcgcccgttttgtggttcagacatacgttggcccttttgaatttggattggatagcgtaaccttacttccgtactcatgtacggagtcaagcgatatggaaaataatttggaaaacctgaccattggcgtttttgccaaggcggccggggtcaacgtggagacaatccgcttctatcagcgcaagggcctgttgcgggaaccggacaagccttacggcagcatccgccgctatggggaggcggacgtggttcgggtgaaattcgtgaaatcggcacagcggctggggttcagtctggacgagattgccgagctgttgcggctcgacgatggcacccactgcgaggaggccagcagcctggccgaacacaagctcaaggacgtgcgcgagaagatggccgacttggcgcgcatggaaaccgtgctgtctgaactcgtgtgcgcctgccatgcacgaaaggggaatgtttcctgcccgttgatcgcgtcactacagggcgaagcaggcctggcaaggtcagctatgccttagcgtgctttattttccgttttctgaggtgccccctaattgagcatttccaggcgcttgcgcctggtcaacgaaagagtcagcgccgtaggcgctgccatttttggggtgaggccgttcgcggccgaggggcgcagccctggggggatgggaggcccgcgttagcgggccgggagggttcgagaagggggggcaccccataagcgctaacttaagggttgaaccatctgaagaatgcgacgcctcggtgcctcgttaagacgatgcctcgcgttcttcaattgcgttttgtaggctgtcagggatactgtcccacgaatggccacctgtaagctccagatgaccatttttgttattctccacaacgagttagttcttcttttcggatccggcacttctgggggggaaatccagcgatggctggattatgtcgtcaattaaaaatgcggcgagtagattagcaaatatccacgctttcgcgagttcaggttcctttgcacgcaaagcatccaggtgcagcaaacttttgagccgcttaaaagccagttcaatttgccatcgcagacggtaacaatcagccacttgctctgctgaatattcatcttccggtaatgatgttagcaatagcacatggcccgctgcttccagcgtttccgcctgaactactcgtccttttcgacgattctcgctgagcagtcgggttttactgattaatgctttttcgggaggaagtgatacggcaatgagacgtgccggaaagggagctccggcttttttattacctgaattgcctatcattacagtggtttcaccgttcttaccgcaatccagcccgcgcagaaaacccatcatgtcaaagcgcattccttctgcagttaaccagcgcaatcctcgccagtgaacccggacgatataatcagcttctccaaaagcaagtgagcggatacattcgggacgcgaaccgaatccccggtcagcaatgcgtatctcgtctgccgtttgcgcaaatcggtccagccgttcagcgtctctgctgtcggttagctcaaaatcagtgaactgacaggtatgaggatcatatcccatatgtagtcgccattcagcgctgccgcccccgggcgcactgattgctgttccatcgacaagacgcaatctctttccgcttgtacaacccgtaactgcggcgcgtacagcaagtgtttgtgcggcaagtatgccaaaccagtcggcggcattccgcagccgcttcaggagagccacgtcagataatgttgcaacgtcatggagctgagcccatgcagtgacttcacgtaatgacatccccccggggccgtaagccagccccagacgtagcagagttgcagcatcacgaatttcgcggcggcgggttagagccccggcattacgtgccgaagtatccagttcttcgggcttaccaatatgggccagaattgctgaccagttatcgtgagagtaattcatcggcacgttaaatcatatcaggcgtaataccacaacccttaagttagcgcttatgggcgcatacccccggcgttgatggcgtgaacaaaacaatgctacaggccagactggctgttgagctgcaaatcctcagggatgaattactctcaggccactaccagcct

SEQ ID NO: 438 - DNA, 3728 bp, Escherichia coli
cgatctcctgaagccagggcagatccgtgcacagcaccttgccgtagaagaacagcaaggccgccaatgcctgacgatgcgtggagaccgaaaccttgcgctcgttcgccagccaggacagaaatgcctcgacttcgctgctgcccaaggttgccgggtgacgcacaccgtggaaacggatgaaggcacgaacccagtggacataagcctgttcggttcgtaagctgtaatgcaagtagcgtatgcgctcacgcaactggtccagaaccttgaccgaacgcagcggtggtaacggcgcagtggcggttttcatggcttgttatgactgttttttgtacagtctatgcctcgggcatccaagcagcaagcgcgttacgccgtgggtcgatgtttgatgttatggagcagcaacgatgttacgcagcagggcagtcgccctaaaacaaagttagccattacgggggttgaattgaaaatttcattgatttctgcaacgtcagaaaatggcgtaatcggtaatggccctgatatcccatggtcagcaaaaggtgagcagttactctttaaagcgctcacatataatcagtggctccttgttggaaggaaaacatttgactctatgggtgttcttccaaatcgaaaatatgcagtagtgtcgaggaaaggaatttcaagctcaaatgaaaatgtattagtctttccttcaatagaaatcgctttgcaagaactatcgaaaattacagatcatttatatgtctctggtggcggtcaaatctacaatagtcttattgaaaaagcagatataattcatttgtctactgttcacgttgaggttgaaggtgatatcaattttcctaaaattccagagaatttcaatttggtttttgagcagttttttttgtctaatataaattacacatatcagatttggaaaaaggctaacaagtcgttccagcaccagtcgctgcgctccttggacagtttttaagtcgcggttttatggttttgctgcgcaaaagtattccataaaaccacaacttaaaaactgccgctgaactcggcgttagatgcactaagcacataattgctcacagccaaactatcaggtcaagtctgcttttattatttttaagcgtgcataataagccctacacaaattgggagatatatcatgaaaggctggctttttcttgttatcgcaatagttggcgaagtaatcgcaacatccgcattaaaatctagcgagggctttactaagcttgccccttccgccgttgtcataatcggttatggcatcgcattttattttctttctctggttctgaaatccatccctgtcggtgttgcttatgcagtctggtcgggactcggcgtcgtcataattacagccattgcctggttgcttcatgggcaaaagcttgatgcgtggggctttgtaggtatggggctcataattgctgcctttttgctcgcccgatccccatcgtggaagtcgctgcggaggccgacgccatggtgacggtgttcggcattctgaatctcaccgaggactccttcttcgatgagagccggcggctagaccccgccggcgctgtcaccgcggcgatcgaaatgctgcgagtcggatcagacgtcgtggatgtcggaccggccgccagccatccggacgcgaggcctgtatcgccggccgatgagatcagacgtattgcgccgctcttagacgccctgtccgatcagatgcaccgtgtttcaatcgacagcttccaaccggaaacccagcgctatgcgctcaagcgcggcgtgggctacctgaacgatatccaaggatttcctgaccctgcgctctatcccgatattgctgaggcggactgcaggctggtggttatgcactcagcgcagcgggatggcatcgccacccgcaccggtcaccttcgacccgaagacgcgctcgacgagattgtgcggttcttcgaggcgcgggtttccgccttgcgacggagcggggtcgctgccgaccggctcatcctcgatccggggatgggatttttcttgagccccgcaccggaaacatcgctgcacgtgctgtcgaaccttcaaaagctgaagtcggcgttggggcttccgctattggtctcggtgtcgcggaaatccttcttgggcgccaccgttggccttcctgtaaaggatctgggtccagcgagccttgcggcggaacttcacgcgatcggcaatggcgctgactacgtccgcacccacgcgcctggagatctgcgggcactgttgcaaagttagcgatgaggcagccttttgtcttattcaaaggccttacatttcaaaaactctgcttaccaggcgcatttcgcccaggggatcaccataataaaatgctgaggcctggcctttgcgtagtgcacgcatcacctcaatacctttgatggtggcgtaagccgtcttcatggatttaaatcccagcgtggcgccgattatccgtttcagtttgccatgatcgcattcaatcacgttgttccggtacttaatctgtcggtgttcaacgtcagacgggcaccggccttcgcgtttgagcagagcaagcgcgcgaccataggcgggcgctttatccgtgttgatgaatcgcgggatctgccacttcttcacgttgttgaggattttacccagaaaccggtatgcagctttgctgttacgacgggaggagagataaaaatcgacagtgcggccccggctgtcgacggcccggtacagatacgcccagcggccattgaccttcacgtaggtttcatccatgtgccacgggcaaagatcggaagggttacgccagtaccagcgcagccgtttttccatttcaggcgcataacgctgaacccagcggtaaatcgtggagtgatcgacattcactccgcgttcagccagcatctcctgcagctcacggtaactgatgccgtatttgcagtaccagcgtacggcccacagaatgatgtcacgctgaaaatgccggcctttgaatgggttcatgtgcagctccatcagcaaaaggggatgataagtttatcaccaccgactatttgcaacagtgcccatcggcgtagtagtggatgtggtcgatgacaaagccggtgcgggtcagcgtgcgccggaggatcggcagaaaatcgaccaggaacgaagtagcgcgtgtgacgacggccggtacgccgacacgcgccacggcctcggcccagcgcgcggccggcggttggagcaggccgttgtgcaccgaaccgtggtaggtgccgaccgccaatgtgagccagcgctctagctcgcgcagcgtcagggcggccttgttttcggaatcgtagtcgccgcgctggtcagggttggagaaggtcgttcccggcagttcgtcgtgaatcatctgcatcgccgtgccgatgatccgttccacgatgccgccatagtgcggctgtcccagcgggcgatagtccagccggatgccatgctgctcgcaaccccggcgcagggcctcgctcttgaactcggccgcgttgtctaggtagagcagcaagggcttgccgctcatctgccaatccatttccacgttcagtccttccagccaagggcgcttgtcgcaggcgacatgcacgaggcacaggccaaccgaaacggcagacggcgcttccagcgtgacgaccatgccgagcacgcagcgggtgaacacgtcgatggcgagg

SEQ ID NO: 439 - DNA, 6877 bp, Escherichia coli
ggccttccaaccgagttgatgaactcctgccatggaacgtagtactcaccaataaataagcgtcaatacggtgctccgttgacgcttaccaaaaaaccgccattcataccctgaatcaatgaatgccatccagtttaatcgtcgtttccgttcatatggagcacaagggatattgaagaaacattcattttatggtgtttttttaatctttttaggtttttaattcctatcgctcgaggtcggtgaccgcctggacggtcacttctgagaaaaggcatttacacagaatcttaaacaggctcacggagttctttcagaaaaaggcctgccggatggcaggcctatcccattcgtcagaaaacataacggaagttggcgtttatcgcattatccacattatatttcccgaacgctgatttctccagctccagtcccaaacgcatattatccttaatttccgcattcatccctaccgtcatcagcatcctgctatctttttcaccttcgaaacgtttctctccggaagcatcctgcagaaccgtttctccgttcgccagcaggtcgaactgataacccagcccggctcgagctgtgattttccagtcgtctccggagaaggctcttcccacgtcaacaccagtacggccaatcagtgggttataatccttgtctttcatgctcagagccattccccggtcttcccagctaaaagcttttcctgatacagaaccgtaaaccagctctatctgtggctccacccaagactctttcgtcaggtggtaacgataaccaacttcagcaccggcataccaggaatgagagctgtagtcttttgttcccagtgaggcaaaattcgccgtgtgctgattatcatgatggagatatttaccaatcaggtcaaaataagctccggaattaaagagtgcagaggcatacagaccgccacccacggatttggtttttccactgaatgcgtggctgcttgcattgctgtccgtataggtcagcaatgcccccgtaaataaatccacaccgtccagctcatgctttctgtcgacaccaatctgaacgtgagtgtagttatcgctgtagtcaccatctgccgaaccggtaccattcattatgcgtgcccagacaccggcatccccctgagtatcccgcaggtcacccatacgtttgttcaggttattgacctctgtaaggaaggacttataacctgatgccataaagtcttttgcggctttcgaggctccggcatcagcggtagtctgatatcctgtcagcacccattttgtggcatcattcgttttttccgtgctgattactggcgtaacgttactgaaaccaatctgctgcgtaccggcagtgaacgttttctcatcactccctttcggtgcggtaattaacgtcacgctcatttcactggctggtttgtttaaaaagtcaaccaggacgctattattactgcctgacagtttgtctgtgacattcaactggtcagcccagctgttgttggtatgcatcaggaacgtggtattatctgcagaaagctcttttacttgtaaagtggcaaagtgtttcccgtcccccagttcaattcgcgagcccttagccttcagtgcaccggcctctgattttccgtcagagtaccacagagcattgatcatatttaccgtactctgtgcccccgtaatactgcctctcaaaacagcgttatatcccttcattaaggagctgaataacggagagtccgtcttccctgcatcagcatcactgtctcccagattaatggttgccgcagtggttcctgcatgaatatccgaactcagatagcccatatttttaacagaaaagctggccttatcttcgaggttaatcccttctgttgtagaaattacgggtgagtaatacccctgtttctgcgcagaaggcatccccgtcagggtcagagaagcattttcttttacatccacagccccggtgctgaaaataccgctctgagccgtaagttttgctccttttccgagggtcaggctgctgttgacaaagctgccaacacggtcaaaaacagcattctgagaggtcacactcacggtgctatcataagcctcaataccaccggtgaatctctccatgatttgcagggatgatttattttccagcgtaacatttccgctgtaatcactctggtcaccaactgtggttgcagtggcactcccttcaacagaggagaccgcattaccggttccgtcactcctgtcagtaaagacacggctacttcccagaatgactgtacttccattcgtggcgttaatatctccctgcatcttgccgtttctggacagatggaatgttgccgcatcgagtttcagtttttccagcgtaaactgacgggtttcccagtcgctctggctggaagaagtcgtcgttccagcatgaataactggatgaccctggaatatcagcgtgccggacttcttggttatcgaaccttctggcaggttaactgaaccatcaagagccagtacatccttacctgagagctgcggaatattcacatccatattgccgtttagttggccgtgatacatataaggctggctgctggcctcaatttttgttgcttcacagtatcaatggctttattacgatcttttccgacattctgccagacactgctgttgttcagatcggagaaaaacggggaatatgaactcgctttcaggatgaaatattgcttggtagaactgtcataatacaggtctcccggcgctcctctccccccaaaaatactgacagtattaaccggtacattgatgtcactggcttttaatgtctgaaggtcgagtgttaccgttgattttttctcactgttattggtaatgatggccccgtagtcagccgcctgaagacgggtaaaggtcaggttattaccattcagttccagacgtccaccacggtatccccacgaaatattatccggattaacttgctgtgagtcagaaagcacaactgtcggacgaccgctggcaataccaacagagctgaaagcctgtacctttccgtcagcatccgcctgctggttgagaataacagtaccgtcccctaccttgagtccgcctgcattcacaccggtcccgtttactgtcagggtaccttcgccagttttatgcaggttatcaccggcaactccgttcacctgccacagaacgtgggttcctttatcggtgataatcccgccccccatccatgtctggccgttcagggcggacaccctgtaatcgccggcaaactgcagatacccagctcccctgattaacggaattctgcagaacgacctcgccattattgccggtgaacaggaggttttttcctgcgttcaggtcatttcctttctttccatgcatatcccaggtcgtgtttccctgagtcagtgtgccggtgccattagctgcatcatatttccactgcagtactccctcaccagaggtgtaggctatggttttgtcaaaatcattttgcggttgctgaccaaggaaatcctgagtggtgacgacccagttatttccatagttagttcctgaggaaagtacgccaatcagtacccattttttttgcagggaatcataagcaaacaggggggagccgctgtcccccatattcagataattagccagaggtccattcgcgggattaaaaatgtcaccggtctgagctgtaatcatctgtccgttgttataggagttcagcgcgctgacggttcccccaacaagaaatccgccattggtatacacttgggtacgattaccatttttgtctttgacgtactgcatccccccccaaggcgatagaatgcagtaaagcgtccgccggcctgataggcaccgctcacagccccgacgtcagacacttctgccggcgccacctctgtcaccagtttactcaggcggcgggttttaatatcaagaccgctattattatttgtaccaaccgcagtataggtgtttttggcgtatccgaagctcatcgtgtcagagccgctgacatgtttggcggtaaccacatactgaggggagtaaagagtatggtttcccggaggcaggctaccggtagtaataatagtggcactactgaaatcagccatcggggctttatcaagtttaccgaccagatggccctgcttgccgtaaatgaaaatattcgtggtccccggcgtaaactgacctttattctcggcaaagtcgcggaatatctgataagggatctctgcactgaccgttgctgacagagctggccatgccgaagaaagtgataaagctgcaacagacataagaataacccgacgtgaaagtctgcgatggcttttgcaggtaaccccgcgagccagttcggagacagcaatcaggcttttggttatatggcaatacttaagacaatatattttgttcatatagaaacatcaacctaattttgacaaagattaattacataggatgtggatggagcagtccgagattctactaatatcaattactaagcatctgttttttagttggtgtaatataatttttattaaggtaagcggaaaaacaaccaaaaaaaacgcaagatgttatttttttatcattttgagctagtttggctggggggatgctcttctcttaagcttcttgctcaactttaaaaatagttatgccagttcggtatcgataaggggcagtttggatatcgaaaattattgtacgttaaggctgctttttaacccgtagttggttctctataaagtgcctgaatacggtaaatctgcgaagtactgtagcccgttgcatctgctgtttctctaatgctgagtttttacttgtctgtagtacaaactttctgatgtagttccagctcggcatgttttccccggtatttacccaacgtatgagctcgttcaattccctgtttttggcgttggcgacgattcagtcagtccttatgcgacatcgcggacatcaggtctataagcatattatttattgcagttatcactgtgcgggtaatcggatctgattgtgaaggatctctatctgacagggcttgccatgatgttggaacatccagactgacaattcgcaattcatgttgttcaatttgctttttcagcgttatccggtcgttgttgctaaaacgagtcaggcggtctatctgctcaaccagtaaaatatcattacggtgactgtccatcggtaatcgctccagttccagacggtcaagtcttgtaccgcttatgttctcccgatcataattggcaattttatgcctccgttcctggacgaactgttccagtatctcttttgcccgatctgcaaactgatcttatgttaacgcccttaaataagctctgatgaatatattctatcgcatataggttatgttattaattgtatgaggtcacattttatatctcgcatcagggtgtacccttatgcaataactttttaatcaaaaataacgtactgaataattaacaaggagaactatatggcaaggaggcagattctttctctatcggaaagagaatcattactggcattgccagacgatgagttaacactgacttgaatgacgtatttcagtgcgcaggatctggcaattatcaatgctcaccgtaaacctgctgccggtttggttttgccgttcttctctgttatctgaaaagtattggggtgccccggataaaaaatcatccccacccgcaaaattgctaaaaaccattggcgctcgacttaagttatcagcaaaactttggcaggaatacgtttccgatcggatcatactcctcttgtcagaaaaaacgctgatgagttgatcgcgctgttactgcttttcactcggcaggttggtcagtcccgagctgacctgatttgatggtccttcccctcggaattgttgtctttttgttaacgataaccgaggggggatgatattaagcgaaaaaacttttattaattttatgccttcataaaggagttactgttatgcgattagcttcccgttttggtcgatataattctattcgccgtgagcgcccgttaacggatgacgaattaatgcagtttgttccatctgtcttttctggtgataaacatgaatcccggagtgagcgttatacatatatcccaaccatcaatatcatcaataagttacgtgatgaaggtttccagccgttctttgcctgtcagagtcgggttcatgatttgggacgccgcgaatacagtaaacatatgttacgtcttcgcagggaagggtatattaacgggaaagaagttcctgaaattatcctgcttaattcacatgatggttcatccagttatcagatgatcccaggaatttttcgttttgtctgcacaaatggcctggtgtgtgggaataattttggcgaaatccgcgttccacataaaggagatattgtcgggcaggttattgagggagcgtatgaagtgctcggtgtctttgataaagtcactgaaaatatggagacaatgaaagagatacatcttaacagtgacgaacaacatttatttggcagagctgcattgatggccaggtacgaagatgaaaataaaacgccagtgacgccagaacaaataattactccccgccgttgggaggataaacagaacgatttctggacaacctggcagcgggttcaggagaatatgataaaaggtggattatcggggcgaagtgcctccggtaaaaataccagaacaagagccattacaggcattgacggtgatatccgaatcaacaaagcattatggatgattgccgaatagttcagggagtggaagtcatgataatataagtaaagccccgaaaaatttttcgg

SEQ ID NO: 440 - DNA, 6188 bp, Escherichia coli
  modified_base (4)..(4): a, c, t, g, unknown or other
ttgnaaagccgagcacaccattgataacagcggctttaccacgcagcttgagcttgaggcaaaaatcccggaatggatagcagaaacagcgtgaatgtcttaaatgtattagttcagatatgtactagcaataaacatagttagaaaggccgctaacgcggccatattaattaaaactccagttactaatattgagaaagataatcagcgactccatctgcagggtttcgcccaccagtataaattgtgcctaattcttgaggtgtaacatatgttgtaggccaaatggccatatttttaaaatagttatctatttttattctttgaagttctttaaagagataatcttctaagtcatttctttttagacagttaacataataagcagccgcacttgctactatatctacaatttgtaattgaggatactcttgtgatgaatggaatgtcaaagaacgagctttaattggcaattcaaattttcttcgatcataaccatatgcctccgtaatttttgatatatccataaatttatcaaaaatatctttcttctctgtaatagctttggaatcgtcatgcttaatataaaaaccattagggtataatttaccccattctacacagtgtctaaagaggcttggtatagatggatctaatgtgcttttctcaacaccttccaatatatcatcaatatcgcttctggtaatactaattctgtttattatatctgtgaatatcttatcacttgagcatatctttaactcatcaattaccctgtaaaattcatcaattgactcagtcgattggcttctgatcatattcataaaacactgatacattacctctgttttttcctccccacagaaagcagggaaacagaaatagtaaacattagacagagctagattctgtccatttatataaagatctattcctctattagagcaccacgtctcgatcaaaatatcaacaatctttgctgttagcatgtattttttatcgaccaagtatattttaacattctcttcattgacatatttgctttcaagaagcctaatgatgccatcctgaccagattttctacgtctaagagttttaaagtgggcttctgttggagacttgcttccggttagttctaatgccttaagcgcatcctgtttactaatactacttgaacttaaggtaaaaacaggttgcaatggatcgagtaaatttccgccagtattacctgattcatcaaaaaatatatcaggctttatatacaacattttatttatctttgccgctaagtttctttttttctcattttctcgcttaattttattatctcgcctacgttgactattctttcccataaatacctcacaatctgaattagatatcccaatttaacgcattaataacataatgttatgatatcacacaatcaaaataacgtgctgattttaatgtatcaggtttgactagctattctttgataagcgaataataagaatgtcagcccctcaactcaaagcggtttagtcagttggaatcggagctagggaaggtgcgaacaagttcctgatatgagatcatcatattcatccggagcgcatcccagagggacatcatgagccatcaactcaccttcgccgatagtgaattcagcactaagcgccgtcagacccgaaaagagattttcctctcccgcatggagcagattctgccatggcagaatatgaccgctgtcatcgagccgttttatcccaaggcgggcaatggccgacggccctatccgctggagaccatgctgcgtattcactgcatgcagcattggtacaacctgagcgacggtgccatggaagatgccctgtacgaaatcgcctccatgcgcctgtttgcccgattatccctggatagcgccctgccggatcgcaccaccatcatgaatttccgccacctgctcgagcagcatcaactggcccgtcaattgttcaagaccatcaatcgctggctggccgaagcaggcgtcatgatgacccaaggcactttggtggatgccaccatcattgaggcacccagctctaccaagaacaaagagcagcaacgcgatccggagatgcatcagaccaagaaaggcaatcagtggcactttggcatgaaggcccacattggtgtcgatgccaagagtggcctgacccacagcctagtcaccaccgcggccaacgagcatgacctcaatcagctgggtaatctgcttcatggagaggagcaatttgtctcagccgatgccggctaccaaggagcgccacagcgcgaggagctggccgaggtggatgtggactggctgatcgccgagcgtcccggcaaggtaaaaaccttgaagcagaatccgcgcaagaacaaaacggccatcaacatcgaatacatgaaagccagcatccgtgccaaggtagagcacccgtttcgcatcatcaagcggcagttcggcttcgtgaaagccagatacaaggggctgctgaaaaacgataaccaactggcgatgttattcaccctggccaacctgtttcgggtggaccaaatgatacgtcagtgggagagatctcactaaaaaccggaaataacgccagaaatggtggaaaaaatagcctaaataggctgattcgatgtgtttgcgggaaaaaaatcggcccagatccgcgaaattttaatcagcgagtcaacttgggaagaaatgacctgcttattcgcaccttccctagttctactaatgtaatagatctacgaggaaaagatatgggaacatatattgatgctaatggagcatgctgggctccgggtactccatccatcatcatgtatccggggggaagtggaccttcttatagtatgagtagttccacatccagtgcaaacagcggcagttaaataaataccctccggcatggccggagggtatttatgatgtgcctgtaagactctacttctgtcgtctctttacaaaggcatatgatctgtcattttgtaccagacatcttaacgagagccttttcatatattacttacatacgtgaaatctacagtataaagcaaaaattttattaaacctgttttatatttatcatcaatacaacagatttaattccggaaagtcactcatcatcccttgaatgaacgtcatttgatgtattattcttacacttggattaatttaagatgatacctatgaaaaactatcttttccagacacccgaagatatttgtgtacagttaaaaaaaatgacacatcctgtcacaataagaacaacagatattgctaatttctggcactatcttgagtcagcaacacttccagtgatcacaaaaagcaccactacagaaaatcgggaggttacatttctgtggcgctcagagaaagcactgcaaggcgtatatcttcgcctgaatcgtgttacagataaaaaagacgtcaaaaaaggactaatgactcatatcccttcgacagatatctggatgctgacactggtgttaccagcttcatatcggggctcatactcatttatagaaattcccacagatatgacacaaaaagacatatttcaactaggaagtcgcttctctccattacccggtaaatctgatccatttaacaaaacagcagaaataaatatacgaggattcggagaatcagtcctttctcttgatatggctcctgaacaaaaggaatgggatgatacttcccataaatgtacaggtattctttcaacattacattcctttgttgcaggatatcaacgccggattcgtttatattttcccctgaatccaacatcagtacctcttggattacttgtgttacctgatgctgaaacatggtttgaccggatagatattacccgggcattagatatggccatcaccactggtcgtatcacgccaatggcaattatgggatagacaatattaatgaatctgatcgtatgaatatactgggaggcaataaagaactcatctttgatatagcggaaaatctgatacccagttatacagagactatccggatatcgtatgggctggtcgctctaatactgtactggccgggcagagcctcggtggagtgacagcactgatggcagctatatatgcgtcgacaacatttggtacaatcattagtcactcaccttcaatgtggtggaaccctgaccagggcagcccgatcttgtttactgagaataatacctcctgggtaaatgagcagatactttcagcgcctccgaaagatgtaaatattcgacttggagtcggttctttagaaggtacaaccgtctcacatgttcagcgattgcatcattcgttaatcgcagctggtttggaaagtaacctcactgtctataccggtggtcacgattatgcctggtggcgcggagcaattattgatgaattagcaaattataattgcaggaaggtatcaaataataactctgtgtaaaatatcgttttatcgtccgataactctttctgcaatattattatgggagactatctcatttatttagtgatgtccttcatttatgtgatgaaggacattatattactcataacatttctcgttgaaaatttcagcaatacgctacaattgtttcccgttgttttttaattttctcatcaaaacctctgcaatctctgcaggactgggttgttcagccatttcagcggctacctgatctgaacagaagcgtagtgaatcatcataaagcaggcgatttaccaaatcactggtcagtccatgcttgtccggaataatcccacacccacgcttcgcaacaatttctgcattaacagagcgatctgcaccttcgccaaacacaatctgtggtattccactatacagcgctgtcagggtattacctgcgccaccgtgatgaataaatccatcagctccattaaggaatacacccataggtatccagtcaaccagacgtacatttgatggtagttttcgtaaaccagtacgagcatttattgcaagttgcaaaatgatatcagcatcaacttcatttgcagaatccataacccatgaaatcagctccagaccatcaaccattggttttacagtgccaaggctgataagtaaacgtttccgatcagaatccctgtcccaccatgtttcctttacagcacctccgttataaggaatatatctcattgagataaccggttctccagcatttttaagaatgctcatacttggggagcaacatcaatccatgctaaatcacatagtggaccgctgactccatgccgcctgtaagcattgcttaaagaacggtttaacatctgaatatgggcagatgtatgcgcgaatccaacagccagcatcactgaaggaattctatatttagcagcaaccaatgggcctgccggaccaagagggggatagactattaaatctggcctccattttcctgcaaaatcgatgaggttatctgccatttcatcgctaaaaaaagagaaatgaccaataatattactttttttcctcaactcttcctgatggcgatatccagcctctgaatctaaacctggaactgcatcaaaaacaaccagtccagcttctgctgctttattcgcgaatttgccagcgctactaattactacatcatgtccaattacacgaaaggcctgagccagagaaatcaatgggtataacaaaccgtacagcggtgggccaataaaaagaatacgttttcgcattaaaaaagtccgtcttctgcttacctgtttatttttctatctctaagaaaacataattaatattatttttatgtgagcttatgcacaaaaataaccaagtatattatcttctggtagagattcaggatacagtttgtaggagctttctttttgaacaatgatttgcaggacagttatgctaaactagcggaatcagtatcacaacaataaatgactgatcatacctgaaatttgaattaacaggcatcatgaatgtcaatagtctaagcggtgactacttatatcgcttgcataaatactaaacactgactagaaaagtattggataaccccgtcactaaaagtaacgcttcggttatttgctcggaatgtattaacgccaagattgttagccggtacgccttatatcactggcgctgacaaatgtttcttttctaatttactgaaccggcg

SEQ ID NO: 441 - DNA, 3616 bp, Escherichia coli
tcaaacatgaagaaatgaaatgactgagtcagccgagaagaatttccccgcttattcgcaccttccctagggaagttaataccgccatgaaaagataaataatacccgtggaatatatttcctcatgttactctccatatcaaataaatggcacctgtatttcaggcatcctgaatattacagcacacattgaacaacaccttattttgtgaaattaatcacaaaatataaaatcacgacttaatacggaaaaaactctgtgctactcagaactgtccggtcatactgcccgaccggatattaaaaaaagcaaatctcatgcattattcagccttctgaatccctggagtaatgaaggctgcttttttcgttacacccttccccggctgcgccggtggcagtgttcagccctttttcgggcaaactgctgccagtctgtccggggcgcaacaccggcagcccgtcgccatgcttctgcagcttccatccagcgtccactgacctccagaataacggcccggcttccggcacgctgccagcgccagacctgaccgttccgtgaactgtttctgaatccatgtaagcgtcaacggagtaaccggctcatttaaaccgtctggtctgtttcctccggctctacaaaaataatgtccatcatttttaatggacactatcgtatgaaacaccggacctggatcactgaagctttacgtcttcactttgaagaacatttaccccgggttgtggccgggcgtcgcctgggtgtaccaaaatcaacagtttgtagtatgttcgtgcgctttcggagagctggcctttcgtggcctttgcccgcaggcatgtcggagcaggaacttgatgcctgcctttacggacaattttccacggtaccagtcgtacgtcctgaaagcaccgttatatccgaagcccccgtggtaaaaaaacgtccccggcggcccaacttcccttatgagtttaaaatcgccttagtggagcagtcactgcagcccggagcctgtgtggcgcagatcgcccgggaaaacggaatcaacgataacctgctcttcaactggcgccatcaataccggaaaggtggcctgctgccttccggaaaaaatatgccggcactgcttcccgtgacgttaacgccggagccggataataaaatcccggcccccgcacaggaaccagagcagataaatacaccgtccgacagtctgtgttgtgagctggttctgccggccggaactctcaggcttaaaggtaaactgacgccggcgttattacagacacttatccgcgaaataaaagggagcagccactgatgatatctctccctgcaggttcgcgtatctggctggttgcaggtatcaccgatatgcgaaatggctttaacggcctggcatcaaaagttcagaacgtcctgaaggatgacccgttctccggacacctgttcatcttccgcggacgccggggtgaccagataaaagtgttgtgggctgacagtgacggactgtgcctcttcaccaaacgcctggagcggggccgcttcgtctggccagtcacccgtgacggcaaggtgcaccttactccggctcagttatccatgcttcttgaaggtatcaactggaagcacccgaaacgaacggaacgcgctggaatccgcatataacccgttgtaaagtgaggatatggacacctcacttgctcatgagaacgcccgcctgcgggcactgttgcagacgcaacaggacaccatccgccagatggctgaatacaaccgcctgctctcacagcgggtggcggcttatgcttccgaaatcaaccggctgaaggcgctggttgcgaaactgcaacgtatgcagttcggtaaaagctcagaaaaacttcgtgcaaaaaccgaacggcagatacaggaagcacaggagcgaatcagcgcacttcaggaagaaatggcggaaacgctgggtgagcaatatgacccggtactgccatccgccctgcgccagtcttcagcccgtaaaccgttaccggcctcacttccccgtgaaacccgggttatccggccggaagaggaatgctgtcctgcctgtggtggtgaactcagttctctgggatgtgatgtgtcagagcaactggagcttatcagcagcgcctttaaggttatcgaaacacaacgtccgaaacaggcctgttgccggtgcgaccatatcgtgcaggcaccagtaccttcaaaacccattgcacgcagttatgccggagcggggcttctggcccatgttgtcaccgggaaatatgcagaccatctgccgttataccgccagtcagaaatataccgtcgtcagggagtggagctgagccgtgccacactggggcgctggacaggtgctgttgctgaactgctggagccgctgtatgacgtcctgcgccagtatgtgctgatgcccggtaaagtccatgctgatgatatccccgtcccggtccaggagccgggcagcggtaaaacccggacagcccggctgtgggtctacgtccgtgatgaccgtaacgccggttcacagatgcccccggcggtctggttcgcgtacagtccggaccggaaaggtatccatccacaaaatcacctagccggttacagcggtgtgcttcaggcagatgcttacggtggttaccgggcgttatacgaatccggcagaataacggaagccgcgtgtatggcccatgcccggagaaaaatccacgatgtgcatgcaagagcgccaaccgacatcaccacggaagccctgcagcgtatcggtgaactgtataccatcgaggcagaagtccggggatgttcagcagaacagcgtctggcggcaagaaaagcaagagccgcgccactgatgcagtcactgtatgaccggatacagcaacagatgaaaacactgtcgcgtcactcggatacggcaaaagcgttcgcatacctactgaaacagtggaaggccctgaacgtgtactgcagtaatggctgggtggaaatcgacaacaacatcgcagagaacgtcttacggggagtggccgtaggccggaaaaactggatgttcgcgggttccgacagcggtggtgaacatgcggcggtgttgtactcgctgatcggcacatgccgtctgaacaatgtggagccagaaaagtggctgcgttacgtcattgaacatatccaggactggccggcaaaccgggtacgcgatctgttgccctggaaagttgatctgagctctcagtaaatatcaatacggttctgacgagtcgcttactcaacggagcaccgtattgacgcttatttattagtgagtactacgttccatggcaggagttcgtcaactcggttggaaggccattccggcagtacgctcaggatatggcgcagatacgcttccggatcgataccattcaaacggcaggtgccgatcagcccgtacaacagtgcaccacgctcgccgccgtgatcgctaccaaagaacataaagatggtatgacctttatatactcacgtaagcgtaaagccaatgccgtctgtaacacctgctccttgcagactaaattagagctccttctaaattagacggagttctattga

SEQ ID NO: 442 - DNA, 2385 bp, Escherichia coli
  modified_base (36)..(36): a, c, t, g, unknown or other
  modified_base (42)..(42): a, c, t, g, unknown or other
ctgattttctcattcgcaccgctgtgtttttccagnaaaaangtcctgagctcagcttcaagggcaagcagagcctctcttgcctgctcctcttccctctccccggcagagcgcgttttcggtgatgtatgctttttacctgtcagctcttcagccagacggctgacggcttcctgctgcccaggacctttgctgacgcctgttgcacgcgagcggttgatgtaccccatttccccctggcgtatacgcgcatcccgttccgcaatggattttctcagcgccagttcatcgcgttttgttttctcaataaatacgcggttctcttctgccagttcaccaaacaacgcaccaacgccgggcacattctttgtcgtttcccaggctgactgaataaattcagccagcgccagatccccctgcacaagcagcagcttcacctgttcaacggttccggccaccacgtcagtgatcagactgagtgcccccagtgtatgatcacctatccatgcccatgcgtcagaagtccaagttttaacatcgtcccagattttttccaccggcgtggccgctttatcaagttgctccagacgtgcattcatgacatccgcaaacagggacatcgcctccgtcaccgcagcctgtttacctttcgtgcgctcaagctcatcaatatggcgtaactgggaaacgctcaggaagttatactgctgattcagggaggccagcgccttcaccggatctgctgcaatcccttcaaaggctttttccaccttcccggcatcgtcccccaccgtctgcagccatctctgagaggtttcccccatgatccgtagctgcccggcggtatatttcccgctttctgcctgacgggccagattttctgccgcctgtctgataccaccaccggcttcatcgctgatcaccccggccattttccacaattctgccgttgtggtggcagccgcccctccggtcaggatcagtgaacgcaataaggcccggtcagcctgctctgcctgccaggcggcggcagcaagcgcggccagtacggcaaccccgccacctgccgccacacgggccaccgacataaatcgtcccagctcaccggcattccgggcattttcagccagtgcatttgccgtatctgacagcgactcctctgatgattcagaggcatccctgatcccgagaagttcctccttcagcagggtaagcaggctgagcggtccaccgaatgaatcgctgatctgcccccctgctgcagcatgataaggaagggattctgaccaccggcaagctgagtgacaatatccgtgaactgtgcgggcagtgtgcgcatggcagccttatactgtccgactgatatcccggctttttgtgcagccagcgcctgtcggctcagcccctgttcaacagtactggcggtttttctggcatccgcctccagactggaaaaatgacggcgtacccgggccatctgttcatcaaaccgggccgcatccagactcaaatcaataaccagatcacccgctggctgggacatatctcacacctccggaaatccccgctgaagccatcattaatgcaacatcatcctcgctgacatccaccacatccgcagaaggtgaaatatcgcgccctccgtcccctctgaaccggacgcctccggcaactcctgtcgcttctgcatcagcatttcttcctcgtccggcatctccgtctgctcttcctcacacgctggagcaagcagactgaaatccgccggatgcatatccggatcgccaaaaacaggctgagtacggcgtacatcagcccggaaaaatgagcgtccagttgggtatcctgaaaataatgcgtgcagtaaaaacgtcgccagtcggcatattcggtggatgtcatcccggcaagcatggcgcgccagtcgggtctccccatctctcgcgccagtttcaggacaaagttcagctcgccttcgaatgcttttttgatgttaccggctcagtcgcttctgctttcccggtttgttcaggatcggcatcgtgccggttatccagcatacctgaaagataaagcacccggttcgttgcctgattcagtgcatcagcaggccatcccagcatcacttcacggcggatctgctgcatctctgtctccggagaggccagagtgcctttgagggaatgggtatgccatagcgacatcgccacaagcagggatgccgtttccagatatcgctggttaatgtgcacgacatcatgcttcgttgtctcctgttgttctgcgtctgaaacaaactttatataatcaaaccgctgcagcgcagacaattcggaaagcgtgacggacataccgttatattcaaattgttctgttttcagaaacatg

SEQ ID NO: 443 - DNA, 8047 bp, Escherichia coli
ttttcggggctttacttatattatcatcctgcggcattgctgtgtcgtctgatatgcctcaatttcatcaactggcttttcggtagtctgtaaatattatgcccgcgaaaaatggtctggcaggaggctgcgcagttaccggatatatataagatggggtcccgctttgcggggcttcggccagtcagcattatcactcatatgatatttttgtgtgtggccttccatgccgctgtcgcggcataaccggtatttgacaatgtatacaatattaattgttctgcacactgttaatttgggaaagtgatttcttcgtggtcggaacccggatgcctttactgctctttatccaggtataaatccggtaaacctctgatgcgtaggcaagacgtctctggttctggcgttcggtcttcctgaatccggcattgtatgcaccaacggcctcccaggagacgccccattttttaaaggctattgccagataataagcaccggtataaatgttcatgcagggatctgttgtcagatgttccggcttaattccatagcgggccagttcgttaaaatgctgggaatctacctgcataagtccgctgccatatcccgttaccggattaataccgatggcattaacccggtaacgggattctttccatgatatcgctctcagtaaatccgggtctattttgtaatcccgacctgcaagatcaaagcaatcggcggcttcgcagatcccatttataaacatcaggcagattgctaacatccattttttcatttttccacctctggtgactttatccgtaaataatttaacccactccacaaaaaggctcaacaggttggtggttctcaccaccaaaagcaccacaccccacgcaaaaacaagtttttgctgatttgctatttgaatcattaacttatgttttaaataatgtattttaatttattttacattataaaaaggattcattggtgaatcgcatatgattcaccaatgaatttaacgcaactcatagatgaatcagtaataataaaacaacgagttaaagcgaattgactctagattcaattcgtgatgtgatttgctgcatgaatcgtaattttcgtaacttgcgtcacgattcgattcatcgatgaattgtcatttttttatatgtgaaataaatttgatgcgataagaaaataaagaggtatacatatggcgaaagtgcaggcttatgtcagtgacgaaattgtctataaaataaataaaatagtggaaagaagacgtgcagaaggagctaaaagtacagatgtaagtttctcaagcatatccactatgcttctcgaattagggcttcgtgtatatgaggctcagatggagcgtaaagagtcagcgttcaatcaggctgagtttaataaggtgcttcttgaatgtgcggtaaaaacacagtcaacagttgctaagattttaggtattgagtcactaagccctcatgtttccgggaatccaaagtttgaatacgcgaatatggtcgaagatatcagggataaggtgtcatctgagatggagaggttctttccagaaaatgatgaggaataaaaaggaattaaaagttgatttgcttcaaataacaggattttgatctggttcaatttgatgacaattaaccgcataaaggttatattaattatgtggttaataccacgttaaaacttgatattaaaaatcgccgatgcagggagctcttacctccctgcatcgactgtccatagaatccttaacggaggttcctatgtgtgcactggatcctagagaaaggccacttaacagtcaatctgtaaataaatacattcttaacgttcaaaatatctacaggaattctcctgttcctgtttgtgtccgtaacaaaaacaggaaaatcctttatgccaatggggcctttattgaactcttttccaaagaagataaacccttctctggtgaaagttatgtacgtctgcaggttgaaatttttctttcatcacttgagcttgaatgccagtctcttgggcatggttccgcattttgtcgtcgttttaattttcatggagaaatctatcaaataaggatggaaaatgtttcattttataatgaaaaatctgttgttctatggcaaattaatatattccctgactatccattctttcgtgtggaaaaagaaaattattatcatcgtgatagctatgtacagtctgttatatcggtaatgactccaacttattgatagtgttttatgttcagataatgcccgatgactttgtcatgcagctccaccgattttgagaacgacagcgacttccgtcccagccgtgccaggtgctgcctcagattcaggttatgccgctcaattcgctgcgtatatcgcttgctgattacgtgcagctttcccttcaggcgggattcatacagcggccagccatccgtcatccatatcaccacgtcaaagggtgacagcaggctcataagacgccccagcgtcgccatagtgcgttcaccgaatacgtgcgcaacaaccgtcttccggagcctgtcatacgcgtaaaacagccagcgctggcgcgatttagccccgacatagccccactgttcgtccatttccgcgcagacgatgacgtcactgcccggctgtatgcgcgaggttaccgactgcggcctgagttttttaaatggcggaaaatcgtgttgaggccaacgcccataatgcgggcagttgcccggcatccaacgccattcatggccatatcaatgattttctggtgcgtaccgggttgagaagcggtgtaagtgaactgcagttgccatgttttacggcagtgagagcagagatagcgctgatgtccggcggtgcttttgccgttacgcaccaccccgtcagtagctgaacaggagggacagctgatagaaaacagaagccactggagcacctcaaaaaacaccatcatacactaaatcagtaagttggcagcatcacccagcgcgctctgatcaccagggtaccggaaagccggttgaataactttttacagagataatccttcatcaacgcttcctgaatgataccttcgccataataggggtcgtctcagaaaacggaaaataaagcacgctaagccggttgcagaggccgtagcggcctgaacttccccgcgccgatcttggcgctgctgcgccataggtaatcaccggtcaggttgatgtgctcccagccgagtggcgacaggtactgcaatagcgagtcatcgacggcatgaccattgccgcgcaacgcatgcgccgcacgctccaggtagaccgtgttccacagcacgatggccgccgtcaccaggttgaggccgctggcccggtagcgctgctgctcgaaactgcggtcacggatttcaccaaggcggttgaagaacacggcacgggccagcgcattgcgcgcctcgcccttgttcagcccggcatgcacgcggcggcgtagctcgacgctttgcagccagtcgaggatgaacagcgtgcgctcgatgcggcccaactcgcgcagcgcgacggccaagccgttctggcgcgggtagctgccgagtttcctgagcatcagcgaggccgtcaccgtgccctgcttgatcgaggtggccagccgcaggatttcgtcccaatgggcgcggacgtgcttgatgttgagcgtgccgccgatcatcggcttgagcgcgtcataggcggcatcgcccttcgggatgtagagcttggtgtcgcccaggtcgcggatgcgcggcgcgaagcggaagcccaagaggtgcatcagggcgaagacgtgatcggtgaagcccgccgtgtcggtgtagtgctcctcgatccgcaggtcggattcgtggtacagcaggccgtcgagcacgtaggttgagtcgcgcaggccgacattgaccaccttggtgtggaatggcgcgtattggtcggagatgtgggtgtagaaagtccgtcctgggctgctgccatattttgggttgatgtgccccgtgctctttgccttgctagcggttcggaaattctgtccgtccgatgatgatgtggtgccatcgccccagtgcccggcaaagggatgccgaaactgagcgttgaccagttcagccaacgctgtcgagtacgtttcgtcgcgggtatgccaggcttgcagccaagcgagcttcgcgtaggtcgtgccggggcaggactcggccatcttggtcaggcccaggttgatcgcgtcggccaggatcgtggtcaacaacaggttcttgtccttggccagatcgcccgatttcaagtgcgtgaagtgccgggtgaagcccgtccactcatcgacttcgagcagcagttcggtgatcttgacgtgcggcaggaccatggctgtctggtctatcagcgcctgcgcggtgtcgggcaccgccgcatccagcggcgtgatcttcaagcccgactcggtgatgatggcatccggcaggtcgttggctgccgccatgcggttgacggtggcaagttgtgcttccagcagcgtcagccgctcatgcagatattgttcgcagtcggtggccacggccagcggcaattcgctggactgcttgaggctggtgaacttctcgggcggtaccaggtagtcctcgaagtccttgaactggcgtgaaccctgcacccagatgtcgcccgagcgcagggagttcttcaactcggacagcgcgcacagttcgtagtagcgccggtcgatgccggcgtcggtcatcaccagtttctgccagcgcggcttgatgaagccggtcggtgcatcggctggcagcttgcgggcgttgtcggtgttcatgccgcgcagcacctcaatggcatcaagcacgtttttggcggcgggcgcggcccgcagcttgagcacggcaaggaattccggtgcatagcggcgcagggtggcgtagctctcgccgatgcgatgcaggaaatcgaagtcatcgggttgcgcgagcttctgcgcctcggtgacgctctcggcaaaggaatcccaggacatgacggcctcgatggcggcaaacgcatcgcggcctgattgcttggcgtcgatcagcgcctgaccgatgcgcccgtacagacgtaccttggcgttgatggccttgcctgacgcctggaactgctgctgatgcttattcttggcagcgttaaacagcttacccaggatgcggtcgtgcaggtcgatgatttcgtcggtgacggtggccatgccctcggtggccagcgccacgagagtggcgtagcgccgttgcggctcgaatttggccaggtcggcgggtgtcatctggccgccctcgcgggcaatcttgagcaggcggttctggtgaaccagccgctcgatgccggtaggcagatcgagtgcctgccatgccttgaggcgttcgatgtgttccagcatatgccgcgaatttggcttggccggagactggcgcaaccaagccaaccaggtcgtcttgccgttgtcccggcgcttgagcagatcgtcgaggcggcggcgatgcgcgtccgccagtggttcggccaaggcgtcgtagatgcgccggttagcacgggtgatcgcctcggcactcgcccgctcgacggcgttgagggcgggcagaatgaccgactgccgccgcaggtgcccgatcaaggcgctggccagcacgatgcctttgtcggtttgcatcgccagctcggtcagcatctggacggcctgccggtaatggctcatggtgaagggccggaaaccgaacacggtttgcagctcgctcaggtgctcgcgccgggtctgctcccgctggccgtactcgttccagctttcgacgccgaccttgagctggtcggcgaccagcttcaacaagggcgggaacggtagttcatcgacgcccaggatgacgccgggaaagcgcaggtaacagagctgcaccgcgaagcccagccgattggctggcccgcgccgctgtcggatgatcgagaggtcggtatcgttgaatgtgtaatgtcggatcaggtcgtccttggagtccggcaacgccagcaggctttcccgctcggcggcggacaggatggaacgacgtggcatatttactgatccgttctcaagtattgatacagggtttcgcgactgattccgaattcacgagcaagcttggtcttttgctcgccagcctcgacacgttggcgcagttcggcaatacgctcagacgacagggatttcttcctgccacggtaagccccgcgttgcttggcgagcgcaataccctcgcgctgacgctcgcggatcagggcgcgctcgaactcggcgaacgcgcccatcaccgagagcatcaggttcgccatcggagagtcttcgccagtaaaactgaggtgttccttgacgaattcgatatgcacgccgcgttgtgtcagcgtttgcacgatccggcgcaaatcatcgagattgcgcgccaggcgatccatgctatgcaccaccacggtgtcgccggtgcgggcgaagcttatcagcgcttccagttgcggacgcttgacatccttgccggatgccttgtcgctaaaagcgcgatcaaccttgacgccttccagttgccgttccgggttctggtcgaaggtgctgaccctgatatacccaatgcgctgtccagtcatggaattccctgcaaaatgtcagggaagactctatgaccttcaacgagatatgtcaataaattcaaaattcaatcctatcctgacgcaatttacacatggcatctgacatcaggttagggtatgcctcaacctgacggcggcgaatcacaagcgtccggtttgacgctggtttcggtcgcagtgctggcccgcgcctggaagcgctgatagcactccagcccgcagaaatgctccacgtactcggccccttccggcgtgaaggcggcatcgagcgggatttccttgcagcacacgcagcaactggtgctcggttcattggcgttcatggtggtgttcctccattggttgacgaagccgacgaaggccgccgccggcatcggcctggcgaacaggaaaccctgcaccgtgtcgcaacccgcctgccgcaaccacgcaaggcagtcgggtgtttccacaccctcggctaccacctccattgtcgttttcagaagacggctgcactgaacgtcagaagccgactgcactatagcagcggaggggttggatccatcaggcaacgacgggctgctgccggccatcagcggacgcagggaggactttccgcaaccggccgttcgatgcggcaccgatggccttcgcgcaggggtagtgaatccgccaggattgacttgcgctgccctacctctcactagtgagggcggcagcgcatcaagcggtgagcgcactccggcaccgccaactttcagcacatgcgtgtaaatcatcgtcgtagagacgtcggaatggccgagcagatcctgcacggttcgaatgtcgtaaccgctgcggagcaaggccgtcgcgaacgagtggcggagggtgtgcggtgtggcgggcttcgtgatgcctgcttgttctacggcacgtttgaaggcgcgctgaaaggtctggtcatacatgtgatggcgacgcacgacaccgctccgtggatcggtcgaatgcgtgtgctgcgcaaaaacccagaaccacggccaggaatgcccggcgcgcggatacttccgctcaagggcgtcgggaagcgcaacgccgctgcggccctcggcctggtccttcagccaccatgcccgtgcacgcgacagctgctcgcgcaggctgggtgccaagctctcgggtaacatcaaggcccgatccttggagcccttgccctcccgcacgatgatcgtgccgtgatcgaaatccagatccttgacccgcagttgcaaaccctcactgatccgcatgcccgttccatacagaagctgggcgaacaaacgatgctcgccttccagaaaaccgaggatgcgaaccacttcatccggggtcagcaccaccggcaagcgccgcgacggccgaggtcttccgatc

SEQ ID NO: 444 - DNA, 5325 bp, Escherichia coli
taatgaaatatatgacggtgtgattgttaataagaaagaaggaaacgcggcatgatcactattaccaaagggcgactgctgacaatcaaacagtggcgcgaaacatacggacctggtagcaacgttgtactgccagcagaagaagcggaagaactggcacgaattgcactggcatcgcttgaggcagagccggtggcgtggaaggtaaccttcacgcaaattgaccgtgaatataacacgttcactggtatgtatcctgacaaagcagaagtcgaacggtgggtgcggctgcataaagcatgtaattttcgggcagatataacaccgctttataccgctcagccagtgccggtaactccggatggttggataagctgtagtgcgcgaatgcccgctcaagatgattggattttaatttattcaaagcacggcgagtatatggcaggacaggtaaaaggggaatacgtggagttgagcgacggcactttatcgtggttagggaatgccttgttctggatgccgctaccagaaccgccgaaggaggtacgccaatgacctagcctgaagcatttgcaattgtagtggctgccatttcgatcgcactgattgtttttgcgatttgccgctgggggtaaaatagttcacctgcatggagatttgatgccggggaattgtggggagcattcaaacctctccccttcccggttaaagactccattgctttgcggtcagagagatacatcagcttcatcagcttaatgaaacgcatagatccgccatgctttttcagcaaatacgctgccatttgcgcaactttttcttcattaaacataaatcggctctctgtctcacatgaaatactctttctgactatatgttaatagctccggttattacaggttaatgtgtgtttatttcttaatcagccccgcacttccgtacggggccatttctgttaatccactcccacttttttgttgtactcgcggttaaaccgatccacggcaaccttcatatcccgctctaccgatttcaccatcgccgactgctgcgccagactgagagaactgtcggcataaatggcatcacgctgtttacgcaaatccttcagtctcttccgggtatcctgcataagcccgttcatcaacaattttccgttgttctcgtcaatgaacgccgttctttctgcaccggtcagactcttcagctctgcgtgatactgcgcaacctctgtcatccggtcgtacatcttctgctggtcaacatacggcatcacctcacccgaaattttccccaggaaaggcacctgctgttccggtatatcaataccattcagcgatttcaccgccgcatccgtggttttggaaatgaagcgccctgtaccaccagagatatagtcaacccagaatttcagcgattccggtgtgatatccaccgcgccggaacgatactggctgccacctgagaacgcattcagccagaatgcaaacgccttgtacgcttctggcgttgaacgtcttcccagctggctgtcaggttttggtgtaccaaacggcatgttctcctggtaaatctgcgcccccatgaagttttcattcatggcaagattcgcaaacggacgcagaatggtcggcgctgcatttttcagcaatgccccggacagcgtttccgacgtctcactgccaatcgggctgaatgcaccaagcacaccaccaacaacattaccggcagcacgggacgccgtcaggtcaccagcagccacaccttcagaggtatgcccgagcaggaagaaaacgttgtacccgtaaggcagaggaatactccagtactctccggccctgcccccgaacaccgatttcataatgacgaggttacgctctttcacatgagacggcaccttgtcataccagttaaccccgtcatcatcctcacccgcaacactgcggttaagcgagccaagcagataacccgctcccacagctgcaagcgcgattttctgcggtacattgagattcttccagcgaaggcgctccagtaacggcccgtcgccattaagatgtccgagcgttctcaccaggtttgcggtcccctgaatgctggcgttggcaaacatatacagcgagttcatcagcgctccctgctcaccacgacggttaaagttcaccgtcatgtttttggcaagagacgccgcctgctggcgtgacaaaccggcatcacgggcgtgcttataggcagaaagacgcagagcgttttcaaccgcaccgttggcatcctcgacaaggttaaggaacgaatgccatgcaccgatactctggcctttccatccccccttcgccagcgacacaaggcgatccatttccttctgctggccttcaaggtcacccatgttaaaccagccggttttacctccgtcctcaacaaactctttccacaccttctgccactgtgcacctttgcccgtgagggttttaccacgcagactggcgtatacggctgacatggcagaacggctgtctttcaccacagccagcgcggataagttatccagccctttcagtttgccgtcgcttcttccctgctcagccttcaggttcatcaccgcagtctgcacgtcacggatgaagttactgaccagaaattccgggttatacgacgtgttcaccgttgccaggaagcggttaactttccccagcgtacgaacaaaggcattactggtttccggccccatactcttcatcgcacgcatcaggcgcggatcatgaagtttaatgtagtaagttttgccgtcctttttggtggtgaagtaccgatccgccatcattgccatcggcacagggcgctcgacaacttcgcgaatggtttcaccagtttcctggtccttgcgctctgcaatcacacgcatggtatccggtctgtcatcagtgaatacctgccagtaatccttgtcgggattatcctgcaccagtttcaggaaggcgttacccacttcatttttgcgatggcggatcagcgattcactcaaatcctgtatcgcctgagtggaaggagactgtgcccgggatgcacgccccatggcctgcctactttcacgcccgccgatggtgaagcccttacctgtacggggcagtgacaccacaccgtcaacatcctgacctttcaggggaacgtagtaacggtaggcgttctgccaggcatccaccacaccgctctcttcaagtccggcctcacggataagctcacggcgacgggccagcatatcgtcaataatccctgccagacggtcatactgtgcctgtttgccactgttacgcacacgctgcatgatttccgccgcttccgcgttggtcatccccgaaccgccgtccggcattttcgggttgattttcgcaatatgcgcgttacgttccggcgcgtgacgggcgtagaggtactcatccagatcggcctgcgcaattttgtagtccgccagcaatttagccagcggctgaacgtagcgctccttcatcacgttcaggtcgttttccgccttcccgtggaagagttcttcagccatataagcgttattactgtcatccactttgccgccagttttacggatattctcctgaacagccttcagcacctggaatttatcctgcatctggcgaacaaaacgcgatgcaattgtctcttccggcgtcagactgctggtacgggagtaatacggccccttgcgaatatcttcaggatagagtattttatcaacagagccgcgataagaatgttcccctttgggcaattggagccctctgtgcagaaggttatcgcggcttaatttttctctccggtacaacgttaaaccggtcatttccatactcttcagtttttcccattttccgtaccgtaaacagaagccaccttgttgatttccagacgcgaccggacagccttcatgtgtaccgctgacaccaccggatcaccatttttatccacggcatcaagcagcatcacaaccgcatttctttctgtcgcggaacggtaaattgcatccggatcgtgcatcagttccggtagtctctcgataacatccatcggcaccacatgtttcacaccattggtggccttacgcacagtatcgcgggaaataaccagcggcaaatccggtgcaccaaggtgacgcaataccggcggcgtacgcccgatgtttaccgttaaatccgtggagcgcagagacttcatcattctggcaaggtcatcacgataacgctcgccctcaccttccggcactttgaacggatcacgcttaccactacgggagtactgagacgatgcgcccgcgccatcctcacgcggcgtgtaaccttcccgcacacgctggcctaacgtacgaatagtctcgcgaacaagtctgatatcgttcagttccgtcggcttcagtaaccccgtacgacgcagtacccctttgaccagggcaacaacacgctcccatgccgccacgaatttaatcggctgcttctccgccatatgcgccagaaattcacccgcctgcacttccggtgattccttaccataagaagcatcaaccttacgccagacttcacggatggtgacgttatcactgtcacgggttttcagcacggtcttaataatcgtctgatattccgctggcgtgacaacatgctccatggcatggtgaataatctcgtgacgcaacttctcgcgaacggtccgcccgtcagggatgttatccgccaccaggacaatttcacgtttatccggacgatagaacgcgtgcaccttgccgtaaccgtcgaatgattcacccgccagtgcttcagcctctttctgtgacttcaccacgcggaccttcaggtcactgtccttaatgccactaatcacgccacgggcaacagcttcaacctgcgggaccggactgcctttggcttccgcactgcggttaacatccgaaatcagattgccttcaggtgtgcgggtcacgcccttacgggaataaaactcaactcccttgtccgtctcacgggttttcagtgttcggaacaagtgatcgaatgcctcacgaataccgccatccagttctgcattcgtcggataagcgtaggtgtccagctgtccatggtcatccgccttacggatattgaccagataatcattctccacgccagccatacgcgctttatcctgaacataacgctcaaaggctcgcgccgccatttcaacatccgttgaccagtacggttttgaacgaacgccatccaggcgttcagaacgacgcaacatgtcactgctgttaatggctttcatcacgcctttaaacgcgtcgtaaac

SEQ ID NO: 445 - DNA, 1357 bp, Escherichia coli
cttaatactgtaaaatatccagttgtgagttaatcaacgccgactgcctggaatttatccggtcgttacccgaaaattctgttgacctgatagtcacggacccaccgtactttaaagtgaagcctgagggctgggataaccagtggaagggcgacgatgattacctgaagtggctggaccagtgtctggcgcagttctggcgggtgctgaaacctgccggaagtctttacctgttctgtggccatcgcctggcatctgacatcgaaatcatgatgcgtgaacgcttcagtgtgctgaaccatattatctggccgaagccgtccggacgctggaacggatgcaacaaggaaagcctgcgggcgtatttccccgccacagagcgcattctgttcgcggaacattatcaggggccgtatcgcccgaaagatgccgggtatgaggcgaagggcagggcactgaaacagcatgtgatggccccgctgattgcttactttcgtgatgcgcgcgcggccctggggataacggcaaaacagattgcagatgccacaggaaagaaaaacatggtgtcgcactggttcagtgccagtcagtggcagctaccgaacgaaagcgattatctgaaattacagtcgctgtttgcccgggtggcagaagagaaacatcagcgcggggaactggaaaagccacaccaccagctggtcagcacatacagtgagctgaaccggaagtatatggaactgctgagtgaatataaaaatttgcggcggtatttcggtgtgacagcgcaggtgccgtacaccgatgtgtggacgtataaaccggtgcagtactatccagggaaacatccgtgcgaaaaaccggcagaaatgctgcagcagataatcagcgcaagcagtcgtccgggagatctggttgcggattttttcatgggctcaggttcaacggtaaaagcggcgatggcactcgggcgtcgtgcgattggcgttgaactggagaccggacgttttgagcagacagtcagggaagttcaggatttaatcgtttgaaacggatgagattgcagtattaattccgtaacgttattattctgcgcgcggcactttagctcagtggtgagagcgagcgactcataatcgccaggtcgctggttcaaatccagcaagggccaccatcacataccgccattagctcatcaggaaagagcgccagccttcgaagctggttgcgcggagttcgggtccccgaaggcggtccattatctgtatcctgcgttgttagctcagccggacagagcaattgccttctaagcaatcggtcactggttcgaatccagtacaacgcgccacacttattttcc

SEQ ID NO: 446 - DNA, 2922 bp, Escherichia coli
  modified_base (2917)..(2919): a, c, t, g, unknown or other
ctgagatagcaatcagctggatcaacggtctgaaaaaaatccgtttccccgagaagagcggcaagatgcaggatcacggcgttattgccgttgataccgcagtgaagctctgatttttcctttccccatgccgggttatcgcccggctttttcaggagtcattaattatggcaaagactatccttgctccatcactgagtgagcggatttattcaggtacgcacggtaatgagtcggtggcagaaggtgtgtttacagtgaacgctgcggaagcggacagtgttattcatcttctttcactgccagttggtatccgtatcaactcactgcaactggtttcaacgggcggtctgggtactgcaaccgtcagcattaagtccggtgagcatgttctcatcgataacagcgaagctgtttctgcaaaatttgccagatatgtgcccgtggagccgtacaccacactgcgtgacggggagctggttacggtcaccattaagacagctgctgcgaccggtaccctgaatgttctgctgcgttataccgtggtgggatactgatataaaccttccggcccgcgtcatgcgggcttttttatccggggaattatatgagcgagaaaattgccgttgtctatatcggccccaaacccgtgaaaaaggatacccttaccgggagtcgtacactgttcccgcgtcttgagccggtgcatgttgacagcgcgcttgcctggcagttgctggcctttccggatgtctgggttcgtcatgaagagcttgatggtgtgctcaaaaagcaacaacaggatgagcagttgcggcaggcacagcaggcgcaggaaagagaacagcttgctcttgcagaagcggagaacagttttgtggttagcgttggtggtcaggatgtggatttgagcaaactcacgtccgcacggctggcaacgttgtgtgaggcagaagagctgaatattcacaaagacccgaaagaaacggctgatgcatttcgtgtccgtgtgcgtgaggcatttcgccgtcgtgttgcggagactgaacagcatggcggaactgactgattttttaccgtatgtccgtcgccatatcagtggtccgctgaacattatgatgacggatgcgttatccatgtcggcagtggcattctgccgtcagtccctgttgtgccgccgtgaagccacgctgtcaccgtcagccggagaggactgtgtgctgccatatgacgcggagaatgaagagtgcgtacatattattcgtatcctcgctgacgggcgtgagctttttgccggtcatgatgtggaaatccgcccggggcgggtaatgcattttgcctgttcgcccggagaggtgagtgtgctttatgccgttgctccgaaagcagggagccgtcaggtgcaggatgaactgcgggcatggtctgaagaagtggctgcaggggcgcttgaacggttgttcatgcagaccggggtttcatggtcagacccgtcgcgcgcacagtatttctctgtgctgttttctgagggtatccgtcgggcatatcgcgacacactggcgacaagtccgtactcctcataccgcaatcctgtccgcagacaaaggttttactgatgacgacgattactgaaatcatcggacgagtgaacacgcaactggttgacccgatgatggtgcgctggcctctggctgagctgtgtgattattacaatgatgctgtgcgggcggtgattctggcaaggccggatgcaggcgcaagtctggagacgctgaattgtgttcctggtgcacgtcagactttgcctgatggcgcaatacagcttcttgacgtgatatgcctcagcgatggcagtgctataaaaccgcaatcccgtgaggtgcttgatgcacagtatcccgactggcacatgctgaggggaaaccggaatgctttatcagcagtgaccttgccccgcgcgtgttctggctgtttccggcaccggaggaggctgtgagtgttgatgctgtggtcagccgcattccggaggcggtgtatgttctgacgcaggatgatgacacgcctgtaccgctggaagaggcttatgttaacccgctggttgactggatgttgtttcgtgcattcagcaaggatgcagccggtggtgcagagtcaggactggcagcacaacattatcagagttttgttgagcagctcgggattaaacagggtgcagacagtgcattgtctgcccgcaagaaggtgtttaacggaggtggaatgtgagtgttgttgtttcggggacgctgaaatctcctgatggtgaggcgatatcaggcgcaaatattaccctgacggcgctgacagtttcaccggatgcgctcagcggcaccagtgcgtcagcagtgactcgtgacggcgggtattacggaatgacgatggatccgggggagtatgcggtttcggtgacggtgaaagggaagactgctgtctacggacgtgtgcgtattgaggggaccgaaagtacggtgacgctcaatatgctgttacgccgcagtcttgttgaggtgagcatacccggagaactgctgacagatttccggcagatacagaataatgtggctgatgaccttgccaatattcgtcgcctgaatgaagacacggcgacaaaaaacactcaggccacacagtcaaaagaaagtgcagcagccagtgcgaagagtgcatctgacagtgcaaagacggcaaccagcagggcggctgaagccggacaaaaagccagtgaagctgcagaagcggcgacccgggcatgcgagtctgaaaaggccgcggcagcagacgcgaatgatgccagacaacatgctgaaaccgccagagtggctcatgaggccgccggagacgttcttaaacgtgctgagactgccaaggcacacagggnnngga

SEQ ID NO: 447 - DNA, 1006 bp, Escherichia coli
agaaacgcatggtttactccttagattttaagtttgtcctgggctacaacgacaggttttccggatgtgtcgataactcctaccgtcggtacaccatttttgatttcgaagaacggtttattttcgcccgaacacaattggttgtctttgtattcgattttctgtgctttccaagtttccaggttgagcaccgacatagggttgtcgtagcaccaggaaccaccttgctcaacaacgaaaacatatctgttgcctttgtatttaaacaaattctttgtctggcaatacagaccgtcgatttctgtgcaatagaattcatcggtactgttgacgtatttgataccagacggtagctttacttgtttcgcagtagcgaagacagaaaacagaacagttacagcaacgagtaaagttttgataaaagttttcatgatagactccttaaattagttaaccgcagctacgtagtttttcaccagatacgcgaattcatgcacgccaatttcaccgaaccaaaccaggtaggccgggtcatctaaaccaaagtaacggtagccaacaacttcatgggtttttgggttatagagtgttacgataaagtcccaaccgcaggtattggctttgcaaccgtcaccctggaaccagactgtaccgttaatatttactggcgtgatacctccaccagggccatccatatagccgcctttaccgaacatgccgctcagtccgaccggttttaatgctttgtcgatagcagctttgtaggtagcgtcaccttcgtacaactcgtacgttgatggacacactccaggttgttcagcccaggcttccgggttacaactaagagcttgtttcacggtagccgcttctgcgttaaagttaaagcccgtgaacagaaccgccagaaataacataagggtatgtaaacgtttcattgtaaatattcttccgttgtaaatggcgctggaaaatttctcatcagtgaaaccttccggaagtttccccc

SEQ ID NO: 448 - DNA, 2186 bp, Escherichia coli
cacccgtccattactgagttcaatcaccggaagacgctcgaatgtacggtaataaaccacctgaagcagcacacgacggcgttcacgctgaagccattcgttctccttacgatcccatgactgatactcttcccatgcactcatcaacggactgggctggcctcagtaaccgtggtatcgacaaaaccacgccagtcatcaatggcataatcgataacctgagccattcccgggaatgtagcttttgcctcatcggtatccatccagcggcgacgcatcagccagcggcagtcacttaaatcagcctcccggctcagccagtcccagaaaacctcattccggctgacagtagacaccttaaattcaggcccgaacggatcactgtttcgtctgacctccacccaactgaggcccgccttgatttgttccgcataggcatcggagcgggccttattcatgttgccaagacggcacgcatcagcaaactccgcattaatggcctctgccagtttctctgtttcatcgttcggatcgtctgacatcactatcaggtccgttcttgtttttgcctccattcccagtacaccatctaccgtgggggcaatgaggttatggatggtcatgggctgaccgcgatctttcagtacctggataacttccggtgccagctggtcgccatcataatacgcacaggccttgtttgcggcatcacgccagagaggctgactgtcaatatcagaacagagagacagtaactgacgctgagaaaaacgcggcgtggatccatgatcgtttttcatcgctgtggtgttaatttcatttttcatcagtgtgccatccagtgtgtggttctgcgtttatccgttttctgttttaccctcaccggcattctggcgcgcatctcctgggcaatcatgtagctcatgagctgatcatcaaagcagccttcctgtgcattcatggagcctttcgcgtcataaacgtaggtgttcatttccgataatgtgcctgaccagcggatccctgatattccattattcagaagcgttttcattccttcggtcagaacaggtttgctctgacgggttgtcagccagccaaggcggggcgtatcgtcgtcatatgcctggtcaagatgctgttcgttgtagatataacgtgtcggatagagttcccggagtttcaggataactgcatgtccgtgattattacgctccggccccacaaacgcgttgttatacatacgacagacctgcgaaatgagatgagcaaaaagttcagcatcgagatgcccgaaccagtgagccacctgctcgccattactgcgtttgacaacatccagcgatgagcggtctccgtgctccagcccttcggcagtatctgccccacaaacatactcttcatccggatccggcagttcccataccagcagataattcatcagcgtccgctgcaactcgtttttatttccttcacgcagagactgagctttagtcttcgctcctgtaacaggttcaatgtcataaacaatcatcggtggcgaacagaatgattctgcctgcaacgtactttcggcactgaacacacgtcgtccggacgtcagaaacgcctcctgtggcgttgagggaaactcctgcttcatttcctcacgctgttcagtttccttattgatgtaccactgcttctgttcatcagtaagcgtgatgttcattgccttctcaaccgcagaaaaatacgtcattttttcccgtgacagcttcagcccgctttccggcactctggcgctgtatttaggatcctgccaccaggcgtaaaaatggaatttataatcctgtgccgtcagcaataagcctgatgcagtgatctcctgtgctcggttactcatctcgtaaaaatcaccacccacgccttcagcagtggactcatcaaaaataatgcattcatcagagacggcattaagcgtaccggttcgcagttctttcgccttagccggatatttcgcgcaaattttgccgtgctctgagatatgcaggcgctgcaccgtacctgaacggaatgaggttgccacctggatactcgagccgtgaccaaacaggatatagccaccgctggcaccgctacgacgttcaacgatggtgaatgaggctctcagccagtcagggagatgatcaaacggtacagcaatt

SEQ ID NO: 449 - DNA, 2037 bp, Escherichia coli
  modified_base (2)..(2): a, c, t, g, unknown or other
cncctatccctgtgtgccttacggcagtctcaggcactcagtgataccccgactgtcgtctccggactgacggttgaattttcagcgttgtttttttaatgcaaaaaaccggttacggataaaactgtgaggagggcgttatggtgatacgcaaaacggtgtgcagggattgtagtaacgcaattactcataatacggaatgctgcccgagctgcgcgtcaacagcttcctcaggctattaccgaaataccgatcgtctgctctttctactgacgttactgcctgtgctgattctggctgtcgtttcagacgtcagtgtatttgtactgttgcagtaggttacaggggagggattatccggaatcaacggggcagaacgccccgccgcctctgcgtttgctgtgccagacagtaacgcaccggatccccggtaaatacgagaaaacctcagcagatacaggccgttaatacccgaaaatcagcccatgatcacccacacctccggacaccattcccttttgatttcgaattctttgttgtcgttatacagcttaacgttcccgacattatcctggttcccgacaacaggaacatattcagcttttaataacctgagaagagccaataagaatcacaaagcggataacacctggcgcgatgccgttgtgattaccgaacgctcagatgacatatttccagactgaagcgggaacacgatcgtaaagcttgttcattgtcagttctgccagtcggtgatcgaccgcagagttgaaggtttccagctccgcaggggtaagtttataacgcgtgtgggaaatcacttttccagtgtctcccgggatgaacaacgacggaactgatacagccagtcctctttggttttaacttccattagcctctcatcactttatgctacaattaacgtgatactgtcagcataccgcaccagactggcattctggtaccctccccaaactcattactcccgggccaccacttaaccggtctctcagactgtcactcaccaggtcggatacgcttaccgctcagacggatgcttaatgcactctgttcacgtgggttgcaggtacgttttatatacgcaggttatacgccagctatcagagatagccctgtgggtacaacgcaatctgctgctactgcgttctcatgcccactgatcgcactcacagtgtttatttcacatatatgaactcatgtgtttgatctctcttatatatttataataccaatcagacagtcttatcccaacagtgatacctgtccctgcccacaaggcacgggctgccccaccgtaaccgccccgtaaataactctgcaattatcagaacgccagttttcccctcttcctcacgaaaatcatcccttctttatcgcgcgcgcgtgcggaagcatcgtttcgtaacaaccacccggcataccggtacggctcagccaccgcaacctccccgtttatctcctggcggtcacattcccgattattttttacgtttctccccggttgttatgccggtgaaggtggtgcgttgttttcatgaccacaccggctggtttaacaacatccggaggaacattctcatgaccaccccagtttcgctgatggatgaccagatggtcgatatggcgtttatcactcagctgaccggcctgaccgataagtggttttacaagctcatcaaggatggggcctttccggctcccatcaaactcggccgcagctcccgctggctgaaaagtgaagtggaagcctggctacaggcgcgtattgcacagtcccgtccgtaatttctgccccttatccgttcacccgcagcagacgtaatccccggcctgccgacggcattctgctgcctgttatatccccgtgaggaatatgaaaatgaaacaacagtatcagacccgctacgaatggctccacgaaagctaccagaaatgctgaccggcttcacccggcacgccgtatcctgggcgtgtggtccccccccatccgaatatctactacttccataatctgac

SEQ ID NO: 450 - DNA, 3422 bp, Escherichia coli
  modified_base (875)..(876): a, c, t, g, unknown or other
  modified_base (1201)..(1201): a, c, t, g, unknown or other
  modified_base (1203)..(1205): a, c, t, g, unknown or other
  modified_base (1258)..(1258): a, c, t, g, unknown or other
gatatggcaatgatgtgttttcattcccaaccacgcgacgaatacggtgagacagatgataccggtatgtatccggcacactggaaagactggccttcaggctgtacacgcagccaaagcgtttatcgttgaacaccacatttttctggctgatgtcccattcttcacgcagcgcggcaatcagttgtggtgtacgggtaagcagcaagcgaaaaggcagttcaaaactggtgacgtaatccacattcagcagtgcaatacgcaaccgttcttcaggccctgcctctgtctgccggcactcatccaggacatcctgccattgccggcgaagacggggcgattcattcagttcagtaaaactgtatttatctgcaagatagtcaattcgtgtacgcatactgaaaggaattccgtataaagattcagcagacaaaactttatcagccagtaaaaattaacggaagcattgatattcctcccgacaatcaccggatgattgttgcaataacctgcgacataaaggactgaacagccgtttttaacgccacgtattgccctgatgaaccaggccgggcaacccgaaaacatctttccacccggcattgtccgccagcacttatcaccgaccaggtctgttgcagtaaatccaccagttgcgcacattcttcatcagccatgacgccgactcgcggatggcaaatactcgtctggctgagcagcaacagacatcgtatctgtgctccttcatgttgttcccgcaaccagcgtaataccaccggcgctgatgggctgaccgtgtgattatgctccgtaatacgttcgtgtacccgtcggtgaaaggaactacaaaatgtctgaatctgttgaccatagannattccttctgccgaatagagcgtgaagtgaaatgccaacagatttggccagtggtccaccgcctgctgaacaaaacgccggatttcccccggctctgaaattaaggcttcggttatttgcacgaaatgttccttttcaacccctgttgaattttgtcaagccggtgcagacacagtaaagcgcgcatcaacaccggtgtaatgccagttctaatcaataagaatggaatgacgaatcagtcaggaagggataacaacccgctgctgaacggaaggtatcagcaggaagatgaacgggaatatcgccagcaccaagggcagggctnannnccgcaataccagcgtaccggcattacaacacgtttcatgctgctgccccccangattcctcgattctacttcacttccactgctccacttcacttttgtaccagcggctgctgcgccccagtttgatgggtttagggaaatggccttcactgatcaacttgtaaaaccatttgtcggtcataccggtgaaactggtgatatagttcatgtcgatcagggaattatcggcacgcagaaatacgctgtcgtggcttgttgtagtcaacatggtcagaatgtcctgtgagatttatgaagattgtgcgaatgcggggaatctactgagctgtgctttcagaactggcctgttacgggataccagggattaccggcggggtaacgggcttccggatcatacacaccacgattatcgcggacaaaatcactgaacgcccatatcacctctttaagtatgtcttcgcagtccggtaaatgacgatccagcgccacatcccgggtggtacagctttgatgcgcccggtgacacaaagcccggattgttccagacatcctgaatcaaacgccccagattaggggcgtcgaaatatgcctctctgaccattatattccggcgtataggtagcaggtctgaagtgacaatgcgtcacctgacgttaaaagtcactacacccaagatgaccccagtgggggcaacaagtataaaaccgttttttgattaagtggtcggatatgaaaaggggaaggtttatgtgaaaaatacctgtgttttctttgaaaacacacaacagtatcaggttatttatgtttatacagtgcgttccaaactgacctgaataattacgcaagttgcaacaataaaacatttttgccgtagtgtgaggtactccggtaaattgctttccaggtgcagacaatgactaacgaagaactacaggcaatcgcattatccatgcttgagcgccagcgcgaaaaagtacaccagcaacgagagtctttgcttaacccatctccattcaccaggccaaaacgattggagcttgaagcattcttggacaaatacccacggcggcttaaatcaggcaaaaccagaccaccaggctgatagctcacagtttgttctccgattcaataaaacggataagaaccatcagcgcggtagcgtaaggcactacagcgcattgctttacgagtaataacaatggatttatcaccagaagacgcaaagtttttacgagaactgcaacaccgtatgctcagagaagccattatcgaacagcaaacgggcatgagcgccatagacccattgcgatacaaacgggcctcatctcctttagttgacgacaattccaatgcggataaaacacgtccaccacactgattacatttttcattagcacagtggtgtgatgcagcatacgaggaaaaccggatgaatgagaacaaaataaaaaggctggagcaactgttacaggcacgccaacgggagtttgccactaaatggggacgtgccgcgctgccacatgaacgcctaacctattttccacttgaagacctcattaaaaataatggcaaaaaaatcaggtctgataagaaacacttcttagaatgcaatgaagacaaataacaacaatctgcatattgccaccaaccacagatgtggcatcgttatcagcgcacttgattttctttatatccactgacgagcttgccggggcacctttgtttgccggtcattctggtatcatgcagatatttacggcgtacaagcccactagcatgacattgtaataaggcctgagcctaacgctttaatgtgtgtcatacactcagtggcgtaatcgttgacaatatggtgcatgtaatcgtaagcgtccagcgaaatccatctggtcataatctgaagcatccgacaaagtggtgtccaccaaataagtgatctgcgcccaatatcctgagccggaactttgacaaaggccaacgaaaaatgggagcggatgttacagagttctcggtacaggggaaaagtggtacctgtcgccagttctccgatctgtttaaccgggaaattatctcctacagcttgtcagaaaggtcggtgatggagcatcgttaatacgatgctatacgatgcattcacagtgcccggccagaggatgccccgtcgctgcatatggatcagggttggcaatatcgaatcgcaggctataggcaaagtta

SEQ ID NO: 451 - DNA, 2417 bp, Escherichia coli
ggattgttgaaggcatgctgatgatgctgggagtgaggcttgagatggatcggtatgttgagcgtgaattgccgggagggagaagctctgtattttatcagcgaaaaaatagttttacgatcgtaaaaaatctgcatatcatgataagagtggttacattgccacgctgcttaacccgccgatgcgcgggtttttttgtacccagaatcctgtgagctatacggaaagtacacagaaaggaaggtgcgaccacaattaataacaaaatcttaaaaatcgcacatggcactattagttttctaaatattgtgtattttttgtattgcaggatgaccctgtaacgaagtttgcgtaacagcattttgctctacgagtttgccagcctcccccagtggctggcttttttatgtccgtagcgtcaaagcagcaatgtcgctggggcgtcgtgcaattggcgttgagctggagactgaacgttttgagcagacggtcagggaagttcaggatttagtcagtcagaacggatgatattgcaggattagttacgtaccgttattatcctgcgcccggccctttagctcagtggtgagagcgagcgactcataatcgccaggtcgctggttcaaatccagcaagggccaccatatcacataccgccattagctcatcgggacagagcgccagccttcgaagctggctgcgcggggttcaagtccccgatggcggtccattatctgcatcatgcgttgttagctcagccggacagagcaattgccttctaagcaatcggtcactggttcgaatccagtacaacgcgccatatttatttaccaggctcgcttttgcgggccttttttatatctgcgccgggtctggtgctgattacttcagccaaaaggaacacctgtatatgaagtgtatattatttaaatgggtactgtgcctgttactgggtttttcttcggtatcctattcccgggagtttacgatagacttttcgacccaacaaagttatgtctcttcgttaaatagtatacggacagagatatcgacccctcttgaacatatatctcaggggaccacatcggtgtctgttattaaccacaccccaccgggcagttattttgctgtggatatacgagggcttgatgtctatcaggcgcgttttgaccatcttcgtctgattattgagcaaaataatttatatgtggccgggttcgttaatacggcaacaaatactttctaccgtttttcagattttacacatatatcagtgcccggtgtgacaacggtttccatgacaacggacagcagttataccactctgcaacgtgtcgcagcgctggaacgttccggaatgcaaatcagtcgtcactcactggtttcatcatatctggcgttaatggagttcagtggtaatacaatgaccagagatgcatccagagcagttctgcgttttgtcactgtcacagcagaagccttacgcttcaggcagatacagagagaatttcgtcaggcactgtctgaaactgctcctgtgtatacgatgacgccgggagacgtggacctcactctgaactgggggcgaatcagcaatgtgcttccggagtatcggggagaggatggtgtcagagtggggagaatatcctttaataatatatcagcgatactggggactgtggccgttatactgaattgccatcatcagggggcgcgttctgttcgcgccgtgaatgaagagagtcaaccagaatgtcagataactggcgacaggcccgttataaaaataaacaatacattatgggaaagtaatacagctgcagcgtttctgaacagaaagtcacagtttttatatacaacgggtaaataaaggagttaagcatgaagaagatgtttatggcggttttatttgcattagcttctgttaatgcaatggcggcggattgtgctaaaggtaaaattgagttttccaagtataatgaggatgacacatttacagtgaaggttgacgggaaagaatactggaccagtcgctggaatctgcaaccgttactgcaaagtgctcagttgacaggaatgactgtcacaatcaaatccagtacctgtgaatcaggctccggatttgctgaagtgcagtttaataatgactgaggcataacctgattcgtggtatgtgggtaacaagtgtaatctgtgtcacaattcagtcagttgacagttgcctgtcagactgagcatttgttaaaaaaatttcgcatggtgaatccccctgtgtggaggggcgactggtgacggtataatctctgattatcaaaacgagaatgacgcgggtttagtggcaccgggctgaactcaccgggaggcacccggcaccatgcagtatacagagattaggcatataccaaggcctctcatag

SEQ ID NO: 452 - DNA, 794 bp, Escherichia coli
gccaccttctgctcagtggctttctgtttcaggaatccaagagctttcactgcttcggcctgtgtcagttctgacgatgcgcgaatgtcgcggcgaaatatctgggaacagagcggcaataagtcgtcatcccatgttttatccagggcgatcagcagagtgttaatctcctgcatggtttcatcgttaaccggagtgatgtcgcgttctggctgacgttctgcagtgtatgcggtattttcgacaatgcgctcggcttcatccttgtcatagataccagcaaatccgaaggccagacgggcacactgaatcatggctttatgccgtaacatccgtttgggatgcgactgccacggccccgtgatttctctgccttcgcgagttttgaatggttcgcggcggcattcatccatccattcggtaacgcagatcggatgattacggtccttgcggtaaatccggcatgtacaggattcattgtcctgctcaaagtccatgccatcaaactgctggttttcattgatgatgcgggaccagccatcaacgcccaccaccggaacgatgccgttctgcttatcagggaaggcgtaaatttctttcgtccacggattaaggccgtactggttggcgacgatcaacaatgcgataaactgcgcatcgctggcatcacctttaaatgccgtctggcgaagagtggtgatcagttcctgtgggtcgacagaatccatgccgacacgttcagccagcttccctgccagcgttgcgagtgctgtactcatccgtttatacctctg

SEQ ID NO: 453 - DNA, 2400 bp, Escherichia coli
gaactttctggcgtacggcatctgccccatcgccattgcggtctttctcatcaaatttattgaccagcacaaacaggcggccaactgatacgtcagcaatggcattaagctctttacggacgtcttcatccgcttttgagttcatctgggtgtaatccatcacagccagaaccgcagaagctttctgcagttgatcccgcatcatcacttccatctgcggctggccggcctcattagggccgggggtatccagcagtgtgagtgttccctggcatgcatccatccccaccagatggctgaattccacgtcgatcaccggcagtttctgcacttctgcgtattcatcaaaaggaaattcagtccccattgccgcagcaagacgaaccagatcgtttaacgatgccagtccggtaaagatttcctcctccccgtggtattcatttttgagccagccatcatccgtcagaatatccagcagttcgcgggtatccccggtttgctgcagggtctgtgcgacctgctgtcctgccggggtggcgagtttttcctgcagtgtgattaataaattgcggacaggctgaatatgttccagatggagaaccggctcagtttttccgggaacgtggcggatgagcgtcggtacagaggtcatggggcggttacggttaggcagaatttcctgccccacaatggcgttgatggtggttgatttgcctgctttcatcgtgccgacaacagccagcaccatctccctgcgcgcggttttgatttgttcgccctccagctcctcaattcttttcagcgctttccgtttatcaaaaagcagcccgttttcgttcttactgtcagataacacatccggctcatcaaccatttgccggagcagattaatattcagttgcaaaagccggtcggcttcatcacaaagcagggcgatgttcttttcgtgcatcattcacctttataaattcaataattcagaactgcggtgaacagcaatgagcgtcctttcccattactgcatgaattttcctgaaatcgtatttccgggataccgtataatcagaaagtcacattcagcgtggcctgaccgttatagccttcagcgctgctgccgctgacgctgtgggcataaccggcctgaacgcccagggtgatattttcccggacacgggcttccagtccggcctgcagatccagtgaagtgccattctgtgagggagagaacgtcatcccgctgcctgcggtggaggtccccacacgcatatcaccccgggagctgaaggtgcggataacggaaggctgtacccaccagttcaccggcagttcacgcacactgtgttttgcactgtcacgcaggggggcacgggatgaggtgccttcgccaaaggtcatatcgttgtggctgcccagacggaaaccggcacgcacatgttgtgcactgccatgcccgaacttcacataaccggcgttgtccttaccgtcatccagggaaagtccctgccaggtatactgcagttgtggctccagcatcaggttgtcagtgatactgaagggcagaccggtttccagtgagcccagccagccccagccgcgggcgcggaagtcgttattgtccgatgacgctttcatgctgtggcgggttccctgtgccacaatgtcagcccacaggccggaggacgtgtgtgtcagattcaggtatccgcccaggctgccggcatcatcccggaccgtgccggcgcgggaaccgtcatcatccttaacatcaacggaagaatggcctgcggcaccatgcacccctgtcgtcagagacataccggcaacctctgttctgagcaggtcaccctccagacggacgaagccatagctgccgctgctttccggcgtggccccacgggcaataccgccgttgttatcgtgaccgagatggccgccctgaatgctgagacggacgctgttattttgttattttcaccgtttacaccggtctgatggctgcgtgagcctgccagaatccggtcatagtccattgcctgtgtcagcatggaggcgtacagggggacttcagcacgataacgttcttcactgcgcagataccagctctcatcactgtcccggttgagggtgtagttaaaggccccggcctgcagcatattcccctggacaaaagccccttcctccgtggtggcaccgttaatggcctcaaccacctgaatacccttaccggtggtcgccagccccgtaccactgttgccggcgttcaccagattcaggatggtttttccggttgccctgccaccgtcaatgaccagtctgtcagcattgttctgcgccatatccgggcatacacggaggctgatggtgccattctgccgttcaggttttcacctgcagggttgc

SEQ ID NO: 454 - DNA, 1739 bp, Escherichia coli
actgctccgcgtatctgcggaataatgcgccagcctggctgtatcactgaccagtgaactgaccctgtcgtttacctgggtaatcgcgtagtttgtggtggcaagtgacgttgtcatctccgtcagccagcgcagggacgcctcaacgccctgtgcaagcgacgcattgatggcattctgccgtgcagcgccttcgccggtcagcccctcttttaaacgccggaagaacgtgcgctctccggccgtgcggatatgctcctgtgcaacatcgattccgtttgcgaaatcaaccacaaatttttcaggaagacaggtgagtacctgacatacccggttatcagcaatttgttgaataaatggtgaagtcacagcattgtctccagctcttccctcaacgccttactgtcagtaatgagctcaggaaccctttcatttaacgcctgaagacgcccggtaagccgttcctgcgcctgctgatcgcgtttatgatcttcagagctctgaatcagcgtgttacgcagctgttcaactttctccctgaatgcacagaaaaaggcatcgatttcctggcggacgggctggttaatatcctgctcaatggatgcctgcagctccccgaaatatgcccgggtcagtgacatcacttccttcctgaccttgttgatattgataacactgcggctcacatccacgttatagttttcccatccccattctttggtgccaatccatccacaaatctttccaatgaagctatccttccgacggcgacgggtgactgtctccgttctttcctccataagcgcactcagatttgtttttaccgcgagccgggtctgtaactgactgactgccggaaaactgatttttacagtgaagccctcatccgccaggcgggcattgatacgtccggcgatgttttctgtcgcatacagggccgtaccacgaaaacctgtttcaatcccgctgacgattttctccagctcaggccggaactgtgcctcagcctcactgtgcaggctggtcacggtcgattcgatttgcgtcatcagttcaagggcttccctgcgattatttaatgttatctcgggggtttccggatcaaagactcgtatcctgtcatcctcccagcccgggttattgataccggaccatcgataaatctttccccataatccggaccgggaccttcgttgttctgcgtcttcttcctccagcatttgctgttctttgcgtttaccgcttctgaaatagtcattcagctcctcttccagtgaggtgcagacccccgtcagtaattcccgggttttagtatcgatctcctccatggccattctgacatcagcggtcacctgctcctgacagtccgcgatttcccggatatccgcaagcaggctggtgatatgcgactgcagtgactgaatgctttgctgtagcccctgatggcgtaacaacagatattcactgacattttccgcattctgcatcagttttgcggcggcagaatcaaccgccagtgccgcagctctggaatgggaactctgtatgacttccgttatcagttgatcgataagtgagccttcccacaggtctgttgccccttcagttgccagttcgctgtctttacagacgtaatcttttttcatgcgaccgaaagcttccctgacaaaatcatcgacccaggcttcatcaacaggaagggttccgtttttccgtaactcatgaagcgcacggttagc

SEQ ID NO: 455 - DNA, 1172 bp, Escherichia coli
atgccttcaacaatcccctccgctttgtgaaggcgtttacctatacaggtgtcagagcacccatgtttccgtgccagcgccatgaacgtctcccccaacacgtagtaatcaaccagcaagtcatgcagatcgcgattgttccggtaaaggcgggctatgcacccgcatatcaccatcgcatcatcgtcacagcactgtggacgtgattttactttttcggggatcagtcccttaaatccggcagcaatgggcgaccatgtaacatcctcatagttatttaccgcccatgccccccagcgctcaagaacctgccggatatcacgcatcagtatctttaccccatccgcgatgaaccataaggacgccattgacgacggcgtgctttttcgcatctttatcatcaatgtattttctgactgtagcacgattgcagttcagtattctggcgacttctgtctgatttcccctggtgcagatcagtaattcaggtatcgtttgaattttagcattcatcaaatgttctccagttcggtgatttttatccccactctaccgtccaggcactttcacgccgcgaattacgcgaatgtcatcgaattgctcgtcgtcgtccgcaaatccggcgtggataagagagtcgagtaaacctttcaggatgttatcgaggtcgcgacggcgggaatctggtggttcagcaataattgtgatgcgaagtcgtgatttagtgaaaatgtctaatctgagttgccggatgatttgctgtacgtcttttcggtatttctggcctttatcgctgatgtagtactggcttccccgtcttcgccagtaggtattcaccgtcggcggccagggaagcacaaactcatattcattcatgacttaatcttcccctccttcagcaatatcgcctgcgtcctgatcacgccttccaggtggtaaagtctggcgtcgttgttgtcgagaattcgggtgcgtcggtcgatctccgcgtggcagtcactacaagcccatgcaccgatcaggtcgtcaggcttcattcccgttccgcaaattccagccatccggtaatgtgccagaactgtcgtttcaggattgccattgcatacgccgtaaatccgtacctggcattctctgccgcgcgcttctttgcgtaggtttgccatcatcttatt

SEQ ID NO: 456 - DNA, 979 bp, Escherichia coli
cggccgggtcgcgcacacgggtctggcaggcgaagaatggctgaaagccttcccgctgcaggctttccagtacggtgatggtgggaatgtacgcatatcgtttactgcgggaagtatgccggtcttcaccgaaaataccgggaacatagtgcatcagttcttcgtgtgtcagcggacggtcacggcgtatctggttcgtataaccaaaacgactggctagtcgcataatttgctccttatcggtggttaagatttactggtgtaataaatgaaaaagccacgtctcccggagaagacgcggcctgacagatgaaatgaatgacgtttattgtctgagaagcccttaactggcgagctgagtattaagctgtgttccggcatcaccagcgcaactgaccttcagcattacggataaccagccgggaatatgttccctggtcatcttcagtaaacacattgcggtaagctgttttgacggcaacagcctgttcgcgtgagaaagggccttcgggcaataaacgtgatgtacaacccggcatatctgttgctccctgaaagtaaaaagccccggtcatgatgaccggggcctgaaggagagtgacctgattatcagaaagtcacattcagcgtggcctgaccgttataaccttcagcgctgctgccgctgacgctgtgggcataaccggcctgaacgcccagggtgatattttcccggacacgggcttccagtccggcctgcaggtccagtgacgtgccattccgggacggtgagaacgtcatgttactgccggcggcggctgtacccatgctcatgtcaccccgggaactgaaagtacggataacagaaggctgtacccaccagttcaccggcagttcacgcacacggtgttttgcactgtcacgcagaggggcacgggatgaggtgccttcgccaaaggtcatatcgttgtggctgcccagacggaagccggcacgcaca

SEQ ID NO: 457 - DNA, 7190 bp, Escherichia coli
  modified_base (3690)..(3690): a, c, t, g, unknown or other
  modified_base (6249)..(6249): a, c, t, g, unknown or other
cactctccagccctctccggaggggctttcttatggacaaaaaaagcccgcgctgggagacgcgggcggcaaggaataaacaacaaaacgtgaagtaatatttcagctggcgaataatatccgacagtaatcactctgcgcaatagcgcggcctttttcgtattgcgggctgttgtctctcttctgccattgtcctgtaacttccggacttcagcccgctcctcattttactcacaatattatcccggccgggaggattcatggcatttaaacactatgatgttgtcagggcggcgtcgccgtcagaccttgcggaaaagctgacacacaaactgaaagagggctggcagccatatggcggaccggttgccattacgccgtacacactgatgcaggcggtggctattgaaggagatccacaggtcggcccttcatctgagccggactggttctacgtggttgtgcttgccggacagtccaacggcatggcctacggtgaagggcttccgttaccggattcttacgatgctccggatccgcgcattaaacagctggcgcgccgcagcacggtaactccggggggagagagttgtacgtataacgacatcatcccggctgaccactgtctgcatgatgtgcaggatatgagtacgctgaatcatccgaaggcagacctgagcaaagggcagtacggctgtgtcggccagggcttacatattgccaaaaaactgcttccgtatatcccgaataacgcggggatcctgctggtaccatgctgtcgtggtggttcggcattcacccagggcgcggaggggacattcagtgcggacacgggggccagccaggattcggcacgctggggtgtgggtaaaccgttatatcaggacctgatcgcacgcaccaaagcggcattacagaagaacccgaaaaatgtgttgctggcggtgtgctggatgcagggcgaatttgacatgagcgctgccacctacgcacagcaaccggacctgttcacggccatgctgaagcagttccgtactgacctttccggatttaacgcgcagtgccatggcggcagtgctgcagttgtaccgtggatttgtggtgacacgacgtattactggaaaaacacatacggcacacagtatgactccgtctacggcgcgtacaaaaacagggagagcgacaacgttttctttgtgccgttcatgaccgacggtaacggcaacaacacgcccaccaacttaccggcagaagacccggatattgctgatgcaggttattacggcgcgcaatcccgtagtaatggtaattgggtatcgtcaaatcgtccgacacatttcagttcatgggcgcgcaggggcattatttcggatcgcctggcaaccgctattctgaacgcagttggtcgaaccagcgccttcatcagcggtaccgcaccggagattaaaccctcgcccggcggcgacactccatcggggccgtctgatggtgacacatccgttcgtacagtctccctgctgccgacagccggagaggctgctgcgcagggctggaccatcaccggcggcagtgttgcgctggaagatggtgtgtttaaggttaccaagcagagcaataaaacctggtccctgatgcatccggtggatgacgcagtctccctgctgacacggggtggcagactgagctgtaagtttcgactgtcaggcgcactgaccaacaaccagttcggtctgggaatttatctgtataccgatgtagcgttacctgacgtcgtggcgatgaccgggactggtaacccgttcctgatgtcgttcttcacccagaccacagacggcaaactgaatctgatgcatcacaagaaagccggaaacacaaagttgggcgagttcgggaattacagtaacgactggcagacgctggagctggtgttcaccgccggcagtgccacggttactccgaaactgaatggagtggctggcccggcattccaggtcataaaagacagtctgacactggggctgaatgcgctgacgttaactgatatcactaaaaatgccgcgtacggcgtcgatatcggcagcctggtgctggaaatcaataatcccgcagcataaggaagagcaggagagcaaaacagatgcttaagacaaacagtctgcgagagtccatgcttcatgggtgtcggtggtgccaggctaatcccgagaaattcaccattttcgtggagagcggcaacattgaaacgaccggagaagcgccctcgtttgtttaccgctatcagatggtgatgtttgtcatggattacgccggagagctggacgacctcacgctgccgctgctggcgtggttatccgaaaatcagccacagttgttgctcaatccggagcgtaatcaggacatcaaattttctgccgttatcaatgacgatgacagcgccgatctcctgtttacgctccccctgcgggaacgcgttcgcatcacgcgcagcagtcagggcacaccgcaggcagaacacctgccggagccaaaaccccgcctgccatcttccgaaggcgactggtcgcatgtattccaggatgtgacgtggggtgaaagcgatggataaggcattcacccgcgtggatgaaacctttgaggacatccgcgacagcctgaatcagcaggccatcaataacatcgccagaaagctggcacaggatttacgccgcgcccagcaggcgcgtatccggtcacagaaagcgccggacgggaccgcgtggacaccacgcagacgccgcgtaacccggatacaggagcgcattcgctttatctggaataacgaagcacgcacgctgaaaaactggcatcacgacacggggaaatacgggcgaaccattaccgggtgggatgaggataaaaacaatatccgcacgttttaccgggatgacatcgaccgctttctggaaatacgcacccggcgcatcaaccaggacagcacaaagcgcgtccccatgttcgtaaaactgcgcaccgcccgctacctgaaagcccgtgcagatgcttccggtgtgacggtgggttacagcggcgtggccgcacgtattgcccgcgttcatcagttcggtgagcgcgatcaggttgcgccgggcattttcaccgattacccggtacgtgagctgttgggcatcagtcaggcagatgaacgcctgatttataacacggtgctgggccggattgcggaggctgtacggtgagcgcagaactcatgcgactgctgagcaacatcatccgcactgggatcatctctgaagttgatgagaagtcctggtgcgtgcgcgttcgcagcggcgaactggaaacaggctggttgcgctggaacaccacgcgcgcgggagccttcaatgtgtggctgccgccatcacccggcgaacaggtggtaattgcctgcattggcggcaacccggaaaccgccatgataattggcagcctgtggagtgatgccaatccggcccccggcaaaagcctgaaagaaatcgtggtcagcgcgccggatggcgcggtgttccgctacgacgcggacgcaggcgcactgagcgccagcggcatgaaaacggccaccctgcaggcatccgtcagtgtgacactggacacgcccgtcgtggaatgcacagaccttctgagaacggcgacgcttgacgtcacaaaaggggnaagatgagcggcaatatcacgcacagcggcggcaatttcacctcaaacggcatcacagtgcatacgcataaacacggtggcgttaaaggtggcagcgattcgacaggaggcccgcagtgacaacccgctacacaggaatgaacccggacggaacgggaaacctgaacgatatggagcatctgaaacagtcagtcagggacatcctgaccaccccgctggcaagccgggttatgcgacgggaatatggcagccttgtgcccgatttaattgacgaacccatgaataacaccactcgtctgcaatgcatgagtgctgccgtgattgcgctgacacgatgggaaccccgcattgccctggacgccatcgacgttgtctggaaggcaggaggccgcgccggggtgacgctgtcgggcactgtcatgcagaccatgcagaatgttgaattaaccatcacgctgagggagtaaatcatgcctgccgttgacctttcccagttaccggaacccgccatcatcgcggagcctgactttgaggcaattctggctgacacaaaggccatgatgattgcgtcctatcctgccgaacagcgtgaagccgtctccgccgcgctggagctggaatcggaacccctgaacgttatcgcccagacaacagcgtttcgtgaaatgctgttacgccagcgggtcaatgagggggcacgcgcctgcatgttaagccacagcgccgggacagacctggacaacctcgcgggcaatatgaacacaaagcgcctgaccatcactccggcaacggataccgccgacgcagtgatggaaagtgacacctcgctgagactgcagggcgcagcgggcgtacgatggcctgagtgttgctggcccgtcaggtgcatacgagtattttgcccgcagcgccagcggtctggtgcgtgatgcgcgggctatcagtccgtctccggcaaatgtgacggtttccatcctgtccactgaaggcgacggcacagcaacggaggcgttgcttaataccgttcgcgccgttctgaatgcagaggatacccgcccggtggccgaccgccttactgtacagagcgccagaatcgtgacatggcggctgaatgcaaaactgtacttttaccccggcccggaatccgaacctattctggcggcggctgaatcgtcgttcaggaagtggctggctgagcaggggcttatcggtcaggacgtggcgttgtccgccattgctgccgcactgcatgtgcacggtgtgcaacgcgtggagataatcgaacccacacagaatatggccatcagcgacatacaggcggcgcgctgtgagtcgttcaccatcagcgaaggtgggcgcaatgagtaattcactgttaccaccatcagccagcagtttcatgcgttgtgccgaagctgtcggaacgcgcattacagacatcccggtagacctcaacacgctgtggtcgccggacacctgcccggtgcacctgctgccttatctcgcctgggcattttccgttgaccgctgggatcgcaactggccggaagagacaaaacgacaggtgattcgtgatgcatggctgatacaccgacacaaagggaccatcagcgcactgcgcagggccattgagccgctgggatacctcattcgcgtgtctgagtggtgggagttcggcggagaaccgggaacatttaccgttgaagtcggcacactggacagtggcgtgacggaggaaatgtatctggaaatggagcggttgattgctgatgcccgtccggtcagccgccacatgacagggctgaatatcattcaggaaattccgggggatatttttgcagcggcggcaacttatgacggtgaagttattaccatttatccggacgattaagcatgagtaccacaacacgaaaatttaaaaccgttatcaccgatacaggtgcccaaaaattagctcaggcagccgcgccagatggtaagcctgtccgcctgactcatatggccgtgggcgacggtggcggcgcgttgcccacaccagacagtaagcagacccgtctggtgcatgaggtgtggcgacacactgttaatcgcgtcatcctggacgcaacacatcagaaccgcattattgcggagctggttattcctccagaaacgggcggattctggatccgggaaattggtgtgtttgatgagcacggcgatttaatcgcggtgggcaatactgccgaaagttacaagccagccgttgccgaagggtccggacgtgcacaaacatttcgcaccattctgaccgtatccagcactgccactgtggcgcttaccgtggataacaccatggttatggccacagtggattacgtgaatgacaaactgaaagaacatgaacagtcacgacatcacccggacgcctcgctgaccgcaaaaggctttgttcaactcagtagcgccactaacagcgattctgaaacgctggctgcaacgccgaaagcggttaaggcagcgtatgacatggctaacggaaaatataccgctcaggacgccactacggcacaaaaaggnatagtccagctcagcagtgcaaccaacagtacatctgaaacgctggcggcaacatcaaatgcagtaaaagctgcctatgacaatgctgaaaaacgtctgcagaaagctaagaatggtgaggatatctctgataaagacacctttacgaaaaatatcggtgcctgccgtgcatatagtgcagagctgaatattggtggagatagtgaagcatggacaactgcgcagttgattttttggctagagagtcagggggcatttaaccatccttactggatgtgcaaaggctcatgggcttatgcaaataataaggtcattacagatacaggttgcggaagtatttgtcttgcaggtgctgttgtggaagttattggcacccgcggcgcaatgaccatacgcattaccacaccgagtacatccagcggtgaaggcatccctaatgctcaatttacttatattaatcatggtgatgcttatgctcctggctggcgaagggactataactccagaaataagccaacagcatcagagatcggggcgttaccgtcagatggaacagcagtatcatcagttaatctggcttcaaaaggtcggctaaccgccctgacagacaatacgcagggggcaacaggtctggagttatacgaggcgtataacaacggatatccaacaacgtatggaaatatcattcacctgaaagggatgacagccgttggcgaaggcgaattactcatcggctggagtggtacaagcggtgctcatgctccggcatttattcgttcacgacgggatatgaccgacgcaaactggtcgccgtgggcgcagctttacacctcggctcatcctcctgcagagttttatccagtcggtgcaccaatcccgtggccatcagataccgttccgtctggttatgccctgatgcaggggcagacttttgacaaatc

SEQ ID NO: 458 - DNA, 15423 bp, Escherichia coli
ttccgctggtgtgacaacatgctccatggcatggtgaatgatctcgtgacgcagcttctcgcgaacggtccgcccgtcagggatgttatccgccaccaggacaatttctcgtttatccggacgatagaatgcgtgcaccctgccgtaaccatcgaacaattcacccgccagcgcttcagcctctttctgtgacttcaccacacggaccttcaggtcactgtccttaatgccgctcatcacgccacgggcaaccgcttcaacctgcgggaccgggctgcctttggcttccgcactacggttaacatccgaaatgagattaccttcaggtgtgcgggtaacgcccttacgggaataaaacgcaacgcccttgtccgtctcacgggttttcagggtgcggaacaggtgatcgaatgcctcacgaataccgccatccagttccgcattcgtcggataagcccaggtgttatctgtgttgtgctcaggtgccttacggatattgaccagataatcattctccacgccagccatacgcgccttatcctgaacataacgctcaaaggcacgtgccgccatttcaacatccgttgaccagtacggttttgagcgcacctcatcgagaagcactgaacgacgcggcatgtcactgtttttaatggcctgaatcacacctttaaaagcatcgtaaacctcctgacgtaccggatattcagcatcaacatacctgccgtctttaaatatgcgcctgacacgctgtgcttccgtcataaagtcgccacctgacgtaattttcccgtcattggaaacgtcataacgaccaaaataattatccagagaatggaaccattcgtgcgccagcgcacccggtccgttaccttttgtcaggttgattgccacctcacccggctcatagtgtgctgccgccttacccttaccacgggcaccaaatgccaggccaagacgaccgttcagggaaagcgcttttgtcggtacattcaatacttccgcaaggtcatgcagcgagtcataagcccggttcaaatcagcctgacgacgcggaccttccacgtagttaccaaactgcacaccacggaaaccaaacgcatcactgaactgctccggtgaaacatcccctttacggcgttctggtccggtacggtcgcggttggtggcgttacgctgctcctcacgcgaaatctcccgcatctccttcacatgacgaacaagctcatcacgatgtgaatcaatgtacttacgcgcatcactggctgacttaaagccacctctcacccgcattttgtttttgccataagcgataaaaatatcgccactgcgggtattccggtaaacgtcaaagcggattttgtcatccggtgacggtgccgttttttcatctcctttcgcctgtgacttttcctccagctctgcaaaccagactttcgcctttgtcagtaattcatccctgctttccgagaaaaagaggttagtccccttattgtccttattgcgcagtgaataaagtttctgtggcggatcgtaacgcttccctcctgccgcctgatacacacccgataccacccgataagcagaagccttgtccatctgtgagggtggcagagtgcgtaacagttgccaggtatccgcgtaacgggagggcattctgccttccatccattctgcgaggcgtttcgcgctgaccgttccgttaagcatttccgatacactgtgtcgtactttttttacgctctccccccagccagccgtattgtgtttcgtcttcgccggaatatcgctacgatacagcgctatcattgccagggtgtcagcatcagccccttcgctcgccagttttgcgtagtccggtttcgggaacagtttgctcagcggctgcgtggcataatccctgtcttccagcgttttacccagtgtttcagcaagctgtgcataacggtgtttggctgcccctttaatttcctcgccaaagtcttcaatttttttgcccctgacttcacctccgcgcacagtagcttccctgtcagtagagacagttgtttcagattcaggtgcgattgtctcaggctgcgggatgtcacgatttcctccggcctgtcgacgtacttctgcctgctgtgcgagctcaggcaatgagttacgaacagttcggggaagctgatcaggctgaggcatacggacattgtgtgtaatgtccggagccggtagcccttcacgtaccggtgctgtcgcgttctgcgcatccggtgacggcagaccacgacgaaccatttcaccctcgagtgtttccccctggcgaccagcggcgttttccggtgccggagcttgtcctttctggaaactctggcccttaacctcaccggttgtggtaaaacgaccaccacgtccggcctgattttcatccggcgtacgcgccacttctcccggtaacggatatccctgtccgggatgaatatcgccgggagcgggcaggcgcggacgctcagttaactcctgtgctgtcggaccggcatcaccttcagccatctgtgaacgtacaagctcctccgccgtcggcgcgttgccacgggcaaggcgggcctgtacctccgtatcatcccccgtgaaaccacggaatcgcgggtcacgcatgaacgcgggctgctccatcgggtcagcatcagcaatacgctctctgtcagccagggtgttaatggtttccgttgccacatcttcagagaacgcaggattatccatttcaacggcatactgattctcgcctttcttcactacggacggtttcaggccggtggcggcggcattacggaaaacatcactccccatggcgcttttctcatccgtgaaataacggttgtccgggcgcaccttctcaatgcgttccgctggtctggacgcaccattcccgttaatttcaatgcggacttcattcgggtcccggaaccgcaccgtcgggtaaatgctcccgttaccatcctccgcattttcaggctgtgactgtgcttccggcgtcacttcctgttgtgggcgaatgacttctcgtattgcctgaaactgttgttcttcagtctcggtgcgcccctctttctggctgagtctgcggtattcctcaagcagttcagaacgcggcttcgccttcagctcattcatcacagcctgtcgcttcgtctgttcgtccagttcattcaacaactggctggcagcttcccggcgatgagctgcggatgcgtcaccctctgttgccatatccgcatcagcatactgctccagaagctgctcgcgattcatgccctgcatggattcacgctgctgcgccaccggatcaacagattctggttgcggggctgcgtcgtcctgctgcacggtttcagcatcacgcatggcggtttcttctgcggcctgacgtctgccacgatatccggcaaccgcaccgaatggagcccccatcgcagcaccaagggcagcaccttcgatcgttgcgtcagccacgccctcccatggcgatacatccattccggcggtctcacgcaatgccgtgttttcctgatagcgtgaatagccgccctgcgccgcattaatcgccccctgtgcagtggcatttctgacaatgccgcttttaacggtcttcgctgtgcctcgtgtcaccagattaaacagttgtgcgtcacccagttttgccgccatggcattcacagccagcaattcaggatcggttgccagctgcgcgcgcacctcatcggcaacacgctcttttgccagatccattttctggcgatcagtaagctgtgcgtgctgcgggtcggcgtcaatggacaaaaacgtctgctgaaatttcggtgactgcgccagctcagagtaatcagcattaagaacagcatctgctgccgccattgcactctgcccctgtgcacttacagtggaatgggtgatcaggcccgcctggaataaatccggcatttttttatcgacagcttctgctgccagtgccgtggctctttccggctgcatccctgccgcgatgtattttttctccagcccggcggtcagcatttttcgcagtgtgacatcacccacctttctagccacaccgccagcaaccatatcaggtacaagcgcaccaatcaggtttacacccttcgccacccagaccgcagaatcattatagccttcggtcatcggcgtattcagcgcacgaactgcacccggcgacatcttaccggtcagccattcatcagtggctttggcaccatcactgacagccttaccggttgccttcagacctttaccgacagtatcagtaaccgcgtttttgccatcaggcagggtatcgatgacctcatcagcccccctgctgccaccggcaaaaatatcctgcacagttgcgacacccggcagccccatacggctaaactcatttaaaatacgcgcccctgtttttaccgggctctgaatcatcgcatcaccgagtccacgggccatttcccctgttccccggacggactgggcgaaacctttacccattgttggcaatacatcgcccaggctgaacgacgtactgttatccttccagcgattcggatcagagaaaaatgcttcatagctgtcagtttcgccgggttgctgaatgttcaggctgttacgattctggttaccgagttgcgcctcaggacgctgttcctctgaataggccatacagactccataaaaaaacccggcacaatggccgggcatcaggaaatggtattaatggaatatcgtgaattactgggcgtaattctgtttcagtccacggataaactgagatgcagatgaagcactttcatctctggcctgttcccccctggccttttgaatacggagaaaattcgcatacccgttctccagcaatttctgattctgaggttccagcatttcaggctgacgggccgctacatttctggcaaatgacagcttatcaggatcatctcccgcccagttgataacctgttgctgaagtttttgttgctgaattttctgttgatgcggttgtgaaccagtcgcagcataatattcatccaccgcagcctgagcattaccgccattcttgatcgcgtccgccgctacgttgctggcccccttctgaagctctttcagagaaagtccctgctgcttcggcataaaataaccataatttttcgatatctctgcaaatttgctgcgatccctgacctgagcgatagccttatcaacgggtatcgccagcacggtttgatcatcagggtgcgcactgccgtattctgttacaggtttatgcgcggtggagccatcgctgtatgtgagatcaaggccaataagtacgtacccttcctgctgcgctggtacgatactgccaatcctggcctcttttatcgttttttccccggttgaatcaggcatgccaatacgctgttgtagttccggggcaaacacgccggaaagcacatcgagattttccggggtattcagcgaatcgatcgccatgtccggcttatcaccaaagattttttgcaggttgatcacggcctgacccgctttcgctgcatagccttcgtttgacataagaattaatggatgtccctttggcagctgcccgaacagacgcgttgcagcctcctgatcgccagcctcaattgcttttccaagcgcttccattagtggctggctatgggcaatcatatcgttatactcaagccgtcgctggttgtatttctgcaactggagtcgctgctgctccatacccagtgacgcattccggtaattctggttggcgttaaactccctttcctgcagtgcataattacggtcgtcgactttggctctgtaatcaaagttccgctgatcaacgtctttattatgttcaaactgcgactgtgcaaattcaaaatcgcgctcgttatttttctgttgttgagcaagctgtgcttctcgcaaaccaagttccttacgacgggtcattgcctggtcaaccgtgctgaatccggcaagtaaaccctgtgcaaatccgctcattcaccactccttaaaacaaagaaccagcaataccacctatgacagcaccaatagccgcaccggggagaccaccaacagcagcgcccatagctgcacccgtaccaattcccgtgccgatattctgtttgttctgtgctttctgttgcgccgccatcatcttgtttgacgcctcaatttcttcacgtcgtctgtctgcatcacttattccctgtaatgcctcacgccgtgactgattcgcaatatccagtaaaccgtatcccatatttcctccttaagctgacaccagttgtccgccaacactcagttgctgtcttgcaggtgcagaagcccccgtcagtatgttcatctgacgatcctgctctgcttcacggataccatttttcgcgccagcaattgccagggcattacgtaaccccagcgtattactgttgggattatcaggtcggttaacgccatatcgtgccatctggttatcctgcgccatctgcgctgtacggagactggaagtggcaaggccgcccacccgggcaagctgcgcattcatcaggctgttgttctcgccaaggtcagccagccttgccacgcggggcaaatatctggttcgccagtcgtcgtattgttggcgtgtcagcgctgctgacgtctgccagtcaccctgtgggcgggctgctcctgaataaccagcccttgcgagagtttcgtatttaccgtactccataatcacagtctccagttctgagcctgatgctgaatggcattagcgccggtgccaggtgttttagcaccgccacttcctccgctaccgccagccttatgcatcgcatatgcaccaaccgcacccagaccagcgccaacaagagaggctcgcccctgctgtttcgtaaacgcagcctgtgcatccgatttagcttttgccagactgctgtctgccagagagttaaaactctgtaacgcatccgccttctgaccagaaccgagagcagcaacatcctgtagcccggcaacatacttatctgcctgcgatacctgcccccgtgtggttgtgtcaatctgcccggttacctgatcactctggttcgcattcattaccgcgttaaagcgaccactggacgggtcaacaccggactgagcaagattacccgccagctccctccgcgcttcaccaaactgtttctgataaccaagatttgtggtgccagcaatattgtcgtactgctgctcactgttaaggtcatcgaccttttccatgaagttatcttcagccgggcggaggatattttgataatcctgccaccctttccaggccacttcttcctgtgctatttgcgctgctgttggttttactttggtatcaccaccgcctttttttccgcccattatggctcctcagataacaaaaaaccctgccggggcagggtcagaatgtgaattgcaattggtttacacacgataatgaatacagtggcagtcagaccgctatcctgaacaccatgaagccatcctcatcatccggcattcgctcaaagcccagacgttttcccagccggataaatccccgccttgccgtgtggaattcagcccagcgtccgccagccagacgggttaatgtcttcacctccggcagataacgctcaacaccggcactccccgtacacacacccagcaacaccagaacataagggataccgtcgtcactgagcacagaacgcagcaccagaaaaccatccggtgcctcaaagcaaaacgcctgctttttaaggcaggcgtctttaacttcattcataaattcagggttgcgggaatttctcacaacacgctgcatataccggagaattttgtcgtccattctctcaccagaaacgagtgccatatcggctgaacctcagcaaccagttgacgggaactttcgtccccgtcgcggttttcctactgcttacactgtaagaacgccgcaaactccgccccccacaaattcagccggagctcacacagcgaaccgtgtaacatccagatggtgaagattaccgtcatacaaattgtgacggtgatgagcgatttttgcgacatagcgcttgcctcctgagtggagaggcgctaaccttctacttgcttaaggtatgatggttagggcctcgggttaaacaaaatgtttgactcggggcctttccccacatcaggccttcaggttcaccttccagccatcagccgaaaggcacccgcgcataatctacgatttttgccctgcacgggcaacaaaaaacccgccatcacagcgggttatgacatgttgtcgggtattactcagaatttcaggccaatgcctgcaaataaaccatcagttttccagtcgccagagcctgagctttcataagtgacgtccatagtaacactttcattgaagttaaattgcgcgccgacagaccatgcaatagacgtttttttggtgctgttactttcagaaaaactaccggcaccatgattaagattgtcgttaattttcaagtcagtggtgacttttgcaacccccataccagccattgcatacacactgaggtattcgttaaaccgccacgaaggaccggatagtagactccagtaattagccctgatatcagttctcgctgaagctgccgggtttttacctctcgtgatggagcggaaggcttaacatcaataaatgcctgcgcattagtcatggagcgcgcccatgtaaaagaggctataacacccagttcatcagttatctcgtaacgatacctgatgctcatccccagggggcttttggctgtgccgtcatgcccccgggcaatagcattttcgtattcacctgatgaattaaaatggtttacgtttacaacattcctgaacgtatcccggttataaacacccgcgtctctaacaaaatccttcagcccggggaagcgtatgtgtgcaaacccgagagataccgtactatcgcctgatgctgcatttacctgtgcagttaagcaactcatcaccagaactgcacacgcaaaaaatttcatgatacttttcattttaagtatttctctgaattaaaggatgcgatgtctgaaaggaacgctttcgttttacactattaaagtttttcttacgctaatcatatattgaggaactaataaccagaactttatctatatacggctttcggatatcccatgttgcaccaccggaataatgctcacaggaatatattttatttcctgtagcaccagtagatgtggtgtaaatcggtcggtcataaggtgttcgtttccagttataatatccaaccagtgcaggcataattgcgcatggatatccaagatccttctcaaacttgatatcaactggtattaacttcgcgtcaagcagcatcatttcgccatggtaaatcatctcacccgacgggttatacatggcgataccatactcagaaggttgagtaaccatattcgcaaaagcataaacagtcgtaacaccgggattcgttcccctgacaatttgatgaagccttaaggcatgatatccatcaatctgttcatgcgtgtacatgacatcggccttcttctctgttctgataaagaaaaaacaactttttcctgacggaattgacgttttaaaaaaagccttctcagtcgccggaatagttcccttattgatcagacactgaggcgtaaaccccgggcttatccacaagctgccatctggtttcgtaatgcttaaaccatacatacaactcacccccagaatgtataaatatatgaccccatcccctgctcaagatttgaccacgtcaccgtattgccattaatggttatcttcggtactttccggtccttaaatacattattccacggaaataatgaacagactgcctgcaatgttttcccttctggtttattcgtatacgtttttgatcccgactccgccgtaaacctgtccaggaaaaatatgggagtaagcacgcccgtaacattaacgttatttctgttataaatggcaaaaccgtattccaatactcacctcctgatcagcgtaatctgcctatgcgaacagccagtcgtccattctgatcataaacctcaattttatcattgcggatcaccagtcctacattctgattagagtaacgaattgtcagttgcccttgtgacgtaacactgaaaaggcctccaatattcaggttaccctgagaatcaacctgaaagtttccgttctgaataacggcactccggataactggcgaagtgatacttaccccagcttttacctcatccgccacaaccttccgcgacaccagtgtttcaatcaccgcgtcataaatcatcgctttcgggatcacaaccttgccacctgataccgcaaacggataggcggtgttatccggattattcgggtcaaagacaaacaactgcgacgcagaaattgcaacctgacttacaggcctgccttcactgtcttttccggcgacaatcccgatccccgcagtgataccatcaactcccgctttttttgaccacatcgcaagaaacgcctcaccgccttctttatccagtttagtgatgcgcttgtcgacctcattaagcgattcactggttgacgaatccagtgtgctaatccgggtttcaataccaacaaccattcttgtcgtttcttccctgagagtccccacaacttcggttgtcttaattgcagcatcctttacagcctgcccctgcgcgttttttatttctttacgcagctcggacacaaccggcgactttgcagcctcatcgcggatctggtcaatgatggccttcacgccgatctgtgtttgtgcctgagtgcctttttcagcattccatggacctttcactcctgccgcgttaacaaaacgtatccagtaaaatcccgaccagccagggtcaaccggatcgccgtaaacctgccccggcgtcgtggcaaccagcactgcatcagcaaggtcatcctccgtaccccgccagatttcagtcagtgaatgtccgcgataattaggcatatcccattcaagaagaaccgagccaaatccacctgtcgccttaaaattcagcggttttgtgggaaaatcaacagtcattaaagtactgtcaatctcaatacccggattcagtgcatatgaggcaccacccgatgtacgacgccgggcaagtttaagaccaaccagctcctcacgggtcacaaaagcatgacgaccgtcaccacgctgcccggtgccaatttccatattctccacaacagcggataaatccttccccgcacgccacggttttctgctcataccggcaactccgacatcgatgtactcagggttattcgttccacctgcccaaatccggataccatcacctgccagttttgcccggttgctgccggaagtctcaccacacttcccttaaacgtacccggcgcaaaatgaataacaggaacatcatcaaccataacggtgatccccacccgctcaggcgccggagatttcaccctgatacaggaaaaagaggttctttcaggcaatgaaaaaatttttgaatgccaccttatcgtggacggcagagagcccccggcaagcactgacattttgtctcctgtcaccacgcgcatcatatctttcgcgagatcaacccatgcgcagtcaaacggtgtactgagataacggatatccatgttcaccggactgaagacaaacacatcctgcttaccatcaggtttcgtgtaacaggcaatgtactcaccacgccaggaataagccacaatggacgacggattaaactgactctgccactgttcaggtgaaataatcttttccgttaccacggctgtactaccgcctacatcaacagataccagaccatttgtcccggcatacagcacgaatccctccatcgccaccatacttcttcggctcaggcatgcctgcatggaaggaattctggaaccagaaattgtggacggtgataccccactgaacaaataaggctccccctttgtcgccaccaccagtgacgttcccagcggacagatagccacaatatcttctgccgtcgtgtgacgattcacttccggccatgcatacggcagatacgcttccgaaaacatcacttcattaccggcaaacccggcggcaataccgttagccatcaggcaaaggcctgtcatattctctggcggcggcaggtaatcccatgtcgccagggaaggcccaaggtttttcgccggtattttgtccgtgtaactgagcacggatgcatccagttcagccacaagtaaaaaatccgcctcccctccacctgatgcagagcgataaatccggcggcgtttaatactggcattctgcaatggcaccggagacagcgtcagctgtaccgcagtccccggagtacggagtgttacctccagagacgccggacctggcggaccttcttcaccataatctgagacaaaggtttccgtataaaaccgggtttcatcatcattcgggttatcgtcagaaacatcaccgccctgctggacagtacagacaggagctgtcgtcggcgcggggatcccaagacgatacgatgatgtcgggtgattcccgtccccttttgtggcaatagtcgcatccgtcactttaggaaaacgcccgtcagtgtagtaaatacgcccgtgggggtcctgagcgatcggactgcggatcacatccaccacatccggccatgcaaaccagaaatcgtcacggtaatgaaaaattgtttttggcttaattgtgaatgttttctcaaccccggatatctgacgttctggtgtaataacaccaaaccggaaatggcagtcctccgccagtacagcggaatgctcggacagcatggatgtcacaacgcgcggcatcatcccacgcatcgtggtgatatcgatatagggcatagaaattcctttgactgcttcaggcttaaaaatcaggggatttatgatggaattcgctaaaatcgcgatcggtatcactgcaacagagtgttgctatgatattctgggcaagacgtaacaactcactaattgttatcaaacttctttcttctggtcggggagcatgttgctcccctttttattgcatcattacggcagccactgcacagagcgttaccactgcacccagccacacaaaaatctcctgctgtgtagtgcttctttacgtatttcagatttgcctgtttcatgacaatttatcaattagcattagctaaacattttatacatagtatacgatttacattatttgagagcaggttgtgctgtcaaatgctccagctccaacccaacgccagttgtagtgatgccctgcatgatacaatttatacttcccgcttttcttaatcccataaattggcattatagtttcttccccacctaaatatgctttaccatggcaaagcggagttggcaaagatttgcaaccagataataatatcaatacagctaaaacacatttgtacattatcaactccttctaaaccttataaacagatatagtttttccgttttgattaaagagccagtttttagaaactattgcactataatgccgagtattgtttgcaaatgataatggtgtgaatgagatattggttccatcaaatgatagagtaaagttttgattaggcccgttcgttaagcccagatacatcttggtagagtcttgcgtttgagaaagatgcgtaattgaacaacctaacaacgaaccatttattgaaccagccggattttgtgtttgcacacggctggaaacggcagagccagcacctgtcgttgttgagttattagaataccctccatagttattgtttacaggaacaatttgtatatttgttgcctgaactaaaacaacaaaatttgaacgacctacagtgatagaaaagtcctgtacacttttcccaaccatttgcgacatataaaacggtgtacttagcttaagtttggcacctgccgatttcattgacctttcaccagttacactaacggcagaggagccaacccatccggaagcaacccccatttaacatcctcctgtcattcggacgataacaccaaccatcttctgcctcagactaatggttctctgttctctgattgttttattatttctctttaaggtcgctaatctctttacgcagattttttattccttcaactaacagcgcaataacaccattataatttaatcgaaatctctcttcaccagatatgatatctgtatcagatgtaactaactctggttgagcctttaacgcatcctgtgcaaataatcccacagattgttgccaactgccatcagcattctgtatttcatacaaataacccgttagcaagtcaagcttctccagacaattatctattcgtattgcatttcgcttgttgcgtttatccgaacggatctgaacatcgttaaatgagccgtttccggtcaccgtcaaattgccattaataccaccattaaaagtttgtgcctgagtccatgtattggcagtagtaagcagttctgttccttgcccgggggctcctgtgtctcccttcggtccctgtggccctgccggacctgctggtccagccacccccggatcgcctttgtcaccttttggcccctgtgcgcctgccgggcctgcggctcccgtatcccctttcggtccctgtgggcctgccggacccgtatcgcccttgtctcccttcgggccgggaacgccaccacctgcagcaacctcttctgccttctgtctcgccgccttggcctcatccattgccgccttcacagccttcgacgtggcagcctttgtttcgtcattactggcagtatcactacttagctgcacaattcccttctgtgccgtcgtcgcgtccaccacatttgctgcgctgcccgccggaccaggctccccgcgggggccctgaggcccagcttcgcctcgttcacctttcggacctgccggacctgtcgcaccggcatctcctttcggtccctgcggccccgccgggcctctctctcctgcaggtccgcgtagcccctgctctccctgaggccctcgttctcccggctcacctttttcacctgcgggaccggctggtccggtgtcacctttaggtcctgcatcacctttcggcccgggtggtccccccgggtctccgggggctcctttttcacctctggccccggtttcacctcgtggaccagcaggcccctgaatcccccgctctccttgcggccccaccggtcctgtttcaccgcgtggtccttgtgcgccttgtggacctgtttctccacgagggcctgcatcacctttcggtccggtatcacctttagggcctctggcattctctgccatacgcctggcctcttcagca

SEQ ID NO: 459 - DNA, 2765 bp, Escherichia coli
cataggcagattacgctgatcaggaggtgagtattggaatacggttttgccatttataacagaaataacgttaatgttacgggcgtgctgactccagtatttttcctggacagatttacagcggagtctggctcaaagacgtacactaataaacccgacgggaaatcattgcaggctgtatgttgtttatttccctggaataatgtatttgcggatcggaaagtaccgaagataaccattaatgacaatacggtgacgtggtcgaatcttgagcagggtatgggatcttatatttatacattctggggataagtgttatgtacggtttgagcattatgaagccggatggcagcgtatggataagtccaggttttacgccgcagtgtctgatcaacaaaggcaccataccggcgactgaaaagtctttttttaaaacatcaatcccgtcaggcaaaagttgttttttctttatcagaacagagaagaaggccgatgtcatgtacacgcatgaacagattgatggatatcatgcactaaggcttcatgtaattgtcaggggaacgaaccctggtgttacgacggtttatgctttcgcgaatatggttactccaccttctgagtatggtatcgccatgtataacccggacggtgagatgatttatcatggcgaaatgatgctgcttgacgcgaagttaatacctgttgatatcaaatttgaaaaggaccttggatatccatgcgcaatcatgcctgcactggtcgggtattataactggaaaagaactccttatgatcgaccgatttataccacatccactggtgctacaggaaataaaatatattcctgtgagcattattccggtggtgcaacatgggatattcgaaagccgtatatagataaggtcctggttattaatacatcagtatatgattagttgaagcgagtctttaatattcatttaaaatgtctaaaaagatgtattattaaaaagtttagcgtgttatctgaatacaggatatcttaaatgaagagtatagcaacactggttgtgtgtgcaatctccgggattgcctgtgtaaatttatctgcacatgcagcagaaggagagcatacaatttctctggggtatgcgcactttcagtttccgggactgaaggattttgtaaaggatgcgactgctcataacagggagactttcagtcatttcgtcaacagaaactacttttcttcattgggcgaatatacagatggtcgggtcagtggatatgaaggcaaggataaaaatccacagggcattaatatcaggtatcgctacgagataacggatgattttggcgttatcacctcttttacatggacgcgttctctcactaactcacagacatttattgatgtgcagtcagccgatcataccaggaagattaagaatccggcagcttctgccagaacggatatcagggcgaattactggagtctgttagcggggccttcatggcgggttaatcagtacatgagtttatatgcgatggcagggatgggcgttgctaaagttagcgctgacctgaaaattaaggacaatattaacagtagtggcggattttctgaaagcaacagcacgaaaaaaacctcccttgcgtgggctgcaggtgcacagtttaacctgaatgagagtgttacactggatgtggcttacgaaggttccggctctggcgactggcgcacgagtggcgttactgctggcattggcctgaaattctgacctgtatccggtaaccgtttactacccgctgtgatggcgggttttttattgcccgtacagggcaaaaaccgtaaattatgcgtggatgcctttcggctgatggctggagggtgaacctgaaggcctgatgtggaaaggccccgagtcaacttaacgttaacccgaggccctaacacttcgtaccttaagcaagtagaaggttagcgcctctctgtaaaaggagtcaagcgctatgtcgcaaaaatcgcttatcaccgtcacaatttgcatgacggttatcttcaccatctggatgttgcacggttcactgtgtgagttccggctgaatttgtggggagcggagtttgcggcgttcttacagtgtaagcagtaggaaaaccgcgacggggacgagagtccccgtcaactggttgctgaggttcagccgatatggcacccgtttcaggtgagagaatgaacgataaaattctctggtatatgcagcgtgttgtgagaaattcccgcaaccctgaatttatgaatgaagttaaagacgcctgccttaaaaagcaggcgttttgttttgaggcacctgatggctttttggtgctgcgttctgtgctcagtgctgatggtatcccttatgttctggtgttgctgggcgtgtgtacggggagtaacagcgttgagcgttacctgccggaggtgaagacattaacccatctggctggcggacgctgggctgagttccatacggcaaggcggggatttatccggctgggaaaacgactgggctttgagcgaatgccggatgatgaggatggcttcatggtgttcaggatagcggtctgactgctacagttttcatcattgtgtttaaaccaacattgtaattcacattctgaccctgctccggcagggttttttgttatccagggggccattatgggtggaagtaaaggcggtggtgataccaaagtaaaaccaacagcagcgcaaatagcacaggaagaagtggcctggaaa

SEQ ID NO: 460 - DNA, 423 bp, Escherichia coli
  modified_base (389)..(389): a, c, t, g, unknown or other
  modified_base (393)..(393): a, c, t, g, unknown or other
  modified_base (397)..(397): a, c, t, g, unknown or other
  modified_base (399)..(399): a, c, t, g, unknown or other
tcctgttgcgctactggctcaggttgttttgtttctggctcgttttgttgcgtatttgggctgttttgttccgctttctggtcgttctgttccgattcttgctggttctggtttacagaatcgcgggtttcaatcccctttacccatttcggatcattcgggtcgctaatccctgcaacaaattctccgcgagaggcagcaagcaacttatcggcgtcaggctggctgatattggctgcctgcataattttgtttacttcgtcagcggtaacttttaccggctctggttgtgcggtcgtgtcagatgcaccagtattttgttgtgaacctgagtacgtgccgtttttacgtgcgaagtattcctcttttgtgatttccgtagctcccanggcnagtncnttttccagaccagaaaatttgttt

SEQ ID NO: 461 - DNA, 8546 bp, Escherichia coli
cggtgggaacgggctactggttcctgcagttgctggacagggtttccccgtctcagtgggcggcaataggcgtgctggggagtctgctgtttggtctgctgacgtacctgacgaacctgtatttcaaaatcaaagaggacaggcgtaaggcggcacggggagagtaagctgatgagcaggaaactccgctatggtttatcagcggccgttctggcgctgattgccgcaggcgcttctgcgcctgaaatcctcgaccagtttctggacgaaaaagaaggcaaccacaccacggcataccgtgatggtgcgggtatctggactatctgccgcggtgccatcctggtggatgcaaacctgtcgttccgggcatgaagttgtcgaaggaaaaatgcgaccgggttaacgccattgagcgtgataaggcgctggcatgggtggagaaaaacatcagagtgccactgaccgaaccgcagaaagcgggcatcgcgtcattctgtccgtacaacatcgggccttcgaaatgcttcacctcaacgttttaccggaaactgaacgcaggagaccggaaaggtgcatgtgctgaaatccgccgatggatatatgacggcggcagggactgtcggaaccgctcaaataactgttacgggcaggtatcgcggcgtgaccaggagagcgcgctggcgtgctggagtatcgacagataagcagaatattctgctgaaaatgccgttgaccaacgcgaacggataacacgaaaccctgcgaactggcaaaatttaagtgagtaaaagtaaaaaccccgtttgttggcagcaagcggggttttgtgtttctgaccttgaataaggcaagggagaaattatgggtagggaggttctttccctgtgaggaagtataaaagattctttctgaggttgtccattatgaaaggcattgaggtggagacgccagcaagtctggatttaacaagagcggcagcttttgccattcgtattgtggcaattgctgttctggtctgggcaatccgttggtggtgatatgaatcgtgtgctgtatggcgtgcttattgtcctgctgcttggttgtggatcgctgtggctggcaacagaccattaccgtgataacgccatcacctacaaagagcagcgagatgatgcgaagacaaaactcagccaggcgaacgccaccattgctgacatacagcagcgccagcgtgatgttgctgcactcgatgccagatacactagggagcttgctgatgctaacgcgactattgaaagtctccgtgctgatgtttctgctgggcgtaagcgcctgcaagtcgccgccacctgtgcaaagtcaacgaccggagccagcggcatgggcgatggagaaagctcaggacttacagcagatgctgaactcaattattaccgtctccgaagtggaatcgacaagataaccgcgcaggttaactacctgcaggagtacatcaggatgcaatgcctcgattaacagagccagctcaatcgctggccttttttatgaggagagatataacctgaatcaatgccagtgcattatcaacaaatggatcactgggtaagctcgtttggttttaaatgtccgtcgagaatcagattgtgattttcccgatgcagaaccagtgtgcccatataatcaggtttaaatctccatccattcattttttttgcaattctggacagacagtgattatgtgtgaaaatcacagtaacatgatctgattttgatattttaaggatattatttactgcgttatcatcacatgtcgatatgtccggaatagttgctgtcttacctcccgaaaaaaaagtggctgtctgcattgttcggagtgtgtctgtagaatagagactgtagtatggaaacattcttctgaatttatctccatattgttgagctttgttagctccgtttactgtgattccctcatgtgctgaaagacatattctttgggagcgatcgcatctttccccatgccggatgagaaaaataatgggatgtttctggttaatctcagtgacatcgttcacatcaagtctgactggagttcttacaatgtatatgatggatacagaaacgattatgacaagtaaaaatataagaagagattttgttagcgtttgatttaacatataaattcccttgtctgtgttgaaaatgggcattattatgcgtaaatcttatgtaatccttaaggattgtctgacgtggtgatatgacgcgaaatacagtgggtacacagaatgctgtgaacaacgacgaaatgggcattggtagcggtactggtgctttttttattggttggttgctcaagtcttgataaagcgcgttagctttttggtattgcctcttaggtctgtaaaattgccgacggtgtccggcagtgcatgcaggctgatcgtctatgagaacagaatatattgctaaaaatgaagtgtgcgtcaatgcttataaagcatgcaattctgtatttctaactattcaataaaataaattctttctgtcgcagtgaatatacaaatgttgatcagcgctcgatgtggcgacgggtttctatatcaggagactttggcatttatccgcgaggcagcctatctggtgctgtagtggaatgaagcggatataacctaaataaggttaaacattaatcagacatggctctgctgtgtgaaatctgaaaatttacagcagtcattgtgcatcagtttttaacagagaacgtcagaaggtgacatggcaaagctggactggaaaaagctggagcaggcatttcgacgcgaacatgtcaaaaccggcataaagcttcaggactggtgccgtcagaacaatatcagttatgacacggctcggcggtacattaaactgcgcaaacactcccccagaaatacagagaaaagtgcgcagaaaaatgcgcaaattgatgatcaaaaaagtgcgcagaaatctgacggcaactccagtcatgacgagccttcaggcgatgatggttgtgatgaaaaatgcgcaaatttggcagaaacgaaacggactcgtggttccagacttttgccaccttcaaatgctttttctcagcgtaacacccacgccgtcagacaccgtggatacgcgaagtatctcgaggcagataacctcatagatgatgcagtcggaatggaacttgccgatgaactggtgtttacccgggcccgcgcactttcagtaacaggaacactgaaaaaaatgttcgccgacctgaaagaggcggctgacgtggaaacccgcgttgctctgtacgacaaaatactcaaagctgaacaggctcttgaccggaatattgcccgtatcgagtcaattgaacgctcattgctgacgctggacgttctggctgaaacagcaccaaaacttcgtgctgaccgggaaagaaccaacgctgccagagataaactcagagcggaaaccgatattctgaccagccagcgtcggggcgttgttacgcctgtcagtgacatcgtgtcatcgctgcatgaaatgagtaattcggggagactggatgacattccggaagaatgaaccgcgatgtgatgaaccgtcagaaatgacagaggccgaacaacgtctgttcatcatgactaaactgagcaatccctggtggcggctcaatcatctctacaaaatacagaacgaaaaaggtgaactggtcaccttcagaatgcgaccggcgcagcgccagttgttccggagcatgcacaataaaaatattatcctgaaagcacgccagctgggattttccacagccattgatatttatcttctcgaccaggcattattcataccgcatctcaaatgcgggatcgtcgctcaggataaacaggctgccagtgaaattttccgcacaaaaattgctgtaccgtttgatcatctccctgactggctgagagcctcattcaccatcgttgaacgtcgtagcggagccagcggtggctatatcctgtttgggcacggctcgagtatccaggtggcaacctcattccgttcaggtacggtgcagcgcctgcatatctcagagcacggcaaaatttgcgcaaaatatccggctaaggcgaaagagctgcgaaccggtacacttaatgccgtctctgatgagtgcattatttttgatgagtccactgctgaaggtgtgggtggcgatttttacgagatgagtaaccgggcacaggaaatcactgcatcagggctggcgctgacgccacaggattataaattccatttttacgcctggtggcaggatctcaaatacagcgccagagtgccggaaagcggactgaagctgtcacgggaaaaaacagcgtatttttctgcggttgaaaaagcaatgaacatcacgcttaccgatgagcagaaacactggtacatctgcaaggaaactgaacagcgtgaggaaatgaagcaggagtttccctcaacaccacaggaggcgtttctgacgtccggacgacgggtgttcagtgcggaaagcacgctgcaggcagagtcattctgttcgccaccgctgattgtttatgacattgaaccggttacaggaacgaagaccaaagcgcagtctctgcgtgacgggaataaagccgaacagcaccggacgctgatgaattatctgctggtctgggagctaccggatccggatgaagagtatgtatgcggagcggataccgctgaggggctggagcacggagaccgctcatcgctggatatcatcagatgtagtaatggtgagcaggtagcccactggtttggtcatctcgatgcggagcttttcgctcatctcattgcgcaggtctgccgtatgtacaacaacgcgtttgtggggccggagcgtaacaatcacggacatgccgttatcctgaaactccgggaactctatccgacgcgttatatctacaacgaacagcaccttgaccaggcatatgacgacgatacgccccgtcttggctggctgacaacccgccagagtaaaccggtcctgactgagggaatgaaaacgctgctgaataacggcctgtcggggatccgctggacgggcacattatcagaaatgaacacctacgtttatgacgcgaaaggctccatgaatgcacaggaaggctgttttgatgatcagcttatgagctacatgattgcccaggagatgcgcgccagaatgccggtgagggtaagacagaaaacggataaacgcagaaccacacactggatggctcactgatgaaaaatgaaactaataccatggcgacgaaaaacgacaacggagccacgccgcgtttttctcagcgccagttacaggcgctttgttctgatattgacagtcagcctaaatggcgcgatgccgcaaacaaggcctgtgcgtattacgatggtgaccagttgccaccagaagttcttcaggtactgaaagatcgcggtcagccgatgactatccataacctcatcgcgcctaccgttgatggtgttctgggaatggaggccaaaacacggactgatctggtggtgatgtcagacgaaccagatgatgaaactgaaaaactggctgaagctattaatgctgaatttgccgatgcatgccgccttggcaatatgaataaagcccgctctgatgcctatgcggaacaaatcaaggcggggctcagctgggtggaggtcagacggaacagcgatccgttcgggcctgagtttaaggtgtctactgtcagccggaaagaagtgttctgggactggctcagccgggaagctgatttaagtgactgccgctggctgatgcgccgccgctggatggataccgatgaggcaaaagccacattcccgggaatggctcaggttatcgattatgccattgatgactggcgtggttttgtcgataccacggttactgaaggccagcccagtccgttgatgagtgcatgggaagagtatcagtcatgggatcgacagcagaacgaatggcttcagcgtgaacgccgtcgtgtgctgcttcaggtggtttattaccgtacattcgagcgtcttccggtgattgaactcagtaatggacgggtggtggcctttgataaaaataatctgatgcaggcggtagctgtggcatccgggcgggtgcaggtgaaagtcgggcgggtaagccgtattcgtgaagcctggtttgtcggaccgcactttattgtggatcgcccctgcagtgcgccgcaggggatgttcccgctggttcccttctggggataccgaaaggataaaaccggggagccatacgggctaatttcccgcgccattccggcacaggatgaggtgaattttcgtcgtataaaactgacctggttgcttcaggccaaacgcgtgattatggacgaggatgccacccagttgtcagacaacgacctgatggagcagatcgaacgtccggatggcattattaaactgaatccggcccgaaaaaatcagaaaagcgtcgcagatgttttccgggttgaacaggattttcaggttgccagccagcagtttcaggtcatgcaggaatcggaaaaacttatccaggacaccatgggagtgtattccgcatttctcgggcaggattcaaatgcaacgtcaggcgtggcgatcagcaacctggtggagcagggagccacaacccttgccgaaatcaacgataactaccagtttgcctgccagcaggtgggaagactgttgctcgcttatcttctcgatggcctgaaaaagcggcgtaatcatgcagtggtgattaatcgcgatgatcgccagcgtcgccagaccattgtcctcaatgctgaaggtgataatggtgaactgaccaatgatatttcaaggttaaatacacatattgcgctggctcctgttcagcagacaccggcgtttaaggcacagcttgcacagcgaatgtcagaggttattcaggggctgccacctcaggtgcaggccgtcgtgctcgacctgtgggttaaccttctggatgtgccgcagaaacaggaatttgtcgaacgtattcgtgcggcgctggggacaccaaaatcaccggatgagatgaccccggaagagcagcaggccgctcagcagcaacaggcccaggagcagcaacaacaggaactgcagatgcgcgaaatggcaggccgggtggctaaactggaagcagaagctgccagggcacaggcagctgcgcaacgggataatgctggcgcacaacgggatgtcgccgcggcacagggacagcgttatgtggatgcgctcaaccaggcgcatacggcagaaatcattaccggcatacagaatatggaacaggagcaggaagttcttcagcaacagatgctgcatacactacaacagcggatgcatgaaatgccgctctgaaaatcctgaacttaacggaaccccgtcatcgtacggggttttttgtttccggagataagcgttccgggagcggtgcgcttattcgcgggggcagcgataagccttatttactcaaccattcggatctgtccgataaacagaccatgcggagttatttatggattttgaatttacgggtgaagaaaccccggaacaactggaaaaaatgctggaaggacttggggatgtggatattgacagtcacgaacaggacggcgtgacagaagacaccacagaaaaacatgcggatgaggaagcacagacacagacgggcgataacaatgcggcaccgacgccggatgccagtgcggagcagacgcaggacgtgaaggagccggaagcgaagggggtgctcacccgcgacggtaaacacgtcattccctatgaagtccttgaggctgaacgttccggtaagcaacgggccgaacaggaagccgcacttcttcggggacagatagccgaagaaaaacgcagggtggaactgctgacgtctcagatccaccaggccggtatgaaacccacaccgttaccggaaaacgaaaaaatctctgatgagaagattgcccgtatcagggagatgtatccggaaattggtgacgcggtggcttcgctcatccgtaaaaataactatctccagtcccgtgttcagcaatcagcacagcaggcagaaggtaatggtggtgaggatttatcaccggttcttgatgcgatgaatgccgtgccggtgctgaaaacgtggcaggagtccgatccagatcgcttctcggttgctgtatccatcgacgggaagctccagaatgaccccgcatggaaagacaaaacgctcactgaacgtttcgctgaagtggcccgtcgtacgcaggttgctttcggtgaagtcagtgagtcgtctgctgacaacaaggcagacaaaacggatatccggaaaacggcggaagagaaagtgaagaccgctgaacaggagcaggcagtacctgcttccccgtcagatttaggcaccacggcttccgtcggaaccggtgataattttgaacggttacttggcgcttctcattcagaggcagaggcgattatgcgcggtatgacgaatgctgaaatag

SEQ ID NO: 462 - DNA, 589 bp, Escherichia coli
gcaagagacagtgcaaccgccacaccgccacgtttaccccgtgcgcgggccagttcggaggcaaccacgaaagcgcccgtaatgtgattccataccagcctgtagcaggtattcagatgtcgtttcatcagcatttccttagattgagggtgaataaaaaagccggtacccacaaacgtggataccggcaggtaaagggttacagtgccggaggtccggctgtgggagtttctgaattgtggttctgttgttccctgaatgtctttctgtacgtatctgtgcatgttactgacaaaggttattattagcttatcgatcgatataaacgatcgataaaatagatattgatcgttttattctattattgagctattgcacggacaagagagacagtaacgaaaaaacagtgctttgtgagcagactcagagtcagggagggcatcagtcacgacaggttcagaagaaaatccagttccataccgcacgggcaacagagaccaccgtgtcacgaacagcgcgcagggccgtacggacaacagaggcaacacagacgctctccgctgtgtcaaatatccggtccaccgcaccg

SEQ ID NO: 463 - DNA, 692 bp, Escherichia coli
tggtggccgtgagcgcgtcatcacactgaggtcagataactcgtctgtcgggctcagctacgactgcagccaaagttgcgctcaccagtggcgtgagctttggtatgttccttcgccagatagtcagcacgttccagcacctgctgaaagccagtgtcatcatcgcgttccagccacaccgccgacgtgtcaggaaaatgcgccaacgtggcataaggcccggcatccacccccagggcactgcaccaggcctgtttaatcatcccggccagtgatctcggagcgcggtaatcgccggcacgacaccaggtatcccggttgaccagcagcaggaggtgatagtgttttttgcctttaagctccccgaattcccgggcccaggcgtaatgcagggtcgtgggatgtacgcgtttaccttcacggcgcttacgcttctggtaagcgttgattcgggctttcagggcattgatgaagcgggatatcacagctgcgtccgttgctgccggtacatccgggagacgcaggtcaacccgcaatgccgtcaggcggggatgaacatccagtgcgcgcagcaccgtctcacggatacgttgttgccagaaggggttgtactcgtgtgtcatggttaaatctccgtatggtttcgttcatacggaataaccacgctgtaaaaaatgtgcagagtccctgaa

SEQ ID NO: 464 - DNA, 2675 bp, Escherichia coli
  modified_base (206)..(206): a, c, t, g, unknown or other
aggagcaaagtatgcgattagtcagtcgttttggttatgctgcaaaccagatacgccgtgaccgtccgctgacacatgaagagctgatgcaccatgtgccggggattttcggagaagataaacacacatcccgaagccagaactatacgtacatccccaccatcaccgtgctggaaagcctgcagcgggaaggttttcagccattnttcgcctgccagacccgtgtgcgcgacccgggccgccggggatacacaaaacatatgctgcgtctgcggcgggccggagagataaacggagaacatgtccctgaaatcattctgctcaactcccatgacggtacctccagctaccagatgctgccgggttacttcaggttcgtctgtcagaacggatgcgtctgtggtcagtctctgggggaagtgcgtgttccgcatcggggaaatgtggtggacagagtcattgaaggggcttacgaggtggtgggcgtttttgaccggattgaggaaaagcgtgatgccatgcagtcgctggtcctgccgccaccggcacgccaggcgctggcacaggcggcgctgacttaccgttatggtgacgaacatcagcccgtcaccaccgccgacattctgacgccacgacgccgggaggattacggtaaggacctgtggagtgcttatcagaccatccaggagaatatgctgaaaggcgggatttccggtcgcagtgccagaggaaaacgtatccatacccgggccattcacagcatcgataccgacattaagctcaatcgcgcattgtgggtgatggcagaaacgatgctggagagcctgcgctgatgcagcatgtccctgaaggcgtgattcaggcaccagaatcacccgacgccccggaggcgctgccggggtgtcgttccatttctgatgatgacctgtgcacctggtgtacccgcctgctttaccgttccggagagctcagcctgtgcagactgagtacaggcaatggcatctgaccatccgtctgtgaccggaacggttacgcgtacagctgtccggaatttcagccgaatatcattcatccctgatattaccgggtctcacggtcagtgatgaacgtgatgttgccagctcccgacctttactccctctcatttattcacattacaaggatttcacacatgaaaacattgtctcagaacaccaccgcttcggcctgtgcaccggagactggcctgcaacaactggttgccaccattgtccctgatgaacagcgcatcagcttctggccgcagcattttggcctcattccacagtgggtcaccctggaaccccgtgtcttcggctggatggaccgtctttgcgaaaactactgcggtggtatctggaatctgtacaccctgaacaacggcggggcatttatggcccccgaaccggatgacgatgatgacgaaacatgggtactgttcaatgccatgaacggtaaccgcgcagaaatgagcccggaagccgccggcattgccgcctgtctgatgacgtacagccatcacgcctgtcgtacagagaattatgccatgacggtccattattaccagctgcgggattacgccctgcagcatccggaatgcagcgccattatgcgcatcatcgactgaatggagacaagcacaatgcaacaactttcctttctgcccggagagatgacgcccggcgagcgcagcctcattcaacgggccctgaaaaccctggaccgccatcttcatgaacccggcgtggccttcacctccacccgtgcagcacgggaatggctgattctgaacatggcgggactggagcgggaagaattccgggtgctgtatctgaacaaccagaataagctgattgccggtgaaaccctcttcaccggcaccatcaaccgcacggaagtccatccccgggaagtgattaaacgcgccctgtaccacaatgccgctgccgtggtgctggcacacaatcacccgtccggtgaagtcacacccagtaaggcagaccggcttatcaccgaacgtctggtacaggcactgggcctggtggatatccgggtgccggaccatctgatagtcggtggcaaccaggttttctcctttgccgaacatggtctgctttaacccgtcacaaccacatcacacctgttttcacttttatcttctgtcttcagaggtatcccattatgaaaatcatcacccgtggtgaagccatgcgtattcaccaacaacatccgacatcccgtctttttccgttctgtaccggcaaataccgctggcacggcagtgctgaagcgtataccggtcgtgaagtgcaggatattcccggtgtgctggccgtgtttgctgaacgccgtaaggacagttttggcccgtatgtccggctgatgagcgtcaccctgaactgagtcagggcattctgatgagcagaattatcgccaccaccggaccattcttaaccgattttctgtgaggactttatcgtgtcagacacacttcccgacgacaatcacgaccgcccctggtgggggctgccctgcaccgtgacgccctgtttcggcgcccgtctggtgcaggagggtaaccggttgcattaccttgccgaccgcgccggtatcagaggcctgttcagcgatgcagatgcgtaccacctggaccaggc

SEQ ID NO: 465 - DNA, 3269 bp, Escherichia coli
cattgaggcaattgaaaaccgctctcctccctgccttactcgctttcccgtcacatcctggaacatctgcgcaaactcacccgtcacgaacccgtgattggcattatggggaaaagcggggccggtaaatcctcactctgtaatgcactgtttcagggggaggtcaccccggtcagtgatgttcacgccggcacccgggaagtgcagcgcttccgtctgagtggacacggtcacagcatggttatcactgacctgcccggagtgggcgagagccgggacagggatgcagagtatgaagccctgtaccgtgacattctgcctgaactggacctggtactgtggctgattaaagccgatgaccgtgccctgtctgtggatgagtatttctggcgacacatcctgcaccggggacatcagcaggtgctgtttgtggtgacgcaggccgacaaaacggagccctgccatgaatgggatatggccggtattcagccttctcctgtacaggcacagaatattcgcgaaaaaacggaggcggtattccgtctgttccggcccgtacatccggttgtggccgtatcggcccgcaccggctgggaactggatacgctggtcagtgcgctaatgacagcacttcccgaccatgccgccagtcccctgatgacccgactgcaggacgagctgcgcacggaatctgtccgcgctcaggcccgtgaacagtttaccggtgcggtggaccggatatttgacacggcggagagcgtctgtgttgcctctgttgcccgtacggttctgcgtgccgtccgtgacacggtggtctctgttgcccgcgctgtatggaactggattttcttctgaacactctgccaggggaaatgcctgattacattgcgttaaccaactgaaaacatgatacaaacactccatccccctcctgtttctcttgcgtgactgccctgctgttaatagaataaaacgatcgataaaacaggtatcgatcgttaccatcgatcgtttatagtggttaatggtctgcgaaaaggcagctgaatctcttcatcatgcagaacggaattgcacacaacggactgatacttctctggcggatgagagaggggaagcatttatgtccgggaaaaaccactttatctgaccatgctgttttgtacctgccggtatccacttttgtgggtaccggcttttttattcaccctctgtaaggaaaagctgatgaaacgacatctgaacaccagctacaggctggtatggaatcacattacgggcaccctggtggtggcttccgaactggcgcgctcacggggaaaacgcaccggtgtggcgattgcgctgtctcttgctgctgtcacatcagttccggcactggctgctgacacggttgtacaggcgggagaaaccgtgagcggcggaacactgacaaatcatgacaaccagattgttctcggtacggccaacggaatgaccatcagtaccggtctggagtatgggccggataacgaggccaataccggcgggcaatggatacaaaatggcggtatcgccaacaacactactgtcaccggtggtggtcttcagagagtgaatgccggaggaagcgtttcagacacggttatcagtgccggaggcggacagagccttcaggggcaggcagtgaataccactctgaacggcggtgagcagtgggtacatgaaggcgggattgcaacgggtaccgtcattaatgagaagggctggcaggccgtcaaatccggcgcaatggcaaccgacacggttgtgaataccggcgcggaagggggaccagatgcagaaaatggtgataccgggcagtttgttcgcggaaatgccgtacgtaccaccatcaataaaaatggtcgtcagattgtggctgttgaaggaacagcaaataccactgtggtttatgccggcggcgaccagacggtacacgggcatgcgctggataccacactgaatggcggttaccagtatgtgcacaacggaggcacagcctctgacacggttgtaaacagtgacggctggcagattgtcaaggaaggtggtctggcggatttcaccaccgttaaccagaaaggcaaactgcaggtgaacgccggtggtacagccacgaatgtcaccctgaaacagggtggagcactggtcaccagtactgcggcaacggttcttggcagcaaccgtctgggcaatttcacggtggaaaacggtaaggctgacggcgttgttctggagtccggcggtcgcctggatgtactggaaggccattcagcgcagaaaacacgggtggatgacggcggaaccctggcagtgtctgccggtggtaaggcaacagatgtcaccatgacatccggtagtgccctgattgcagacagtggtgccactgttgaggggaccaatgccagcggtaagttcagtattgatggcacatccggtcaggccagcggactgctgctggaaaatggcggcagctttacggttaatgccgggggacaggccagcaacaccactgtcggacatcgtggaacactgatgctggctgccgggggaagtctgagtggcagaacacagctcagtaaaggcgccagcatggtactgaatggtgatgtggtcagtaccggcgatattgttaacgcaggggagatttactttgacaatcagacaacaccggatgccgtactgagccgtgctgttgcaaaaggcgactccccggtaacgttccataaactgaccaccagtaacctcaccggtcagggtggcaccatcaatatgcgtgttcgccttgatggcagcaatgcctctgaccagctggtgattaatggtggtcaggcaaccggcaaaacctggcttgcgtttacaaatgtcggaaacagcaacctcggggtggcaacctccggacagggtatccgggttgtggatgcacagaatggcgccaccacagaagaaggtgcgtttgccctgagtcgcccgcttcaggccggcgcctttaactacaccctgaaccgtgacagcgatgaagactggtacctgcgcagtgaaaatgcttatcgtgctgaagtccccctgtatacatccatgctgacacaggcaatggactatgaccggattctggcaggctcccgcagccatcagaccggtgtaaacggtgaaaataacagcgtccgtctcagcattcagggcggtcatctcggtcacgataacaacggcggtattgcccgtggagccacgccggaaagcaagcggca

SEQ ID NO: 466 - DNA, 3736 bp, Escherichia coli
cgtacttcggtccctcaatacgcacacgtccgtagacagcagtcttccctttcaccgtcaccgaaaccgcatactcccccggatccatcgtcattccgtaatatccaccttcacgggtcactgccgacgcactggtgccgctgagcgcatccggtgaaactgtcagcgccgtcagggtaatatttgctcctgatatcgcctcaccatcaggagatttcagcgtccccgaaacaacaacactcacactccacctccgttaaacacttttttacgggcagacaatgctctgtctgccccctgtttgatcccaagttgctcaacaaaactctgataatgctgcgcagccagccccgattctgcaccaccggcagcatccttactgaaagcacgaaacaacatccagtccaccagtgggttaacataagcctcttccagtggaactggcgtatcatcgtcctgcgtcagaacatacactgcctccggtatccggcttaccactgcatcaatacttatctctttgtcagggacaggaaacagccagaatacgcgcggggacaggtcgttgctgataaaacattcaggaatgcccttcactgtgggccactcaggatactgcgcatccagcacctcccgggataatggtctgactgcactaccgtcactgaggcatatcacgtcaagaagttgtattacaccatcgggcaaaacctgacgggcgccaggaacacaactgattgtttccaggcttgcgccagcatccggtctcgccagaatcactgccctcacagcatcattgtaataatcgcacaattcctgcaggggccagcgaaccatcatcgggtcaaccagttgtgtattcacacgtccgatgatttctgtaatcgtcgtcatcagaaaaacctctgcctgcgtacagggttgcggtatgaagagtacgggcttgtcgccagtgtatgacgatatgcccgacggatcccctcagaaaactgcacagaaaaatactgtgcgcgtaacggatctgaccatgaaacaccagtctgcatgaacaaccgctcaagtgcccccgcagccacttcttcaggccatgtgaggagttcatccggtatctggctgcgtccggctttcggagcgacggcataaagcacgctcacctcaccgggagaacaggcaaatcgcagggagcgtccggagctgatatccacatcccgaccgacaaaaagctcatgattatcgtcagagatacggatgatatgaacgcactcctcatcatctttgtcatacggaagcacgatttcttttcctgctactggtacaacagtaacctcccgacggcacaccaacgactggcggctgaatgccacggcagccattgacagagcatccgtcatcataatgttcagtggaccgctgatatgacgacggacatacggtaaaaaatcactcagttccgccatgctgttcagtctccgcaacacgacggcgaaatgcctcacgcacccggatacggaatgcctcagccgtttctttcgggtctttgtgaatatccagctcttctgcctcacacagcgtcgccagccgtgctgaggtgagcttacttaaatccacctcctgcccgttaacagaaacaacaaaactgttctccgcttctgcccgcgcagcaagcactctttcctgcgcctgctgtgcctgccgcaactgctcattctgttgttgctttttcagaacatcatcaagctcttcatgacgaacccagacatccggaaaccccagcagttgccaggccatcgcactgtcaacatgcaccggctcaagacgtgggaacaatgtgcggcttccggtaatggtgtcctttttcacgggttttgggccgatatagacaacggcaattttctcactcatataattccccggataaaaagcccgcatgacgcgggccggaaggttttaatcagtatcccaccacggtataacgcagcagaacattcagggtgccggttgcagcggcagtcttaatggtgacagtaaccagctccccgtcacgctgtgtggtgtacggctccactggcacatatctggcaaattttgcagaaacagcttcgctgttatcgatgagagcatgctcaccggacttaatgctgacggttgcagtacccagaccacccgttgaaaccagttggagtgagttgatacggatgcccactggcagtgagagaagatgaataacactgtccgcttccgcagcattcaccgtaaatacgccttctgccaccgactcattaccgtgcgtacccgtatagacccgttcactcagtgacggggcaaggatagtctttgccataattaatgactcctgaaaaagccgggcgaaaacccggcatagggaaaggaaaaaatcagagcttcactgctgtatcaacggcaatcacgccgtgatcctgcatcttgccgctcttctcggggaaacggatttttttcagaccgttgatccagctgattgctatctcagtacggttatccatatccgttttcttctcaaccatgttgaagtgaccgcccgccttctgaccgtaagcatttgccagcgcctgagcccccagtaacatggcgcggtcaatattggttgcagcagcgacctctttcgtggttgccgtcaggttattctctgataccagaacctttgacccctgatagaaacggatcggcatacccgcatacttacgaaccaggatattgcgccacatcgcacattcacctttgaacagcggatgattaaaaccttttgcacggttcacggcacgaaccatcatctggttccagtccttaccggacgtcgaggtgtaccagtcattccactgacgcggcgtgacgtacaggacgtaatatggatcttctccgtgaagttcatcaccggacagacgaaccggctgtaacggatgcgccatttcgtcaatgaacagggagagattgtccaccaggccaatagaaaaaatatctgccgcttcaatctgctcaaagcttgtcgcatcaccgccaaaaaagtgacggtcatgtgtcggaggcagtacatcgttgatcatgattttttgaattcagggtgctccgctgtcggcagaatagtgtcgtcagcaacaaaatcaccacgagctccagcaagatgcactatcgcacactggtcctgcaggtcattaaagtacgtccccagaagcgttctggctgaggatgccaagttaaacttcgtgcgctgctgactcatacgtccgcctgcatccaccaggtgacgtccctgattgattttcagggagaagtcagcatggctgagatcctcaccacgaccttcaacacgctcatctcccatcgtcgggcgttttgagagtttgtgcatgatgctgaaggtcacttcatcaccggcctgtttgttaaggtctgtgatacggacaaccggcgcacccgcgctggtctgcttcgtgcttttcttgtccggcgaaaccgcttttggcgcttcctgctgttcagtgaggatattgaccatcgagcggttgcggttggcagcggtaaaaagcgccacctgatacagcttattcgcctgggctgatgttacagtcgtcattacttcagttctccttcagtaagttacccgagcttctccagaagcgcgtctatttcagcattcgtcataccgcgcataatcgcctctgcctctgaatgagaagcgccaagtaaccgttcaaaattatca

SEQ ID NO: 467 - DNA, 376 bp, Escherichia coli
gctggctttacgcactacgggtaaggcgtccggtacgaattgccgtaagcgtttaatcaacagtatttctctgcgctccggtctgacataagggcactcatgaccatgctcagtcagcccgtcgtcagtgtgttcaaaccagggacgttcagtgtcgtattgcgggtggtatctgagagcactgccacaaaggtggcaggtgtaacgatcataaggcgcagtctgtgcggtacgggcaccggtcagacgtccgttgccatcaagtgcgagaaaagattttgcgtacatagtatatgttccttagcgccagacgacacgcaggcaacagccgtcccggtacgggcagcctggtctggtgtgaatggcggtttcagtc

SEQ ID NO: 468 - DNA, 1419 bp, Escherichia coli
ggaatacattgagattttctacaatcgtcagcgtcgtcactctcgtctggggaatatctccccggcagccttcagggaaaatatcatcagatggctgcttaaaaaagaacaaatggtagtgtccgctattgccagtacacctcaagcttcctgccatcgaccttaaactctgtgacatctgttacccacttttgatttgggcggtcagcataaaattgtctcttcagtaaattattacaagttcgcccctgttctccacgataggcacggtacttcttgcgcctgataagtgagctgatacccagttccttcattaactttctgatggttttaccattaagtaaaatgccctcgttacgtcaggcaagtctgatgcgtcgataaccataacgccctttatgctgatggtatattctcaatattacttgtttaacaagttgatatggatctggcgcattaaggcgtttcacgtgatagtaaaatgtactacgtggcaaatccgcgataaccagtaattgtgataatggatgacattgccttaactcattaataatgattactttttcctttgttccaatcgtaatttttcctgagctaaggctttcagctttttagataagcgttctcaactctcagaaactcaagttcttcccgttcactgattgtcagttgtgtcgaacgatttcgttgataaacagcaggagttttcggcctcaaatcttccttttgtcccttcatcgaaaaatcaatctcactgtattttttaatccatttggatatggtgttaaaagcagggatcccatacttcactgcagcttcccttatagaaagagaattatcaataacatctctgaccacattcaatctgaagttatcgtcataatgtcttttttgcccagtcagtgtttttaatccgtgcttacggtaaacataagcccatttccttaccgtgctggagtcaatattgtacatttttccaacagacttcaaactcagctcaccttccaggtatttttcggatacttcccttttgaattctaatgaaaatttgctcatacgctcctcagttacagatctggtgtctaactattggggcgcacttcagttgaaaaggtgggcacctacgttaccaatactggcttaatggctacatacggcggtcagtttacgcttaccatcagtgtcatgcccaaaccagacgggttaacggcagcaaagaaccttgcagaggcgttcgagcattataacgaatggcatccgcatagtgcgttgggttatcgctcaccacgggaatatctacggcagcaggccagtaacggattaagtgataacaggtgtctggaaatataggggcaaatccaaacagcaattaactattgctataataatatctattattttttttgttttgatttatca

SEQ ID NO: 469 - DNA, 718 bp, Escherichia coli
  modified_base (338)..(338): a, c, t, g, unknown or other
  modified_base (356)..(356): a, c, t, g, unknown or other
  modified_base (705)..(705): a, c, t, g, unknown or other
  modified_base (709)..(709): a, c, t, g, unknown or other
  modified_base (716)..(717): a, c, t, g, unknown or other
ggaaccgataaatcctgataaatatccatgaacaccaaaatcaaatatggcctgtcgctgccgttctggcgttgattgccatcggtgcgcctgcgcctgatattctcgaccagtttctggatgaaaaagaaggtaaccacacaacggcataccgtgatggtgcgggtatctggaccatctgccgcggtgccacaatggtggatggtaaacctgttattccgggcatgaaactgtcgaaggaaaaatgcgaccaggttaacgccattgaacgggataaggcgctggcatgggtggagaaaaacatcagagtgccattgaccgaaccccagaaagcgggnatcgcgtcattctgtccntacaacattggtcccggtaagtgtttcccgtcgacgttttataaacgaattaatgcaggcgatcgcaggggagcgtgtgaagcgattcgctggtggattaaggacggtggcagagactgccgtattcgctcaaataactgctacggtcaggtatcccgtcgcgaccaggagagtgcgctggcgtgctggggtatcgacagataagcagaatattttgctgaaaaataaggtatggccacgcgggcggataacacgaaatcctgcgaactggcgaaacgtaagtgaataaaagtaaaaaccccgtttgttggcaccaagcggggttttgtgtttctgaccttgagtaagncaanggagaannt

SEQ ID NO: 470 - DNA, 952 bp, Escherichia coli
tttgcggcagtgcactcagataccacccgcaatacgacactgaacgtccctggtttgaacacactgacgacgggctgacagcgcacggtcagcagtgtccttatgtcagaccggaacgcagggaggtacgcttgattcagcgtctgcagcaattcgtaccggatgccttacccgtagtgcgtaaagccagctggcactgcagacaatgtcaccacgattattatggggagcagtactgcacacactgccagacagggcgcttcagtgaggaggtggtagcagaatgaacggcataaaaacggggctggggatcacgccgggtgagcacattatcagtgccaactctgcgctcagcagaaatatccggcattgtttctgcctttcctgtcgtggccggttgattttgcagacagatgctcaaggggcgtggtttgagcatgatttacatgccctgagtgcgcaacagaaggcggccttgcagcccctggattaactatgcagaaatcgtcctgaggcactgataaatacggagaggactctcacgtatggttgattgacaccacagtgcgaattcggcgaatgcgagatcacagtacgattccgcaccacactaccaatcaataccccgggttttattcaggtaagcaggactgcggatatccggtgtcgcgccgttgtgtcacgaacggggcaggtgcgaaacaccggataaaatgcaggttgcgatacctctgaacgccctgcgcagagcggcgattttggattaagtactcgcgcctccgcagtcctcaaacaagtctggctggtagctgtaaacagacctcgtacataccgctctgcaataaatccccgtagcactgcgggcggtgatccagctcgcgcacgggctgggcatggatgtcattttcagaagacgactgcaccagttgattgggcgtaatggctgttgtgc

SEQ ID NO: 471 - DNA, 2394 bp, Escherichia coli
  modified_base (2327)..(2327): a, c, t, g, unknown or other
  modified_base (2366)..(2367): a, c, t, g, unknown or other
  modified_base (2370)..(2370): a, c, t, g, unknown or other
tcacgctccataaatgacaaaaccgcccgcaggcggtttcacataaaacattttgcatcagcgaccaatcaccacaacctgaccaccatccccttcatctgccgtgctgatctcctgagaaaccacacgagaccccacgcgcatttcaccgtacagaacaggcagaacattgccctgggcaaccatgttatccagtgaggagaaataggtgttctgcttaccgttatccgttgtctgtgtacggggagttctggctttcggtgccagcatctgcgccacaccaccaagcgtcatcgccgcacccattgaaaagagaatgtcactgaaagcgatactgatccccggcatccagattgccgtagcaatcaacgccgcacccagcaccgcctgaaacacaccgccactttttgctcccgcaagacgcggcacgatgtggatcacggcaccatttgccagcggctcattaagacgggatgataattcggtttctcctgcatcccgcccggcaatccgtacctgataccagccatcgctcagtttctgacgaaacgccgggagctgtgtggccagtgcccggatggcttcagcccccgttttcacacgaaggtcgatgcggcggccaaatcgttgcaaatccccgtaaaggcagatgcgtgccatgcccggtgacgccagagggagtgtgtgcgtcgctgccatttgtcggtatacctctctcgtttgctcagttgttcaggaatatggtgcagcagctcaccgtcgccgcagtaaatggcggcgtgattcggcaccgatgaaccaaaacagcacagcagcacatcgcccggctgcgcctctgtcagtgcgacacggtaaaaaccagtagcctccatattgtcaagatagagattctgaccgtgacgccaccagtcatccccgcgatgaaaatccggcatctcaatccccgccagatggtaagcatcccggaacagtgtgtaacagtccgtcaccccgtactcaaagcgccgcccggtgagatgcggcacacagcggaacttgtgaatcgccccccggcagaccagccaccacggcaaatcactctgcacctgcagccgccggtcagcctcactcagccagggcagaccaccggggtggctgtggaccagcgccacaatctcaccctgcatctctgcccgcagccagtcctccggagacatccggaaatacgcctccggctcaccggagatattcacgcagggaaaatatctttccccctccggcgttgctcaccacgaagccgcacgactccgctggcgcacatcgccgggcgtgcgccagaatcgctgattctgtctctgtcatgggatttactgcgaaagtttgttaatggaaaggaagccgccaaagttgccgacgttattgcgaaacttacagcccgctcaggcatttgctgcatttatccttcgtgatatcggacgtcggctggtcatattcatccgcgactgccggaccgtgataaccgcactcatcaccgcgataggtccaggtgcaggtgttggccagcatgatacgccccggaaaaacagcgccatccgtttccgtcggcgtggacagtacaaaggaggcactcaccgcgctcagttcgctgcactgctcgatgcgccagcggctgatcacctcctgctccggatcggcgtctctgtttccgttgacgaagttcaccgcatccagaaaacgggcgtaaaccttacgccggaccaccgttccgccgaccagactctgcatatcttccaccataccggtgaccatgccgtacaggttagaaaccgccagcgtgggccgcgtactggtgcctttgccattcagttcaaaaccgctcccctgaatgggatacggctgatactgtcgcccctgccaggtgaccggctcacctttttcgttctgctcattacagaaaaaataacgttctccaccgacctctgtcagatcgatttcccagagcaccacgctggccgactgctccgcacgggtgcattcattcagtgtttcctgccggatatcctgcatcagttcaccacctgttcaaactctgcgctgaactcaacacgcagcatactgacccgcgacgaccattttgcgccaggtcacctttatctgccgccactcataaggcggcgtccacagaaaggctttccagcccccgtgctcttccagaaacgactccagtaccgtggcctcctcacgggggacagaaagcgtcacgctgtacgttttcaggttggcattcagcccggcaggcgctcgctgagaatagccatcaccaaagcgcacctttcttacagaagggnccgaagccacatccataccgggtttcactttccagcggnnggncttcatcatccacctccggagaac
